United States Patent Application Publication US 2007/0214517 A1 - sequence listing, part 15

SEQ ID NO: 19489 - DNA, 1366 bp, Zea mays subsp. mays
  misc_feature (1)..(1366): Ceres Seq. ID no. 12383517
  misc_feature: MA Experiment ID: 108534 Result: Up-regulated in Transcription
  misc_feature: MA Experiment 108534 PARAMETER Experiment Name: Zm_4deg_Cold_P Parameter: Age (hr) Value: 8
  misc_feature: MA Experiment 108534 PARAMETER Experiment Name: Zm_4deg_Cold_P Parameter: Organism Value: Zea mays
  misc_feature: MA Experiment 108534 PARAMETER Experiment Name: Zm_4deg_Cold_P Parameter: Plant Line Value: 35A19
  misc_feature: MA Experiment 108534 PARAMETER Experiment Name: Zm_4deg_Cold_P Parameter: Temperature (deg C) Value: 4 vs. 22
  misc_feature: MA Experiment 108534 PARAMETER Experiment Name: Zm_4deg_Cold_P Parameter: Timepoint (hr) Value: 6
  misc_feature: MA Experiment 108534 PARAMETER Experiment Name: Zm_4deg_Cold_P Parameter: Tissue Value: Aerial
  misc_feature: MA Experiment ID: 108535 Result: Up-regulated in Transcription
  misc_feature: MA Experiment 108535 PARAMETER Experiment Name: Zm_Meristem_P Parameter: Age (day) Value: 8
  misc_feature: MA Experiment 108535 PARAMETER Experiment Name: Zm_Meristem_P Parameter: Organism Value: Zea mays
  misc_feature: MA Experiment 108535 PARAMETER Experiment Name: Zm_Meristem_P Parameter: Plant Line Value: 35A19
  misc_feature: MA Experiment 108535 PARAMETER Experiment Name: Zm_Meristem_P Parameter: Tissue Value: Root Meristem vs. Above Root Meristem
  misc_feature: MA Experiment ID: 108544 Result: Down-regulated in Transcription
  misc_feature: MA Experiment ID: 108556 Result: Down-regulated in Transcription
  misc_feature: MA Experiment 108556 PARAMETER Experiment Name: Zm_Drought_P Parameter: Age (day) Value: 9
  misc_feature: MA Experiment 108556 PARAMETER Experiment Name: Zm_Drought_P Parameter: Organism Value: Zea mays
  misc_feature: MA Experiment 108556 PARAMETER Experiment Name: Zm_Drought_P Parameter: Plant Line Value: 35A19
  misc_feature: MA Experiment 108556 PARAMETER Experiment Name: Zm_Drought_P Parameter: Timepoint (hr) Value: 24
  misc_feature: MA Experiment 108556 PARAMETER Experiment Name: Zm_Drought_P Parameter: Tissue Value: Aerial
  misc_feature: MA Experiment 108556 PARAMETER Experiment Name: Zm_Drought_P Parameter: Treatment Value: Drought vs. No Drought
  misc_feature: MA Experiment ID: 108597 Result: Down-regulated in Transcription
  misc_feature: MA Experiment 108597 PARAMETER Experiment Name: Zm_100uM_ABA_P Parameter: Age (day) Value: 9
  misc_feature: MA Experiment 108597 PARAMETER Experiment Name: Zm_100uM_ABA_P Parameter: Organism Value: Zea mays
  misc_feature: MA Experiment 108597 PARAMETER Experiment Name: Zm_100uM_ABA_P Parameter: Plant Line Value: 35A19
  misc_feature: MA Experiment 108597 PARAMETER Experiment Name: Zm_100uM_ABA_P Parameter: Timepoint (hr) Value: 24
  misc_feature: MA Experiment 108597 PARAMETER Experiment Name: Zm_100uM_ABA_P Parameter: Tissue Value: Aerial
  misc_feature: MA Experiment 108597 PARAMETER Experiment Name: Zm_100uM_ABA_P Parameter: Treatment Value: 100uM ABA vs. No Treatment
  misc_feature: MA Experiment ID: 20000478 Result: Down-regulated in Transcription
  misc_feature: MA Experiment 20000478 PARAMETER Experiment Name: Zm_5mM_SA_P Parameter: Age (day) Value: 11
  misc_feature: MA Experiment 20000478 PARAMETER Experiment Name: Zm_5mM_SA_P Parameter: Organism Value: Zea mays
  misc_feature: MA Experiment 20000478 PARAMETER Experiment Name: Zm_5mM_SA_P Parameter: Plant Line Value: 35A19
  misc_feature: MA Experiment 20000478 PARAMETER Experiment Name: Zm_5mM_SA_P Parameter: Timepoint (hr) Value: 72
  misc_feature: MA Experiment 20000478 PARAMETER Experiment Name: Zm_5mM_SA_P Parameter: Tissue Value: Aerial
  misc_feature: MA Experiment 20000478 PARAMETER Experiment Name: Zm_5mM_SA_P Parameter: Treatment Value: 5mM SA vs. No Treatment
  misc_feature: MA Experiment ID: 20000479 Result: Down-regulated in Transcription
  misc_feature: MA Experiment 20000479 PARAMETER Experiment Name: Zm_Drought_P Parameter: Age (day) Value: 10
  misc_feature: MA Experiment 20000479 PARAMETER Experiment Name: Zm_Drought_P Parameter: Organism Value: Zea mays
  misc_feature: MA Experiment 20000479 PARAMETER Experiment Name: Zm_Drought_P Parameter: Plant Line Value: 35A19
  misc_feature: MA Experiment 20000479 PARAMETER Experiment Name: Zm_Drought_P Parameter: Timepoint (hr) Value: 48
  misc_feature: MA Experiment 20000479 PARAMETER Experiment Name: Zm_Drought_P Parameter: Tissue Value: Aerial
  misc_feature: MA Experiment 20000479 PARAMETER Experiment Name: Zm_Drought_P Parameter: Treatment Value: Drought vs. No Drought
  misc_feature: MA Experiment ID: 20000480 Result: Down-regulated in Transcription
  misc_feature: MA Experiment 20000480 PARAMETER Experiment Name: Zm_Drought_P Parameter: Age (day) Value: 11
  misc_feature: MA Experiment 20000480 PARAMETER Experiment Name: Zm_Drought_P Parameter: Organism Value: Zea mays
  misc_feature: MA Experiment 20000480 PARAMETER Experiment Name: Zm_Drought_P Parameter: Plant Line Value: 35A19
  misc_feature: MA Experiment 20000480 PARAMETER Experiment Name: Zm_Drought_P Parameter: Timepoint (hr) Value: 72
  misc_feature: MA Experiment 20000480 PARAMETER Experiment Name: Zm_Drought_P Parameter: Tissue Value: Aerial
  misc_feature: MA Experiment 20000480 PARAMETER Experiment Name: Zm_Drought_P Parameter: Treatment Value: Drought vs. No Drought
  misc_feature: MA Experiment ID: 20000626 Result: Down-regulated in Transcription
  misc_feature: MA Experiment 20000626 PARAMETER Experiment Name: Zm_Herbicide-Treatments_P Parameter: Timepoint (hr) Value: 12
  misc_feature: MA Experiment 20000626 PARAMETER Experiment Name: Zm_Herbicide-Treatments_P Parameter: Tissue Value: Aerial
  misc_feature: MA Experiment 20000626 PARAMETER Experiment Name: Zm_Herbicide-Treatments_P Parameter: Treatment Value: Roundup vs. No Treatment
ataaaaaaaacccgaaaaaacaccgagatccgcgcgttcctcggcgtccgcacggcccgcgcacgcactcacgcacccatccggttgccaacccatcccccgaccgacgccaccccacatacatgccgccgcccagcctcaccgccgccggcaccaccaccaccacaacccgccgccgcaacgaccgagccgcgaaggtccaccaggtactgggcgaaggcgcggggacggaggagatgggcgcggtggcggacgggtggacgcggcccgagtggtgctcggcggcgggcgtcgcgggcgtgctgcggcggcacccggcgcccgcgctcttcgggtgcggcctcctgctcttcatggccgtcgagtacaccatccccatggtcaagccggacgcgccgccgctcgacctaggcttcctcgccaccgcgggcatgcacgccgccatcgccgcgaggccctggcttaactcgctcctcgccgcgctcaacacggtcttcgtcgcgatgcaggcggcgtacatcctgtgggccatcctcgccgagcagcggccgcgcgcggccgtcgccgcgctcatgatgttcacttgccggggcgtgctgggctgcgccacccagctcccgctgccggaggagttcctgggctccgggatggacttccccgtgggcaacgtctccttcttcctcttcttctcgggccacgtcgcgggcgcggtgatcgcggcggccgacatgcggcgcgaggggcggctggcgctggcgcgcctcttcgactcgctcaacgtgctccaggtggtcaggctgctcgcgtgcaggggacactacaccattgacctggcctgttggcgttggcgcgggcatcctcttcgacacgctctccggatggtacttcgacgccaagaacggcgatagcagcaacgcaccggagaagcagtgccggagctgccagtgccacaaggccctcctttcacactagtagtactattatattttgctagctctgcaagtgccaaccatcaacgtccaactggctgacaatgggctataaattttgcactataaaatttaagtatctaatcgggttaagattaggctctatttttagtcatttttgaactataatttattaagtgccttgacattttgtgaagaaccatatggatcacaatccattaccacccctacgtctaagtgagcattgttagctaattcgtgtcatttttttaagtttcttctcttttatggaatcattttggtgtaagataatgtattcaaatgctacttacggatatgtaactgtacaaattgttcgcccggtgcgagctgtaacatttttatctgaagtttgcaagtagaggactagactaggc

SEQ ID NO: 19490 - protein, 301 aa, Zea mays subsp. mays
  peptide (1)..(301): Ceres Seq. ID no. 12383518
  misc_feature (100)..(278): Homolog of NCBI NO: 15232701 NR Description: unknown protein; protein id: At3g15830.1
  misc_feature (91)..(278): Homolog of NCBI NO: 18400910 NR Description: expressed protein
  misc_feature (91)..(278): Homolog of NCBI NO: 13926235 NR Description: AT3g15820/MSJ11_22 [Arabidopsis thaliana]
KKNPKKHRDPRVPRRPHGPRTHSRTHPVANPSPDRRHPTYMPPPSLTAAGTTTTTTRRRNDRAAKVHQVLGEGAGTEEMGAVADGWTRPEWCSAAGVAGVLRRHPAPALFGCGLLLFMAVEYTIPMVKPDAPPLDLGFLATAGMHAAIAARPWLNSLLAALNTVFVAMQAAYILWAILAEQRPRAAVAALMMFTCRGVLGCATQLPLPEEFLGSGMDFPVGNVSFFLFFSGHVAGAVIAAADMRREGRLALARLFDSLNVLQVVRLLACRGHYTIDLACWRWRGHPLRHALRMVLRRQERR

SEQ ID NO: 19491 - protein, 261 aa, Zea mays subsp. mays
  peptide (1)..(261): Ceres Seq. ID no. 12383519
  misc_feature (60)..(238): Homolog of NCBI NO: 15232701 NR Description: unknown protein; protein id: At3g15830.1
  misc_feature (51)..(238): Homolog of NCBI NO: 18400910 NR Description: expressed protein
  misc_feature (51)..(238): Homolog of NCBI NO: 13926235 NR Description: AT3g15820/MSJ11_22 [Arabidopsis thaliana]
MPPPSLTAAGTTTTTTRRRNDRAAKVHQVLGEGAGTEEMGAVADGWTRPEWCSAAGVAGVLRRHPAPALFGCGLLLFMAVEYTIPMVKPDAPPLDLGFLATAGMHAAIAARPWLNSLLAALNTVFVAMQAAYILWAILAEQRPRAAVAALMMFTCRGVLGCATQLPLPEEFLGSGMDFPVGNVSFFLFFSGHVAGAVIAAADMRREGRLALARLFDSLNVLQVVRLLACRGHYTIDLACWRWRGHPLRHALRMVLRRQERR

SEQ ID NO: 19492 - protein, 223 aa, Zea mays subsp. mays
  peptide (1)..(223): Ceres Seq. ID no. 12383520
  misc_feature (22)..(200): Homolog of NCBI NO: 15232701 NR Description: unknown protein; protein id: At3g15830.1
  misc_feature (13)..(200): Homolog of NCBI NO: 18400910 NR Description: expressed protein
  misc_feature (13)..(200): Homolog of NCBI NO: 13926235 NR Description: AT3g15820/MSJ11_22 [Arabidopsis thaliana]
MGAVADGWTRPEWCSAAGVAGVLRRHPAPALFGCGLLLFMAVEYTIPMVKPDAPPLDLGFLATAGMHAAIAARPWLNSLLAALNTVFVAMQAAYILWAILAEQRPRAAVAALMMFTCRGVLGCATQLPLPEEFLGSGMDFPVGNVSFFLFFSGHVAGAVIAAADMRREGRLALARLFDSLNVLQVVRLLACRGHYTIDLACWRWRGHPLRHALRMVLRRQERR

SEQ ID NO: 19493 - DNA, 1285 bp, Zea mays subsp. mays
  misc_feature (1)..(1285): Ceres Seq. ID no. 13492017
  misc_feature: MA Experiment ID: 108528 Result: Down-regulated in Transcription
  misc_feature: MA Experiment 108528 PARAMETER Experiment Name: Zm_Imbibed_Seeds_P Parameter: Age (day) Value: 5 vs. 2
  misc_feature: MA Experiment 108528 PARAMETER Experiment Name: Zm_Imbibed_Seeds_P Parameter: Organism Value: Zea mays
  misc_feature: MA Experiment 108528 PARAMETER Experiment Name: Zm_Imbibed_Seeds_P Parameter: Plant Line Value: 35A19
  misc_feature: MA Experiment 108528 PARAMETER Experiment Name: Zm_Imbibed_Seeds_P Parameter: Tissue Value: Aerial vs. Embryo
  misc_feature: MA Experiment ID: 108529 Result: Up-regulated in Transcription
  misc_feature: MA Experiment 108529 PARAMETER Experiment Name: Zm_Imbibed_Seeds_P Parameter: Age (day) Value: 5 vs. 2
  misc_feature: MA Experiment 108529 PARAMETER Experiment Name: Zm_Imbibed_Seeds_P Parameter: Organism Value: Zea mays
  misc_feature: MA Experiment 108529 PARAMETER Experiment Name: Zm_Imbibed_Seeds_P Parameter: Plant Line Value: 35A19
  misc_feature: MA Experiment 108529 PARAMETER Experiment Name: Zm_Imbibed_Seeds_P Parameter: Tissue Value: Roots vs. Embryo
  misc_feature: MA Experiment ID: 108530 Result: Down-regulated in Transcription
  misc_feature: MA Experiment 108530 PARAMETER Experiment Name: Zm_Imbibed_Seeds_P Parameter: Age (day) Value: 6 vs. 2
  misc_feature: MA Experiment 108530 PARAMETER Experiment Name: Zm_Imbibed_Seeds_P Parameter: Organism Value: Zea mays
  misc_feature: MA Experiment 108530 PARAMETER Experiment Name: Zm_Imbibed_Seeds_P Parameter: Plant Line Value: 35A19
  misc_feature: MA Experiment 108530 PARAMETER Experiment Name: Zm_Imbibed_Seeds_P Parameter: Tissue Value: Aerial vs. Embryo
  misc_feature: MA Experiment ID: 108535 Result: Down-regulated in Transcription
  misc_feature: MA Experiment 108535 PARAMETER Experiment Name: Zm_Meristem_P Parameter: Age (day) Value: 8
  misc_feature: MA Experiment 108535 PARAMETER Experiment Name: Zm_Meristem_P Parameter: Organism Value: Zea mays
  misc_feature: MA Experiment 108535 PARAMETER Experiment Name: Zm_Meristem_P Parameter: Plant Line Value: 35A19
  misc_feature: MA Experiment 108535 PARAMETER Experiment Name: Zm_Meristem_P Parameter: Tissue Value: Root Meristem vs. Above Root Meristem
  misc_feature: MA Experiment ID: 108543 Result: Up-regulated in Transcription
  misc_feature: MA Experiment ID: 108545 Result: Down-regulated in Transcription
  misc_feature: MA Experiment 108545 PARAMETER Experiment Name: Zm_Imbibed_Seeds_P Parameter: Age (day) Value: 3 vs. 2
  misc_feature: MA Experiment 108545 PARAMETER Experiment Name: Zm_Imbibed_Seeds_P Parameter: Organism Value: Zea mays
  misc_feature: MA Experiment 108545 PARAMETER Experiment Name: Zm_Imbibed_Seeds_P Parameter: Plant Line Value: 35A19
  misc_feature: MA Experiment 108545 PARAMETER Experiment Name: Zm_Imbibed_Seeds_P Parameter: Tissue Value: Aerial vs. Embryo
  misc_feature: MA Experiment ID: 108546 Result: Up-regulated in Transcription
  misc_feature: MA Experiment 108546 PARAMETER Experiment Name: Zm_Imbibed_Seeds_P Parameter: Age (day) Value: 3 vs. 2
  misc_feature: MA Experiment 108546 PARAMETER Experiment Name: Zm_Imbibed_Seeds_P Parameter: Organism Value: Zea mays
  misc_feature: MA Experiment 108546 PARAMETER Experiment Name: Zm_Imbibed_Seeds_P Parameter: Plant Line Value: 35A19
  misc_feature: MA Experiment 108546 PARAMETER Experiment Name: Zm_Imbibed_Seeds_P Parameter: Tissue Value: Roots vs. Embryo
  misc_feature: MA Experiment ID: 108547 Result: Down-regulated in Transcription
  misc_feature: MA Experiment 108547 PARAMETER Experiment Name: Zm_Imbibed_Seeds_P Parameter: Age (day) Value: 4 vs. 2
  misc_feature: MA Experiment 108547 PARAMETER Experiment Name: Zm_Imbibed_Seeds_P Parameter: Organism Value: Zea mays
  misc_feature: MA Experiment 108547 PARAMETER Experiment Name: Zm_Imbibed_Seeds_P Parameter: Plant Line Value: 35A19
  misc_feature: MA Experiment 108547 PARAMETER Experiment Name: Zm_Imbibed_Seeds_P Parameter: Tissue Value: Aerial vs. Embryo
  misc_feature: MA Experiment ID: 108556 Result: Down-regulated in Transcription
  misc_feature: MA Experiment 108556 PARAMETER Experiment Name: Zm_Drought_P Parameter: Age (day) Value: 9
  misc_feature: MA Experiment 108556 PARAMETER Experiment Name: Zm_Drought_P Parameter: Organism Value: Zea mays
  misc_feature: MA Experiment 108556 PARAMETER Experiment Name: Zm_Drought_P Parameter: Plant Line Value: 35A19
  misc_feature: MA Experiment 108556 PARAMETER Experiment Name: Zm_Drought_P Parameter: Timepoint (hr) Value: 24
  misc_feature: MA Experiment 108556 PARAMETER Experiment Name: Zm_Drought_P Parameter: Tissue Value: Aerial
  misc_feature: MA Experiment 108556 PARAMETER Experiment Name: Zm_Drought_P Parameter: Treatment Value: Drought vs. No Drought
  misc_feature: MA Experiment ID: 108559 Result: Down-regulated in Transcription
  misc_feature: MA Experiment 108559 PARAMETER Experiment Name: Zm_5mM_NO_P Parameter: Age (day) Value: 8
  misc_feature: MA Experiment 108559 PARAMETER Experiment Name: Zm_5mM_NO_P Parameter: Organism Value: Zea mays
  misc_feature: MA Experiment 108559 PARAMETER Experiment Name: Zm_5mM_NO_P Parameter: Plant Line Value: 35A19
  misc_feature: MA Experiment 108559 PARAMETER Experiment Name: Zm_5mM_NO_P Parameter: Timepoint (hr) Value: 12
  misc_feature: MA Experiment 108559 PARAMETER Experiment Name: Zm_5mM_NO_P Parameter: Tissue Value: Aerial
  misc_feature: MA Experiment 108559 PARAMETER Experiment Name: Zm_5mM_NO_P Parameter: Treatment Value: 5mM NO vs. No Treatment
  misc_feature: MA Experiment ID: 20000477 Result: Down-regulated in Transcription
  misc_feature: MA Experiment 20000477 PARAMETER Experiment Name: Zm_5mM_SA_P Parameter: Age (day) Value: 10
  misc_feature: MA Experiment 20000477 PARAMETER Experiment Name: Zm_5mM_SA_P Parameter: Organism Value: Zea mays
  misc_feature: MA Experiment 20000477 PARAMETER Experiment Name: Zm_5mM_SA_P Parameter: Plant Line Value: 35A19
  misc_feature: MA Experiment 20000477 PARAMETER Experiment Name: Zm_5mM_SA_P Parameter: Timepoint (hr) Value: 48
  misc_feature: MA Experiment 20000477 PARAMETER Experiment Name: Zm_5mM_SA_P Parameter: Tissue Value: Aerial
  misc_feature: MA Experiment 20000477 PARAMETER Experiment Name: Zm_5mM_SA_P Parameter: Treatment Value: 5mM SA vs. No Treatment
  misc_feature: MA Experiment ID: 20000478 Result: Down-regulated in Transcription
  misc_feature: MA Experiment 20000478 PARAMETER Experiment Name: Zm_5mM_SA_P Parameter: Age (day) Value: 11
  misc_feature: MA Experiment 20000478 PARAMETER Experiment Name: Zm_5mM_SA_P Parameter: Organism Value: Zea mays
  misc_feature: MA Experiment 20000478 PARAMETER Experiment Name: Zm_5mM_SA_P Parameter: Plant Line Value: 35A19
  misc_feature: MA Experiment 20000478 PARAMETER Experiment Name: Zm_5mM_SA_P Parameter: Timepoint (hr) Value: 72
  misc_feature: MA Experiment 20000478 PARAMETER Experiment Name: Zm_5mM_SA_P Parameter: Tissue Value: Aerial
  misc_feature: MA Experiment 20000478 PARAMETER Experiment Name: Zm_5mM_SA_P Parameter: Treatment Value: 5mM SA vs. No Treatment
  misc_feature: MA Experiment ID: 20000479 Result: Down-regulated in Transcription
  misc_feature: MA Experiment 20000479 PARAMETER Experiment Name: Zm_Drought_P Parameter: Age (day) Value: 10
  misc_feature: MA Experiment 20000479 PARAMETER Experiment Name: Zm_Drought_P Parameter: Organism Value: Zea mays
  misc_feature: MA Experiment 20000479 PARAMETER Experiment Name: Zm_Drought_P Parameter: Plant Line Value: 35A19
  misc_feature: MA Experiment 20000479 PARAMETER Experiment Name: Zm_Drought_P Parameter: Timepoint (hr) Value: 48
  misc_feature: MA Experiment 20000479 PARAMETER Experiment Name: Zm_Drought_P Parameter: Tissue Value: Aerial
  misc_feature: MA Experiment 20000479 PARAMETER Experiment Name: Zm_Drought_P Parameter: Treatment Value: Drought vs. No Drought
  misc_feature: MA Experiment ID: 20000480 Result: Down-regulated in Transcription
  misc_feature: MA Experiment 20000480 PARAMETER Experiment Name: Zm_Drought_P Parameter: Age (day) Value: 11
  misc_feature: MA Experiment 20000480 PARAMETER Experiment Name: Zm_Drought_P Parameter: Organism Value: Zea mays
  misc_feature: MA Experiment 20000480 PARAMETER Experiment Name: Zm_Drought_P Parameter: Plant Line Value: 35A19
  misc_feature: MA Experiment 20000480 PARAMETER Experiment Name: Zm_Drought_P Parameter: Timepoint (hr) Value: 72
  misc_feature: MA Experiment 20000480 PARAMETER Experiment Name: Zm_Drought_P Parameter: Tissue Value: Aerial
  misc_feature: MA Experiment 20000480 PARAMETER Experiment Name: Zm_Drought_P Parameter: Treatment Value: Drought vs. No Drought
agcaacagccatgacgacgacgaagcggcactgcttgcgcttcaccaccgtcctggcgacgacgcttctctccgccaccgccgcctgcctcgacgtcggcttctacgacaggacatgccccactgccgagaccatcgtgcagcagaccgtggcggccgcgttcaggaacaactccggcgtcgctccggcgctgatccgcatgcacttccatgactgctttgtcaggggctgcgatggctcggtgctgatcgacacggtaggcaacctgacggcggagaaggacgcgccacccaacaaccccagcctccggttcttcgacgtggtcgaccgtgccaaggcgtcactggaggctcagtgccccggcgtggtctcctgcgccgacgtgctcgccttcgcggccagggacagcgtcgtgctctccggtggcctcggctaccaggtgccgggcggacgccgtgacgggcggatatccaatgacaccgaagccctcaacaacctgcctccgccgttcttcaacgccaccgagctggcagacaggttcgcctccaagaacctcactatcgaggacctggtcgtgctctcgggcgcgcacaccatcggcgtctcgcactgcagcggcttcgccggcccgacagacctgaacggccccgttgaccggctctacaacttcagctcgcctgacgggattgacccgacgctgagcaaagcctacgcatttcttctcaagagcatctgcccggccaacaccagccagttcttcccgaacacgacggtgttcatggacctcatcacgccggaaaggtttgacaacaagtactacgtcggcctgaccaacaacctgggcctcttcaagtcagacgtggcgctgctgaccaacgcgacgatgaaggccctggtcgactccttcgtgcgcagcgaggcgactttcaggaccaagtttgccaggtccatgatcaagatggggcagatcgaggtgctgacggggacgcagggcgagatcaggcgcaactgcagggtcatcaaccccgttagtgccaccgatgatgtcgtcctcgcccgcccatcaggattcactggagtggctgcgagctagctaaccaactgtcggttcatgcacatgcattgtgcagtgtgtgatgtctagtgtgagttgatgtgtgaaattgtaataagtaatgagcagattatcttggtaagctcgcttgttactgtggcaaaagttgttttgttgcatgacaaaaatgtatactcatcggattattgaaaacaaaactgatatttgttc

SEQ ID NO: 19494 - protein, 363 aa, Zea mays subsp. mays
  peptide (1)..(363): Ceres Seq. ID no. 13492018
  misc_feature (46)..(305): Pfam Name: Peroxidase Pfam Description: Peroxidase
  misc_feature (3)..(361): Homolog of NCBI NO: 21594792 NR Description: peroxidase [Arabidopsis thaliana]
  misc_feature (32)..(363): Homolog of NCBI NO: 12056448 NR Description: peroxidase [Zea mays]
  misc_feature (28)..(341): Homolog of NCBI NO: 4760700 NR Description: peroxidase 1 [Scutellaria baicalensis]
  misc_feature (12)..(341): Homolog of NCBI NO: 7453849 NR Description: peroxidase prx12 precursor [Spinacia oleracea]
  misc_feature (22)..(346): Homolog of NCBI NO: 34894758 NR Description: putative peroxidase [Oryza sativa (japonica
  misc_feature (18)..(346): Homolog of NCBI NO: 34894760 NR Description: putative peroxidase [Oryza sativa (japonica
  misc_feature (19)..(363): Homolog of NCBI NO: 34894748 NR Description: putative peroxidase [Oryza sativa (japonica
  misc_feature (11)..(351): Homolog of NCBI NO: 34894752 NR Description: putative peroxidase [Oryza sativa (japonica
  misc_feature (24)..(351): Homolog of NCBI NO: 34894766 NR Description: putative peroxidase [Oryza sativa (japonica
  misc_feature (7)..(363): Homolog of NCBI NO: 12056452 NR Description: peroxidase [Zea mays]
ATAMTTTKRHCLRFTTVLATTLLSATAACLDVGFYDRTCPTAETIVQQTVAAAFRNNSGVAPALIRMHFHDCFVRGCDGSVLIDTVGNLTAEKDAPPNNPSLRFFDVVDRAKASLEAQCPGVVSCADVLAFAARDSVVLSGGLGYQVPGGRRDGRISNDTEALNNLPPPFFNATELADRFASKNLTIEDLVVLSGAHTIGVSHCSGFAGPTDLNGPVDRLYNFSSPDGIDPTLSKAYAFLLKSICPANTSQFFPNTTVFMDLITPERFDNKYYVGLTNNLGLFKSDVALLTNATMKALVDSFVRSEATFRTKFARSMIKMGQIEVLTGTQGEIRRNCRVINPVSATDDVVLARPSGFTGVAAS

SEQ ID NO: 19495 - protein, 360 aa, Zea mays subsp. mays
  peptide (1)..(360): Ceres Seq. ID no. 13492019
  misc_feature (43)..(302): Pfam Name: Peroxidase Pfam Description: Peroxidase
  misc_feature (1)..(358): Homolog of NCBI NO: 21594792 NR Description: peroxidase [Arabidopsis thaliana]
  misc_feature (29)..(360): Homolog of NCBI NO: 12056448 NR Description: peroxidase [Zea mays]
  misc_feature (25)..(338): Homolog of NCBI NO: 4760700 NR Description: peroxidase 1 [Scutellaria baicalensis]
  misc_feature (9)..(338): Homolog of NCBI NO: 7453849 NR Description: peroxidase prx12 precursor [Spinacia oleracea]
  misc_feature (19)..(343): Homolog of NCBI NO: 34894758 NR Description: putative peroxidase [Oryza sativa (japonica
  misc_feature (15)..(343): Homolog of NCBI NO: 34894760 NR Description: putative peroxidase [Oryza sativa (japonica
  misc_feature (16)..(360): Homolog of NCBI NO: 34894748 NR Description: putative peroxidase [Oryza sativa (japonica
  misc_feature (8)..(348): Homolog of NCBI NO: 34894752 NR Description: putative peroxidase [Oryza sativa (japonica
  misc_feature (21)..(348): Homolog of NCBI NO: 34894766 NR Description: putative peroxidase [Oryza sativa (japonica
  misc_feature (4)..(360): Homolog of NCBI NO: 12056452 NR Description: peroxidase [Zea mays]
MTTTKRHCLRFTTVLATTLLSATAACLDVGFYDRTCPTAETIVQQTVAAAFRNNSGVAPALIRMHFHDCFVRGCDGSVLIDTVGNLTAEKDAPPNNPSLRFFDVVDRAKASLEAQCPGVVSCADVLAFAARDSVVLSGGLGYQVPGGRRDGRISNDTEALNNLPPPFFNATELADRFASKNLTIEDLVVLSGAHTIGVSHCSGFAGPTDLNGPVDRLYNFSSPDGIDPTLSKAYAFLLKSICPANTSQFFPNTTVFMDLITPERFDNKYYVGLTNNLGLFKSDVALLTNATMKALVDSFVRSEATFRTKFARSMIKMGQIEVLTGTQGEIRRNCRVINPVSATDDVVLARPSGFTGVAAS

SEQ ID NO: 19496 - protein, 297 aa, Zea mays subsp. mays
  peptide (1)..(297): Ceres Seq. ID no. 13492020
  misc_feature (1)..(239): Pfam Name: Peroxidase Pfam Description: Peroxidase
  misc_feature (1)..(295): Homolog of NCBI NO: 21594792 NR Description: peroxidase [Arabidopsis thaliana]
  misc_feature (1)..(297): Homolog of NCBI NO: 12056448 NR Description: peroxidase [Zea mays]
  misc_feature (1)..(275): Homolog of NCBI NO: 4760700 NR Description: peroxidase 1 [Scutellaria baicalensis]
  misc_feature (1)..(275): Homolog of NCBI NO: 7453849 NR Description: peroxidase prx12 precursor [Spinacia oleracea]
  misc_feature (1)..(280): Homolog of NCBI NO: 34894758 NR Description: putative peroxidase [Oryza sativa (japonica
  misc_feature (1)..(280): Homolog of NCBI NO: 34894760 NR Description: putative peroxidase [Oryza sativa (japonica
  misc_feature (1)..(297): Homolog of NCBI NO: 34894748 NR Description: putative peroxidase [Oryza sativa (japonica
  misc_feature (1)..(285): Homolog of NCBI NO: 34894752 NR Description: putative peroxidase [Oryza sativa (japonica
  misc_feature (1)..(285): Homolog of NCBI NO: 34894766 NR Description: putative peroxidase [Oryza sativa (japonica
  misc_feature (1)..(297): Homolog of NCBI NO: 12056452 NR Description: peroxidase [Zea mays]
MHFHDCFVRGCDGSVLIDTVGNLTAEKDAPPNNPSLRFFDVVDRAKASLEAQCPGVVSCADVLAFAARDSVVLSGGLGYQVPGGRRDGRISNDTEALNNLPPPFFNATELADRFASKNLTIEDLVVLSGAHTIGVSHCSGFAGPTDLNGPVDRLYNFSSPDGIDPTLSKAYAFLLKSICPANTSQFFPNTTVFMDLITPERFDNKYYVGLTNNLGLFKSDVALLTNATMKALVDSFVRSEATFRTKFARSMIKMGQIEVLTGTQGEIRRNCRVINPVSATDDVVLARPSGFTGVAAS

SEQ ID NO: 19497 - DNA, 2024 bp, Zea mays subsp. mays
  misc_feature (1)..(2024): Ceres Seq. ID no. 12375886
  misc_feature: MA Experiment ID: 108522 Result: Down-regulated in Transcription
  misc_feature: MA Experiment 108522 PARAMETER Experiment Name: Zm_42deg_Heat_P Parameter: Age (day) Value: 8
  misc_feature: MA Experiment 108522 PARAMETER Experiment Name: Zm_42deg_Heat_P Parameter: Organism Value: Zea mays
  misc_feature: MA Experiment 108522 PARAMETER Experiment Name: Zm_42deg_Heat_P Parameter: Plant Line Value: 35A19
  misc_feature: MA Experiment 108522 PARAMETER Experiment Name: Zm_42deg_Heat_P Parameter: Temperature (deg C) Value: 42 vs. 22
  misc_feature: MA Experiment 108522 PARAMETER Experiment Name: Zm_42deg_Heat_P Parameter: Timepoint (hr) Value: 1
  misc_feature: MA Experiment 108522 PARAMETER Experiment Name: Zm_42deg_Heat_P Parameter: Tissue Value: Aerial
  misc_feature: MA Experiment ID: 108523 Result: Down-regulated in Transcription
  misc_feature: MA Experiment 108523 PARAMETER Experiment Name: Zm_42deg_Heat_P Parameter: Age (day) Value: 8
  misc_feature: MA Experiment 108523 PARAMETER Experiment Name: Zm_42deg_Heat_P Parameter: Organism Value: Zea mays
  misc_feature: MA Experiment 108523 PARAMETER Experiment Name: Zm_42deg_Heat_P Parameter: Plant Line Value: 35A19
  misc_feature: MA Experiment 108523 PARAMETER Experiment Name: Zm_42deg_Heat_P Parameter: Temperature (deg C) Value: 42 vs. 22
  misc_feature: MA Experiment 108523 PARAMETER Experiment Name: Zm_42deg_Heat_P Parameter: Timepoint (hr) Value: 6
  misc_feature: MA Experiment 108523 PARAMETER Experiment Name: Zm_42deg_Heat_P Parameter: Tissue Value: Aerial
  misc_feature: MA Experiment ID: 108527 Result: Down-regulated in Transcription
  misc_feature: MA Experiment 108527 PARAMETER Experiment Name: Zm_5mM_NO_P Parameter: Age (day) Value: 8
  misc_feature: MA Experiment 108527 PARAMETER Experiment Name: Zm_5mM_NO_P Parameter: Organism Value: Zea mays
  misc_feature: MA Experiment 108527 PARAMETER Experiment Name: Zm_5mM_NO_P Parameter: Plant Line Value: 35A19
  misc_feature: MA Experiment 108527 PARAMETER Experiment Name: Zm_5mM_NO_P Parameter: Timepoint (hr) Value: 6
  misc_feature: MA Experiment 108527 PARAMETER Experiment Name: Zm_5mM_NO_P Parameter: Tissue Value: Aerial
  misc_feature: MA Experiment 108527 PARAMETER Experiment Name: Zm_5mM_NO_P Parameter: Treatment Value: 5mM NO vs. No Treatment
  misc_feature: MA Experiment ID: 108528 Result: Up-regulated in Transcription
  misc_feature: MA Experiment 108528 PARAMETER Experiment Name: Zm_Imbibed_Seeds_P Parameter: Age (day) Value: 5 vs. 2
  misc_feature: MA Experiment 108528 PARAMETER Experiment Name: Zm_Imbibed_Seeds_P Parameter: Organism Value: Zea mays
  misc_feature: MA Experiment 108528 PARAMETER Experiment Name: Zm_Imbibed_Seeds_P Parameter: Plant Line Value: 35A19
  misc_feature: MA Experiment 108528 PARAMETER Experiment Name: Zm_Imbibed_Seeds_P Parameter: Tissue Value: Aerial vs. Embryo
  misc_feature: MA Experiment ID: 108536 Result: Down-regulated in Transcription
  misc_feature: MA Experiment 108536 PARAMETER Experiment Name: Zm_Meristem_P Parameter: Age (day) Value: 8
  misc_feature: MA Experiment 108536 PARAMETER Experiment Name: Zm_Meristem_P Parameter: Organism Value: Zea mays
  misc_feature: MA Experiment 108536 PARAMETER Experiment Name: Zm_Meristem_P Parameter: Plant Line Value: 35A19
  misc_feature: MA Experiment 108536 PARAMETER Experiment Name: Zm_Meristem_P Parameter: Tissue Value: Shoot Meristem vs. Above Shoot Meristem
  misc_feature: MA Experiment ID: 108545 Result: Up-regulated in Transcription
  misc_feature: MA Experiment 108545 PARAMETER Experiment Name: Zm_Imbibed_Seeds_P Parameter: Age (day) Value: 3 vs. 2
  misc_feature: MA Experiment 108545 PARAMETER Experiment Name: Zm_Imbibed_Seeds_P Parameter: Organism Value: Zea mays
  misc_feature: MA Experiment 108545 PARAMETER Experiment Name: Zm_Imbibed_Seeds_P Parameter: Plant Line Value: 35A19
  misc_feature: MA Experiment 108545 PARAMETER Experiment Name: Zm_Imbibed_Seeds_P Parameter: Tissue Value: Aerial vs. Embryo
  misc_feature: MA Experiment ID: 108546 Result: Down-regulated in Transcription
  misc_feature: MA Experiment 108546 PARAMETER Experiment Name: Zm_Imbibed_Seeds_P Parameter: Age (day) Value: 3 vs. 2
  misc_feature: MA Experiment 108546 PARAMETER Experiment Name: Zm_Imbibed_Seeds_P Parameter: Organism Value: Zea mays
  misc_feature: MA Experiment 108546 PARAMETER Experiment Name: Zm_Imbibed_Seeds_P Parameter: Plant Line Value: 35A19
  misc_feature: MA Experiment 108546 PARAMETER Experiment Name: Zm_Imbibed_Seeds_P Parameter: Tissue Value: Roots vs. Embryo
  misc_feature: MA Experiment ID: 108547 Result: Up-regulated in Transcription
  misc_feature: MA Experiment 108547 PARAMETER Experiment Name: Zm_Imbibed_Seeds_P Parameter: Age (day) Value: 4 vs. 2
  misc_feature: MA Experiment 108547 PARAMETER Experiment Name: Zm_Imbibed_Seeds_P Parameter: Organism Value: Zea mays
  misc_feature: MA Experiment 108547 PARAMETER Experiment Name: Zm_Imbibed_Seeds_P Parameter: Plant Line Value: 35A19
  misc_feature: MA Experiment 108547 PARAMETER Experiment Name: Zm_Imbibed_Seeds_P Parameter: Tissue Value: Aerial vs. Embryo
  misc_feature: MA Experiment ID: 108556 Result: Down-regulated in Transcription
  misc_feature: MA Experiment 108556 PARAMETER Experiment Name: Zm_Drought_P Parameter: Age (day) Value: 9
  misc_feature: MA Experiment 108556 PARAMETER Experiment Name: Zm_Drought_P Parameter: Organism Value: Zea mays
  misc_feature: MA Experiment 108556 PARAMETER Experiment Name: Zm_Drought_P Parameter: Plant Line Value: 35A19
  misc_feature: MA Experiment 108556 PARAMETER Experiment Name: Zm_Drought_P Parameter: Timepoint (hr) Value: 24
  misc_feature: MA Experiment 108556 PARAMETER Experiment Name: Zm_Drought_P Parameter: Tissue Value: Aerial
  misc_feature: MA Experiment 108556 PARAMETER Experiment Name: Zm_Drought_P Parameter: Treatment Value: Drought vs. No Drought
  misc_feature: MA Experiment ID: 108597 Result: Down-regulated in Transcription
  misc_feature: MA Experiment 108597 PARAMETER Experiment Name: Zm_100uM_ABA_P Parameter: Age (day) Value: 9
  misc_feature: MA Experiment 108597 PARAMETER Experiment Name: Zm_100uM_ABA_P Parameter: Organism Value: Zea mays
  misc_feature: MA Experiment 108597 PARAMETER Experiment Name: Zm_100uM_ABA_P Parameter: Plant Line Value: 35A19
  misc_feature: MA Experiment 108597 PARAMETER Experiment Name: Zm_100uM_ABA_P Parameter: Timepoint (hr) Value: 24
  misc_feature: MA Experiment 108597 PARAMETER Experiment Name: Zm_100uM_ABA_P Parameter: Tissue Value: Aerial
  misc_feature: MA Experiment 108597 PARAMETER Experiment Name: Zm_100uM_ABA_P Parameter: Treatment Value: 100uM ABA vs. No Treatment
  misc_feature: MA Experiment ID: 20000478 Result: Down-regulated in Transcription
  misc_feature: MA Experiment 20000478 PARAMETER Experiment Name: Zm_5mM_SA_P Parameter: Age (day) Value: 11
  misc_feature: MA Experiment 20000478 PARAMETER Experiment Name: Zm_5mM_SA_P Parameter: Organism Value: Zea mays
  misc_feature: MA Experiment 20000478 PARAMETER Experiment Name: Zm_5mM_SA_P Parameter: Plant Line Value: 35A19
  misc_feature: MA Experiment 20000478 PARAMETER Experiment Name: Zm_5mM_SA_P Parameter: Timepoint (hr) Value: 72
  misc_feature: MA Experiment 20000478 PARAMETER Experiment Name: Zm_5mM_SA_P Parameter: Tissue Value: Aerial
  misc_feature: MA Experiment 20000478 PARAMETER Experiment Name: Zm_5mM_SA_P Parameter: Treatment Value: 5mM SA vs. No Treatment
  misc_feature: MA Experiment ID: 20000480 Result: Down-regulated in Transcription
  misc_feature: MA Experiment 20000480 PARAMETER Experiment Name: Zm_Drought_P Parameter: Age (day) Value: 11
  misc_feature: MA Experiment 20000480 PARAMETER Experiment Name: Zm_Drought_P Parameter: Organism Value: Zea mays
  misc_feature: MA Experiment 20000480 PARAMETER Experiment Name: Zm_Drought_P Parameter: Plant Line Value: 35A19
  misc_feature: MA Experiment 20000480 PARAMETER Experiment Name: Zm_Drought_P Parameter: Timepoint (hr) Value: 72
  misc_feature: MA Experiment 20000480 PARAMETER Experiment Name: Zm_Drought_P Parameter: Tissue Value: Aerial
  misc_feature: MA Experiment 20000480 PARAMETER Experiment Name: Zm_Drought_P Parameter: Treatment Value: Drought vs. No Drought
gcacgagaccattacctagaacatcctaatcgaaaaaactacaactgttggagtaggcccgggttggccacggccgccacactgctccgctctgctctgctctctgaaggcattgcctgcccggttccttcccccgccggcgtcgtcggtccgcgagttgttggcatggccgccgcagggacgcagctaggccggcttctgggcggcctctggttcctggccgcgttgctaggacgaccgggcgctacggcggcggcaccagctgtggccgccgtcgacgggcggcgcgccgtcgcggcgaccggggaggacttcgtgtgcgcgacgttggactggtggccgccggacaagtgcgactacggcacctgcgcctggggccgcgccggcctgctcaacctggatctctccaacaaggtcctgctcaatgccgtcagagccttctcgccgccgctgctgctccgcctgggagggtcgctgcaggacaaggtggtgtacgggtacggcgccggtcggccgtgcgcgccgttcgtcaggaacgcgtcggagatgcacggcttctcgcagggctgcctgcccctgcgcaggtgggacgacctcaacgccttcttccggagatccggtgccaaggtcgtgttcgggctcaacgcgctgaacggccgcgtcccgttgccggacgggtccatgggagggccgtgggactacaccaacgcggcgtcgctgatccggtacaccgcgaacaagggctaccgaatccatggatgggagcttgggaacgaactgagcggcactggagtgggagctcgggttggcgcggaccagtacgccgcagacgtgatcgccctgaaagcgctagtcgacgacgtgtaccggagcgagccatcgaagccgctggtgcttgctcccggaggattcttcgaccaagcctggttcactgagcttgtcgtcaagaccgggccggatctactgagcgtggtcacgcaccacgtctacaatctaggaccaggaagggacacgcatctgatcgacaagatcctcgacccgtcaaccctcgacgggatggtcagcacgttcagcgacctccagcggctgctcaagtccacggggacgtcggctgtcgcgtgggtcggggaagccggaggcgcctacaacagcggccgccacctcgtcacggacgcgttcgtgttcagcttctggtttttagatcagcttgggatggcagcgaggttcgacaccaagagctactgcaggcagagtttggtcggcggcaactacggcctgctaaacaccacgacgttccagcctaaccctgattattacagtgctctactgtggcatcgcctcatggggaccgaagttctagcagtaacattcagcggcacgaacaagatccgcgcgtacgcgcactgcgcgagagattcaccaggaatcactctgctgctgatcaacctgagcggcaacgccaccgcgcgggtctcggtgacggcccaaggggctgccgcggcgcacgcgcacaggcacggcgcgaggaagcacggcggcggcaggaagttccggcacgtgcacgtccccggcttcgccggcgccggcgaggcggcagcgggcgccgtgcgacacgagtaccacctcacccccaaggacggcgacctgacgagccaggtcgtgatgctgaacggcagggcgttggccaccgacgcggcggggaacatccccgccctggaggcggtcgaggtggacgcggcgcggcccatcgccgtcacgccctactccatcgtgttcgctcgcgttccgcatttcagtgccccggcgtgtagggtagaccggtagagtagcggtttagatgggtagattcataatgggtttggcgtgattggtgatgatggacagctaagctttccatctggtgagatgaggtgaagtgaggtgcaaggcatctgtcgaaagaaaagggatgcaatgcaatgggggtgagtttgttttctttttacgattggaattgtaaaaggtcgaagaaatttatgatgatc

SEQ ID NO: 19498 - protein, 607 aa, Zea mays subsp. mays
  peptide (1)..(607): Ceres Seq. ID no. 12375887
  misc_feature (85)..(150): Pfam Name: Glycosyl hydrolase family 79, N-terminal domain Pfam Description: Glycosyl hydrolase family 79, N-terminal domain
  misc_feature (66)..(510): Homolog of NCBI NO: 34393590 NR Description: putative beta-glucuronidase precursor
  misc_feature (72)..(603): Homolog of NCBI NO: 10176717 NR Description: contains similarity to heparanase~gene_id:MXM12.7
  misc_feature (92)..(603): Homolog of NCBI NO: 38174813 NR Description: putative heparanase [Hordeum vulgare subsp.
  misc_feature (92)..(603): Homolog of NCBI NO: 9757846 NR Description: contains similarity to heparanase~gene_id:MFB13.2
  misc_feature (72)..(603): Homolog of NCBI NO: 22327999 NR Description: glycosyl hydrolase family 79
  misc_feature (92)..(603): Homolog of NCBI NO: 10177640 NR Description: contains similarity to heparanase~gene_id:MGG23.2
  misc_feature (92)..(603): Homolog of NCBI NO: 30692670 NR Description: expressed protein [Arabidopsis thaliana]
  misc_feature (62)..(150): Homolog of NCBI NO: 24413987 NR Description: contains ESTs
  misc_feature (492)..(603): Homolog of NCBI NO: 24413987 NR Description: contains ESTs
  misc_feature (134)..(520): Homolog of NCBI NO: 24413987 NR Description: contains ESTs
ARDHYLEHPNRKNYNCWSRPGLATAATLLRSALLSEGIACPVPSPAGVVGPRVVGMAAAGTQLGRLLGGLWFLAALLGRPGATAAAPAVAAVDGRRAVAATGEDFVCATLDWWPPDKCDYGTCAWGRAGLLNLDLSNKVLLNAVRAFSPPLLLRLGGSLQDKVVYGYGAGRPCAPFVRNASEMHGFSQGCLPLRRWDDLNAFFRRSGAKVVFGLNALNGRVPLPDGSMGGPWDYTNAASLIRYTANKGYRIHGWELGNELSGTGVGARVGADQYAADVIALKALVDDVYRSEPSKPLVLAPGGFFDQAWFTELVVKTGPDLLSVVTHHVYNLGPGRDTHLIDKILDPSTLDGMVSTFSDLQRLLKSTGTSAVAWVGEAGGAYNSGRHLVTDAFVFSFWFLDQLGMAARFDTKSYCRQSLVGGNYGLLNTTTFQPNPDYYSALLWHRLMGTEVLAVTFSGTNKIRAYAHCARDSPGITLLLINLSGNATARVSVTAQGAAAAHAHRHGARKHGGGRKFRHVHVPGFAGAGEAAAGAVRHEYHLTPKDGDLTSQVVMLNGRALATDAAGNIPALEAVEVDAARPIAVTPYSIVFARVPHFSAPACRVDR

SEQ ID NO: 19499 - protein, 552 aa, Zea mays subsp. mays
  peptide (1)..(552): Ceres Seq. ID no. 12375888
  misc_feature (30)..(95): Pfam Name: Glycosyl hydrolase family 79, N-terminal domain Pfam Description: Glycosyl hydrolase family 79, N-terminal domain
  misc_feature (11)..(455): Homolog of NCBI NO: 34393590 NR Description: putative beta-glucuronidase precursor
  misc_feature (17)..(548): Homolog of NCBI NO: 10176717 NR Description: contains similarity to heparanase~gene_id:MXM12.7
  misc_feature (37)..(548): Homolog of NCBI NO: 38174813 NR Description: putative heparanase [Hordeum vulgare subsp.
  misc_feature (37)..(548): Homolog of NCBI NO: 9757846 NR Description: contains similarity to heparanase~gene_id:MFB13.2
  misc_feature (17)..(548): Homolog of NCBI NO: 22327999 NR Description: glycosyl hydrolase family 79
  misc_feature (37)..(548): Homolog of NCBI NO: 10177640 NR Description: contains similarity to heparanase~gene_id:MGG23.2
  misc_feature (37)..(548): Homolog of NCBI NO: 30692670 NR Description: expressed protein [Arabidopsis thaliana]
  misc_feature (7)..(95): Homolog of NCBI NO: 24413987 NR Description: contains ESTs
  misc_feature (437)..(548): Homolog of NCBI NO: 24413987 NR Description: contains ESTs
  misc_feature (79)..(465): Homolog of NCBI NO: 24413987 NR Description: contains ESTs
MAAAGTQLGRLLGGLWFLAALLGRPGATAAAPAVAAVDGRRAVAATGEDFVCATLDWWPPDKCDYGTCAWGRAGLLNLDLSNKVLLNAVRAFSPPLLLRLGGSLQDKVVYGYGAGRPCAPFVRNASEMHGFSQGCLPLRRWDDLNAFFRRSGAKVVFGLNALNGRVPLPDGSMGGPWDYTNAASLIRYTANKGYRIHGWELGNELSGTGVGARVGADQYAADVIALKALVDDVYRSEPSKPLVLAPGGFFDQAWFTELVVKTGPDLLSVVTHHVYNLGPGRDTHLIDKILDPSTLDGMVSTFSDLQRLLKSTGTSAVAWVGEAGGAYNSGRHLVTDAFVFSFWFLDQLGMAARFDTKSYCRQSLVGGNYGLLNTTTFQPNPDYYSALLWHRLMGTEVLAVTFSGTNKIRAYAHCARDSPGITLLLINLSGNATARVSVTAQGAAAAHAHRHGARKHGGGRKFRHVHVPGFAGAGEAAAGAVRHEYHLTPKDGDLTSQVVMLNGRALATDAAGNIPALEAVEVDAARPIAVTPYSIVFARVPHFSAPACRVDR

SEQ ID NO: 19500 - protein, 425 aa, Zea mays subsp. mays
  peptide (1)..(425): Ceres Seq. ID no. 12375889
  misc_feature (1)..(222): Pfam Name: Glycosyl hydrolase family 79, N-terminal domain Pfam Description: Glycosyl hydrolase family 79, N-terminal domain
  misc_feature (1)..(328): Homolog of NCBI NO: 34393590 NR Description: putative beta-glucuronidase precursor
  misc_feature (1)..(421): Homolog of NCBI NO: 10176717 NR Description: contains similarity to heparanase~gene_id:MXM12.7
  misc_feature (1)..(421): Homolog of NCBI NO: 38174813 NR Description: putative heparanase [Hordeum vulgare subsp.
  misc_feature (1)..(421): Homolog of NCBI NO: 9757846 NR Description: contains similarity to heparanase~gene_id:MFB13.2
  misc_feature (1)..(421): Homolog of NCBI NO: 22327999 NR Description: glycosyl hydrolase family 79
  misc_feature (338)..(421): Homolog of NCBI NO: 34393590 NR Description: putative beta-glucuronidase precursor
  misc_feature (1)..(421): Homolog of NCBI NO: 10177640 NR Description: contains similarity to heparanase~gene_id:MGG23.2
  misc_feature (1)..(421): Homolog of NCBI NO: 30692670 NR Description: expressed protein [Arabidopsis thaliana]
  misc_feature (310)..(421): Homolog of NCBI NO: 24413987 NR Description: contains ESTs
  misc_feature (1)..(338): Homolog of NCBI NO: 24413987 NR Description: contains ESTs
MHGFSQGCLPLRRWDDLNAFFRRSGAKVVFGLNALNGRVPLPDGSMGGPWDYTNAASLIRYTANKGYRIHGWELGNELSGTGVGARVGADQYAADVIALKALVDDVYRSEPSKPLVLAPGGFFDQAWFTELVVKTGPDLLSVVTHHVYNLGPGRDTHLIDKILDPSTLDGMVSTFSDLQRLLKSTGTSAVAWVGEAGGAYNSGRHLVTDAFVFSFWFLDQLGMAARFDTKSYCRQSLVGGNYGLLNTTTFQPNPDYYSALLWHRLMGTEVLAVTFSGTNKIRAYAHCARDSPGITLLLINLSGNATARVSVTAQGAAAAHAHRHGARKHGGGRKFRHVHVPGFAGAGEAAAGAVRHEYHLTPKDGDLTSQVVMLNGRALATDAAGNIPALEAVEVDAARPIAVTPYSIVFARVPHFSAPACRVDR

SEQ ID NO: 19501 - DNA, 1392 bp, Zea mays subsp. mays
  misc_feature (1)..(1392): Ceres Seq. ID no. 12380100
  misc_feature: MA Experiment ID: 108528 Result: Up-regulated in Transcription
  misc_feature: MA Experiment 108528 PARAMETER Experiment Name: Zm_Imbibed_Seeds_P Parameter: Age (day) Value: 5 vs. 2
  misc_feature: MA Experiment 108528 PARAMETER Experiment Name: Zm_Imbibed_Seeds_P Parameter: Organism Value: Zea mays
  misc_feature: MA Experiment 108528 PARAMETER Experiment Name: Zm_Imbibed_Seeds_P Parameter: Plant Line Value: 35A19
  misc_feature: MA Experiment 108528 PARAMETER Experiment Name: Zm_Imbibed_Seeds_P Parameter: Tissue Value: Aerial vs. Embryo
  misc_feature: MA Experiment ID: 108530 Result: Up-regulated in Transcription
  misc_feature: MA Experiment 108530 PARAMETER Experiment Name: Zm_Imbibed_Seeds_P Parameter: Age (day) Value: 6 vs. 2
  misc_feature: MA Experiment 108530 PARAMETER Experiment Name: Zm_Imbibed_Seeds_P Parameter: Organism Value: Zea mays
  misc_feature: MA Experiment 108530 PARAMETER Experiment Name: Zm_Imbibed_Seeds_P Parameter: Plant Line Value: 35A19
  misc_feature: MA Experiment 108530 PARAMETER Experiment Name: Zm_Imbibed_Seeds_P Parameter: Tissue Value: Aerial vs. Embryo
  misc_feature: MA Experiment ID: 108534 Result: Up-regulated in Transcription
  misc_feature: MA Experiment 108534 PARAMETER Experiment Name: Zm_4deg_Cold_P Parameter: Age (hr) Value: 8
  misc_feature: MA Experiment 108534 PARAMETER Experiment Name: Zm_4deg_Cold_P Parameter: Organism Value: Zea mays
  misc_feature: MA Experiment 108534 PARAMETER Experiment Name: Zm_4deg_Cold_P Parameter: Plant Line Value: 35A19
  misc_feature: MA Experiment 108534 PARAMETER Experiment Name: Zm_4deg_Cold_P Parameter: Temperature (deg C) Value: 4 vs. 22
  misc_feature: MA Experiment 108534 PARAMETER Experiment Name: Zm_4deg_Cold_P Parameter: Timepoint (hr) Value: 6
  misc_feature: MA Experiment 108534 PARAMETER Experiment Name: Zm_4deg_Cold_P Parameter: Tissue Value: Aerial
  misc_feature: MA Experiment ID: 108536 Result: Down-regulated in Transcription
  misc_feature: MA Experiment 108536 PARAMETER Experiment Name: Zm_Meristem_P Parameter: Age (day) Value: 8
  misc_feature: MA Experiment 108536 PARAMETER Experiment Name: Zm_Meristem_P Parameter: Organism Value: Zea mays
  misc_feature: MA Experiment 108536 PARAMETER Experiment Name: Zm_Meristem_P Parameter: Plant Line Value: 35A19
  misc_feature: MA Experiment 108536 PARAMETER Experiment Name: Zm_Meristem_P Parameter: Tissue Value: Shoot Meristem vs. Above Shoot Meristem
  misc_feature: MA Experiment ID: 108543 Result: Down-regulated in Transcription
  misc_feature: MA Experiment ID: 108545 Result: Up-regulated in Transcription
  misc_feature: MA Experiment 108545 PARAMETER Experiment Name: Zm_Imbibed_Seeds_P Parameter: Age (day) Value: 3 vs. 2
  misc_feature: MA Experiment 108545 PARAMETER Experiment Name: Zm_Imbibed_Seeds_P Parameter: Organism Value: Zea mays
  misc_feature: MA Experiment 108545 PARAMETER Experiment Name: Zm_Imbibed_Seeds_P Parameter: Plant Line Value: 35A19
  misc_feature: MA Experiment 108545 PARAMETER Experiment Name: Zm_Imbibed_Seeds_P Parameter: Tissue Value: Aerial vs. Embryo
  misc_feature: MA Experiment ID: 108547 Result: Up-regulated in Transcription
  misc_feature: MA Experiment 108547 PARAMETER Experiment Name: Zm_Imbibed_Seeds_P Parameter: Age (day) Value: 4 vs. 2
  misc_feature: MA Experiment 108547 PARAMETER Experiment Name: Zm_Imbibed_Seeds_P Parameter: Organism Value: Zea mays
  misc_feature: MA Experiment 108547 PARAMETER Experiment Name: Zm_Imbibed_Seeds_P Parameter: Plant Line Value: 35A19
  misc_feature: MA Experiment 108547 PARAMETER Experiment Name: Zm_Imbibed_Seeds_P Parameter: Tissue Value: Aerial vs. Embryo
  misc_feature: MA Experiment ID: 20000535 Result: Up-regulated in Transcription
  misc_feature: MA Experiment 20000535 PARAMETER Experiment Name: Zm_Hybrid_Seed_Dev_P Parameter: DAP Value: 30 vs. 12
  misc_feature: MA Experiment 20000535 PARAMETER Experiment Name: Zm_Hybrid_Seed_Dev_P Parameter: Organism Value: Zea mays
  misc_feature: MA Experiment 20000535 PARAMETER Experiment Name: Zm_Hybrid_Seed_Dev_P Parameter: Plant Line Value: 35A19
  misc_feature: MA Experiment 20000535 PARAMETER Experiment Name: Zm_Hybrid_Seed_Dev_P Parameter: Tissue Value: Embryo vs. Unfert Floret
gcacgagaccattacctagaacatcctaatcgaaaagacgcaccgcacaccctagcataggaggcaaagaagtacagagggaggaggcgggcagcagatacgcggcgtgacagacacccagggccaggaagggtgctgtttatccatgctgctccggctgaagatcgtcgtcggcgtccactcggtggtgctcccggttcctgttccaggcggctatggccatggcgcctgctacgcggcagtagagccctgctggcgccgcagccggaggccagctctagcggcggcgggtggcctcgtcgcgaggcggccgaggcagagcgccacggtggtgatggcgctgaaggaggagccggagggcagcagccgccgcggcttcgccggcggcggtccgagctgggaccccgggctggagatccaagtccccttcgagcaaagaccggtgaacgagtactcctgctctcaagtatagcgccctctactcgtgggcggagctgagcccagggtccttcttcctccgcctcggcggcctgtgcctcgtgaccttcactgtgctcgcggctccaattgccgccgcaagcttcaatccaggaaaggatccactcaagttcgtgctagcagctgggatcgggacgctgcttctggtgtcactggcggttctcaggatatacctggggtggagctacgttggtgatcgcctgctgtcagcggtggtaccgtacgaagaaaccggatggtacgacggccagatgtgggtgaagccaccagaggtgttggcccgtgacaggctcctgggatcttacaaggtgaagccggtggtcaacctgctgaagcagacgctggtgggcaccggcgcggctgctcgtgggcgccgtgtcgctcttcgcgttcgccgcgccggtcgaggacttcctccacgccctgagccagcctccctcctccgccaccgcctcgtccaagccgagcttgaggaaggaggagctgctgcggctaccagtcgaggtgatgcaggacgacgacctcgctgcggccgcggccgaggccgccgacggccggcccgtctactgcagggaccgctactaccgggccctcgccggcggtcagtactgcaggtgggacgacctgctcaactgataaatacctagagcagtattgctgtggtacgacgcggcaggacaggacgtattttttttgtcagatgggaaatttcggactgaactgctagaaattgagttcttaatggcacacaagcataaggaacagcaagaaaaagcaacacagaatcagagaaaaaacaagagtttatatattcacttttctctctttgtttctggagttacatctggtctttccgtttcttgagttacctctgatctttttgtttcttgagtt

SEQ ID NO: 19502 - protein, 131 aa, Zea mays subsp. mays
  peptide (1)..(131): Ceres Seq. ID no. 12380101
  misc_feature (1)..(35): Homolog of NCBI NO: 15239796 NR Description: putative protein; protein id: At5g11840.1
  misc_feature (1)..(33): Homolog of NCBI NO: 23123845 NR Description: hypothetical protein [Nostoc punctiforme]
  misc_feature (1)..(30): Homolog of NCBI NO: 23040962 NR Description: hypothetical protein [Trichodesmium erythraeum
  misc_feature (1)..(33): Homolog of NCBI NO: 17231662 NR Description: hypothetical protein [Nostoc sp. PCC 7120]
  misc_feature (1)..(35): Homolog of NCBI NO: 3184557 NR Description: unknown [Synechococcus sp. PCC 7002]
  misc_feature (1)..(31): Homolog of NCBI NO: 11465739 NR Description: ORF36 [Porphyra purpurea]
  misc_feature (1)..(36): Homolog of NCBI NO: 16331827 NR Description: hypothetical protein [Synechocystis sp. PCC 6803]
  misc_feature (1)..(31): Homolog of NCBI NO: 37520418 NR Description: hypothetical protein [Gloeobacter violaceus]
  misc_feature (1)..(93): Homolog of NCBI NO: 40736997 NR Description: expressed protein [Oryza sativa (japonica
  misc_feature (1)..(36): Homolog of NCBI NO: 15240715 NR Description: putative protein
MWVKPPEVLARDRLLGSYKVKPVVNLLKQTLVGTGAAARGRRVALRVRRAGRGLPPRPEPASLLRHRLVQAELEEGGAAAATSRGDAGRRPRCGRGRGRRRPARLLQGPLLPGPRRRSVLQVGRPAQLINT

SEQ ID NO: 19503 - protein, 108 aa, Zea mays subsp. mays
  peptide (1)..(108): Ceres Seq. ID no. 12380102
  misc_feature (64)..(104): Homolog of NCBI NO: 40736997 NR Description: expressed protein [Oryza sativa (japonica
  misc_feature (57)..(104): Homolog of NCBI NO: 15240715 NR Description: putative protein
MLLRLKIVVGVHSVVLPVPVPGGYGHGACYAAVEPCWRRSRRPALAAAGGLVARRPRQSATVVMALKEEPEGSSRRGFAGGGPSWDPGLEIQVPFEQRPVNEYSCSQV

SEQ ID NO: 19504 - DNA, 1054 bp, Zea mays subsp. mays
  misc_feature (1)..(1054): Ceres Seq. ID no. 12419744
  misc_feature: MA Experiment ID: 108529 Result: Up-regulated in Transcription
  misc_feature: MA Experiment 108529 PARAMETER Experiment Name: Zm_Imbibed_Seeds_P Parameter: Age (day) Value: 5 vs. 2
  misc_feature: MA Experiment 108529 PARAMETER Experiment Name: Zm_Imbibed_Seeds_P Parameter: Organism Value: Zea mays
  misc_feature: MA Experiment 108529 PARAMETER Experiment Name: Zm_Imbibed_Seeds_P Parameter: Plant Line Value: 35A19
  misc_feature: MA Experiment 108529 PARAMETER Experiment Name: Zm_Imbibed_Seeds_P Parameter: Tissue Value: Roots vs. Embryo
  misc_feature: MA Experiment ID: 20000535 Result: Down-regulated in Transcription
  misc_feature: MA Experiment 20000535 PARAMETER Experiment Name: Zm_Hybrid_Seed_Dev_P Parameter: DAP Value: 30 vs. 12
  misc_feature: MA Experiment 20000535 PARAMETER Experiment Name: Zm_Hybrid_Seed_Dev_P Parameter: Organism Value: Zea mays
  misc_feature: MA Experiment 20000535 PARAMETER Experiment Name: Zm_Hybrid_Seed_Dev_P Parameter: Plant Line Value: 35A19
  misc_feature: MA Experiment 20000535 PARAMETER Experiment Name: Zm_Hybrid_Seed_Dev_P Parameter: Tissue Value: Embryo vs. Unfert Floret
aaaaaagatgtcgaactccacgatcgatcactgatcgacatcgctgtccgctgcccggcttcctttctctccccatatccatatcagatcctgcggcgaattccttccaactccaggatcgagagcacacgcagatggcgaggcacccgcgcgcgccgctgctccggcgtctgctcctcctggcggccctcgcggcctcctgctcctactacctcctcttcctgcaggcgcaggcctccgtcccgccgcggtacgacgggttcgcctacggcggcggcgccgcgacggcctggaaggacgccgtcctcgtcgaggcctttctcgacccgctctgccccgacagccgcgacgcctggcagccgctgaagctcgccgtcgagcgatacgcgccgcgggtctcactcatcgtccacccgttcccactaccataccacacatatgcattctatgcctgccgcgcgctttacatagctaacaagttgaattcatcatcgacatatccattgctggagctgttcttcaagaaccaggaaaagttctacaattctgccacatcatctctctcgggcccttccgtagctctaggaatgtcgaagatggctgcgcagactgttggtaactcagtatccgagtttctgtcgggcttcagcgatgggaagacagactcggcagcgagagtttcattcaagtacgggtgcacgaggggagtctttggcgcgccgttcttctttgtgaatggcttcctccagcctgggggcggatcgcctatcgactacagcacgtggatcggnatcctanacccccttgtttcccagaacggtgaacggatcgagatgtttacttcgatgtaagtgattgaagtggccttgctacagaggatacggtcgtacagatgtttcgctagtgccgacggcggacaagcaaacagctattatgcaattgcaaactgtgtgtaagctctgcagtggtaaatagcatcccactttgctcgttgtactgttaagctagcagttgtgtgctagctagtatatcggggtaagtatgtgaagaagct

SEQ ID NO: 19505 - protein, 282 aa, Zea mays subsp. mays
  peptide (1)..(282): Ceres Seq. ID no. 12419745
  misc_feature (74)..(254): Homolog of NCBI NO: 8778813 NR Description: T4O12.23 [Arabidopsis thaliana]
  misc_feature (74)..(269): Homolog of NCBI NO: 15222928 NR Description: unknown protein; protein id: At1g76020.1
  misc_feature (74)..(268): Homolog of NCBI NO: 25518088 NR Description: T20H2.2 protein - Arabidopsis thaliana
  misc_feature (57)..(269): Homolog of NCBI NO: 22329686 NR Description: unknown protein
  misc_feature (58)..(271): Homolog of NCBI NO: 38346025 NR Description: OSJNBb0071D01.2 [Oryza sativa (japonica
  misc_feature (263)..(263): Xaa is any aa, unknown or other
  misc_feature (266)..(266): Xaa is any aa, unknown or other
KRCRTPRSITDRHRCPLPGFLSLPISISDPAANSFQLQDREHTQMARHPRAPLLRRLLLLAALAASCSYYLLFLQAQASVPPRYDGFAYGGGAATAWKDAVLVEAFLDPLCPDSRDAWQPLKLAVERYAPRVSLIVHPFPLPYHTYAFYACRALYIANKLNSSSTYPLLELFFKNQEKFYNSATSSLSGPSVALGMSKMAAQTVGNSVSEFLSGFSDGKTDSAARVSFKYGCTRGVFGAPFFFVNGFLQPGGGSPIDYSTWIXILXPLVSQNGERIEMFTSM

SEQ ID NO: 19506 - protein, 238 aa, Zea mays subsp. mays
  peptide (1)..(238): Ceres Seq. ID no. 12419746
  misc_feature (30)..(210): Homolog of NCBI NO: 8778813 NR Description: T4O12.23 [Arabidopsis thaliana]
  misc_feature (30)..(225): Homolog of NCBI NO: 15222928 NR Description: unknown protein; protein id: At1g76020.1
  misc_feature (30)..(224): Homolog of NCBI NO: 25518088 NR Description: T20H2.2 protein - Arabidopsis thaliana
  misc_feature (13)..(225): Homolog of NCBI NO: 22329686 NR Description: unknown protein
  misc_feature (14)..(227): Homolog of NCBI NO: 38346025 NR Description: OSJNBb0071D01.2 [Oryza sativa (japonica
  misc_feature (219)..(219): Xaa is any aa, unknown or other
  misc_feature (222)..(222): Xaa is any aa, unknown or other
MARHPRAPLLRRLLLLAALAASCSYYLLFLQAQASVPPRYDGFAYGGGAATAWKDAVLVEAFLDPLCPDSRDAWQPLKLAVERYAPRVSLIVHPFPLPYHTYAFYACRALYIANKLNSSSTYPLLELFFKNQEKFYNSATSSLSGPSVALGMSKMAAQTVGNSVSEFLSGFSDGKTDSAARVSFKYGCTRGVFGAPFFFVNGFLQPGGGSPIDYSTWIXILXPLVSQNGERIEMFTSM

SEQ ID NO: 19507 - DNA, 466 bp, Zea mays subsp. mays
  misc_feature (1)..(466): Ceres Seq. ID no. 1959522
  misc_feature: MA Experiment ID: 108523 Result: Up-regulated in Transcription
  misc_feature: MA Experiment 108523 PARAMETER Experiment Name: Zm_42deg_Heat_P Parameter: Age (day) Value: 8
  misc_feature: MA Experiment 108523 PARAMETER Experiment Name: Zm_42deg_Heat_P Parameter: Organism Value: Zea mays
  misc_feature: MA Experiment 108523 PARAMETER Experiment Name: Zm_42deg_Heat_P Parameter: Plant Line Value: 35A19
  misc_feature: MA Experiment 108523 PARAMETER Experiment Name: Zm_42deg_Heat_P Parameter: Temperature (deg C) Value: 42 vs. 22
  misc_feature: MA Experiment 108523 PARAMETER Experiment Name: Zm_42deg_Heat_P Parameter: Timepoint (hr) Value: 6
  misc_feature: MA Experiment 108523 PARAMETER Experiment Name: Zm_42deg_Heat_P Parameter: Tissue Value: Aerial
  misc_feature: MA Experiment ID: 108535 Result: Up-regulated in Transcription
  misc_feature: MA Experiment 108535 PARAMETER Experiment Name: Zm_Meristem_P Parameter: Age (day) Value: 8
  misc_feature: MA Experiment 108535 PARAMETER Experiment Name: Zm_Meristem_P Parameter: Organism Value: Zea mays
  misc_feature: MA Experiment 108535 PARAMETER Experiment Name: Zm_Meristem_P Parameter: Plant Line Value: 35A19
  misc_feature: MA Experiment 108535 PARAMETER Experiment Name: Zm_Meristem_P Parameter: Tissue Value: Root Meristem vs. Above Root Meristem
  misc_feature: MA Experiment ID: 108544 Result: Down-regulated in Transcription
  misc_feature: MA Experiment ID: 20000479 Result: Down-regulated in Transcription
  misc_feature: MA Experiment 20000479 PARAMETER Experiment Name: Zm_Drought_P Parameter: Age (day) Value: 10
  misc_feature: MA Experiment 20000479 PARAMETER Experiment Name: Zm_Drought_P Parameter: Organism Value: Zea mays
  misc_feature: MA Experiment 20000479 PARAMETER Experiment Name: Zm_Drought_P Parameter: Plant Line Value: 35A19
  misc_feature: MA Experiment 20000479 PARAMETER Experiment Name: Zm_Drought_P Parameter: Timepoint (hr) Value: 48
  misc_feature: MA Experiment 20000479 PARAMETER Experiment Name: Zm_Drought_P Parameter: Tissue Value: Aerial
  misc_feature: MA Experiment 20000479 PARAMETER Experiment Name: Zm_Drought_P Parameter: Treatment Value: Drought vs. No Drought
  misc_feature: MA Experiment ID: 20000487 Result: Up-regulated in Transcription
  misc_feature: MA Experiment 20000487 PARAMETER Experiment Name: Zm_50mM_NH4NO3_L_to_H_P Parameter: Organism Value: Zea mays
  misc_feature: MA Experiment 20000487 PARAMETER Experiment Name: Zm_50mM_NH4NO3_L_to_H_P Parameter: Timepoint (hr) Value: 4
  misc_feature: MA Experiment 20000487 PARAMETER Experiment Name: Zm_50mM_NH4NO3_L_to_H_P Parameter: Tissue Value: Leaves
  misc_feature: MA Experiment 20000487 PARAMETER Experiment Name: Zm_50mM_NH4NO3_L_to_H_P Parameter: Treatment Value: 50mM NH4NO3 vs. 100mM Mannitol
  misc_feature: MA Experiment ID: 20000534 Result: Up-regulated in Transcription
  misc_feature: MA Experiment 20000534 PARAMETER Experiment Name: Zm_Hybrid_Pollen_P Parameter: Age (day) Value: 8
  misc_feature: MA Experiment 20000534 PARAMETER Experiment Name: Zm_Hybrid_Pollen_P Parameter: Organism Value: Zea mays
  misc_feature: MA Experiment 20000534 PARAMETER Experiment Name: Zm_Hybrid_Pollen_P Parameter: Plant Line Value: 35A19
  misc_feature: MA Experiment 20000534 PARAMETER Experiment Name: Zm_Hybrid_Pollen_P Parameter: Tissue Value: Pollen vs. Aerial
  misc_feature: MA Experiment ID: 20000535 Result: Up-regulated in Transcription
  misc_feature: MA Experiment 20000535 PARAMETER Experiment Name: Zm_Hybrid_Seed_Dev_P Parameter: DAP Value: 30 vs. 12
  misc_feature: MA Experiment 20000535 PARAMETER Experiment Name: Zm_Hybrid_Seed_Dev_P Parameter: Organism Value: Zea mays
  misc_feature: MA Experiment 20000535 PARAMETER Experiment Name: Zm_Hybrid_Seed_Dev_P Parameter: Plant Line Value: 35A19
  misc_feature: MA Experiment 20000535 PARAMETER Experiment Name: Zm_Hybrid_Seed_Dev_P Parameter: Tissue Value: Embryo vs. Unfert Floret
tcagaacattgaagagtttacatggttaaactcaagctacagtccagtgctgaagcagttggaaacgcggtttatgattgattactacttcagaactgggcatgctaggcacgatgaaaatcccaagtttcggaaccccaagtacttgtcaattctcaaccatctgaggttctatctccctgagatcttcccaagacttaacaaggtgttatttctggatgatgatactgtagtgcagcgagacctaagtgcgctttggttggtagatctcaaaggcaaggttaatggtgctgtcgagacctgtagacaggacttccataggtttgataagtacctcaacttctcaaaccctcttattgccaagaattttgatccacatgcttgtggttgggcatatggcatgaacatgtttgatttgtccgactggagaaagcaaaacatcactgaggtctaccatacctggcag

SEQ ID NO: 19508 - protein, 155 aa, Zea mays subsp. mays
  peptide (1)..(155): Ceres Seq. ID no. 1959523
  misc_feature (1)..(154): Homolog of NCBI NO: 18399484 NR Description: Expressed protein
  misc_feature (1)..(154): Homolog of NCBI NO: 37533460 NR Description: hypothetical protein [Oryza sativa (japonica
  misc_feature (1)..(154): Homolog of NCBI NO: 30691875 NR Description: glycosyltransferase family 8 [Arabidopsis
  misc_feature (1)..(154): Homolog of NCBI NO: 7485958 NR Description: hypothetical protein F22I13.40 - Arabidopsis
  misc_feature (1)..(154): Homolog of NCBI NO: 15233046 NR Description: putative protein
  misc_feature (1)..(154): Homolog of NCBI NO: 14517362 NR Description: AT3g61130/T20K12_30 [Arabidopsis thaliana]
  misc_feature (1)..(154): Homolog of NCBI NO: 7271113 NR Description: 68 kDa protein [Cicer arietinum]
  misc_feature (1)..(154): Homolog of NCBI NO: 38423965 NR Description: putative glycosyltransferase
  misc_feature (1)..(154): Homolog of NCBI NO: 18422837 NR Description: putative protein
  misc_feature (1)..(154): Homolog of NCBI NO: 10177914 NR Description: emb|CAB71043.1~gene_id:MCA23.10~strong similarity
QNIEEFTWLNSSYSPVLKQLETRFMIDYYFRTGHARHDENPKFRNPKYLSILNHLRFYLPEIFPRLNKVLFLDDDTVVQRDLSALWLVDLKGKVNGAVETCRQDFHRFDKYLNFSNPLIAKNFDPHACGWAYGMNMFDLSDWRKQNITEVYHTWQ

SEQ ID NO: 19509 - protein, 131 aa, Zea mays subsp. mays
  peptide (1)..(131): Ceres Seq. ID no. 1959524
  misc_feature (1)..(130): Homolog of NCBI NO: 18399484 NR Description: Expressed protein
  misc_feature (1)..(130): Homolog of NCBI NO: 37533460 NR Description: hypothetical protein [Oryza sativa (japonica
  misc_feature (1)..(130): Homolog of NCBI NO: 30691875 NR Description: glycosyltransferase family 8 [Arabidopsis
  misc_feature (1)..(130): Homolog of NCBI NO: 7485958 NR Description: hypothetical protein F22I13.40 - Arabidopsis
  misc_feature (1)..(130): Homolog of NCBI NO: 15233046 NR Description: putative protein
  misc_feature (1)..(130): Homolog of NCBI NO: 14517362 NR Description: AT3g61130/T20K12_30 [Arabidopsis thaliana]
  misc_feature (1)..(130): Homolog of NCBI NO: 7271113 NR Description: 68 kDa protein [Cicer arietinum]
  misc_feature (1)..(130): Homolog of NCBI NO: 38423965 NR Description: putative glycosyltransferase
  misc_feature (1)..(130): Homolog of NCBI NO: 18422837 NR Description: putative protein
  misc_feature (1)..(130): Homolog of NCBI NO: 10177914 NR Description: emb|CAB71043.1~gene_id:MCA23.10~strong similarity
MIDYYFRTGHARHDENPKFRNPKYLSILNHLRFYLPEIFPRLNKVLFLDDDTVVQRDLSALWLVDLKGKVNGAVETCRQDFHRFDKYLNFSNPLIAKNFDPHACGWAYGMNMFDLSDWRKQNITEVYHTWQ

SEQ ID NO: 19510 - DNA, 1875 bp, Zea mays subsp. mays; identical to SEQ ID NO: 2869
  misc_feature (1)..(1875): Ceres Seq. ID no. 12364204
  misc_feature: MA Experiment ID: 108535 Result: Up-regulated in Transcription
  misc_feature: MA Experiment 108535 PARAMETER Experiment Name: Zm_Meristem_P Parameter: Age (day) Value: 8
  misc_feature: MA Experiment 108535 PARAMETER Experiment Name: Zm_Meristem_P Parameter: Organism Value: Zea mays
  misc_feature: MA Experiment 108535 PARAMETER Experiment Name: Zm_Meristem_P Parameter: Plant Line Value: 35A19
  misc_feature: MA Experiment 108535 PARAMETER Experiment Name: Zm_Meristem_P Parameter: Tissue Value: Root Meristem vs. Above Root Meristem
  misc_feature: MA Experiment ID: 20000487 Result: Up-regulated in Transcription
  misc_feature: MA Experiment 20000487 PARAMETER Experiment Name: Zm_50mM_NH4NO3_L_to_H_P Parameter: Organism Value: Zea mays
  misc_feature: MA Experiment 20000487 PARAMETER Experiment Name: Zm_50mM_NH4NO3_L_to_H_P Parameter: Timepoint (hr) Value: 4
  misc_feature: MA Experiment 20000487 PARAMETER Experiment Name: Zm_50mM_NH4NO3_L_to_H_P Parameter: Tissue Value: Leaves
  misc_feature: MA Experiment 20000487 PARAMETER Experiment Name: Zm_50mM_NH4NO3_L_to_H_P Parameter: Treatment Value: 50mM NH4NO3 vs. 100mM Mannitol
  misc_feature: MA Experiment ID: 20000488 Result: Up-regulated in Transcription
  misc_feature: MA Experiment 20000488 PARAMETER Experiment Name: Zm_50mM_NH4NO3_L_to_H_P Parameter: Organism Value: Zea mays
  misc_feature: MA Experiment 20000488 PARAMETER Experiment Name: Zm_50mM_NH4NO3_L_to_H_P Parameter: Timepoint (hr) Value: 8
  misc_feature: MA Experiment 20000488 PARAMETER Experiment Name: Zm_50mM_NH4NO3_L_to_H_P Parameter: Tissue Value: Leaves
  misc_feature: MA Experiment 20000488 PARAMETER Experiment Name: Zm_50mM_NH4NO3_L_to_H_P Parameter: Treatment Value: 50mM NH4NO3 vs. 100mM Mannitol

SEQ ID NO: 19511 - protein, 516 aa, Zea mays subsp. mays; identical to SEQ ID NO: 2870
  peptide (1)..(516): Ceres Seq. ID no. 12364205
  misc_feature (342)..(371): Pfam Name: Zn-finger in Ran binding protein and others Pfam Description: Zn-finger in Ran binding protein and others
  misc_feature (342)..(371): Pfam Name: Zn-finger in Ran binding protein and others Pfam Description: Zn-finger in Ran binding protein and others
  misc_feature (140)..(433): Homolog of NCBI NO: 21593408 NR Description: unknown [Arabidopsis thaliana]
  misc_feature (42)..(86): Homolog of NCBI NO: 15221905 NR Description: hypothetical protein
  misc_feature (295)..(411): Homolog of NCBI NO: 15221905 NR Description: hypothetical protein
  misc_feature (278)..(402): Homolog of NCBI NO: 15221905 NR Description: hypothetical protein
  misc_feature (140)..(417): Homolog of NCBI NO: 18409643 NR Description: expressed protein
  misc_feature (140)..(414): Homolog of NCBI NO: 13324787 NR Description: hypothetical protein [Oryza sativa]
  misc_feature (66)..(98): Homolog of NCBI NO: 18409643 NR Description: expressed protein
  misc_feature (66)..(98): Homolog of NCBI NO: 21593408 NR Description: unknown [Arabidopsis thaliana]
  misc_feature (14)..(467): Homolog of NCBI NO: 13702809 NR Description: putative ARP protein [Oryza sativa]
  misc_feature (124)..(280): Homolog of NCBI NO: 15221905 NR Description: hypothetical protein
  misc_feature (295)..(411): Homolog of NCBI NO: 15221905 NR Description: hypothetical protein
  misc_feature (42)..(86): Homolog of NCBI NO: 15221905 NR Description: hypothetical protein
  misc_feature (140)..(433): Homolog of NCBI NO: 21593408 NR Description: unknown [Arabidopsis thaliana]
  misc_feature (140)..(417): Homolog of NCBI NO: 18409643 NR Description: expressed protein
  misc_feature (278)..(402): Homolog of NCBI NO: 15221905 NR Description: hypothetical protein
  misc_feature (66)..(98): Homolog of NCBI NO: 21593408 NR Description: unknown [Arabidopsis thaliana]
  misc_feature (66)..(98): Homolog of NCBI NO: 18409643 NR Description: expressed protein
  misc_feature (140)..(414): Homolog of NCBI NO: 13324787 NR Description: hypothetical protein [Oryza sativa]
  misc_feature (124)..(280): Homolog of NCBI NO: 15221905 NR Description: hypothetical protein
  misc_feature (14)..(467): Homolog of NCBI NO: 13702809 NR Description: putative ARP protein [Oryza sativa]

SEQ ID NO: 19512 - protein, 344 aa, Zea mays subsp. mays; identical to SEQ ID NO: 2871
  peptide (1)..(344): Ceres Seq. ID no. 12364206
  misc_feature (170)..(199): Pfam Name: Zn-finger in Ran binding protein and others Pfam Description: Zn-finger in Ran binding protein and others
  misc_feature (170)..(199): Pfam Name: Zn-finger in Ran binding protein and others Pfam Description: Zn-finger in Ran binding protein and others
  misc_feature (1)..(199): Homolog of NCBI NO: 25372841 NR Description: hypothetical protein F5A18.17 [imported] -
  misc_feature (155)..(344): Homolog of NCBI NO: 13702809 NR Description: putative ARP protein [Oryza sativa]
  misc_feature (1)..(298): Homolog of NCBI NO: 34393925 NR Description: unknown protein [Oryza sativa (japonica
  misc_feature (1)..(242): Homolog of NCBI NO: 13324787 NR Description: hypothetical protein [Oryza sativa]
  misc_feature (106)..(230): Homolog of NCBI NO: 15221905 NR Description: hypothetical protein
  misc_feature (1)..(199): Homolog of NCBI NO: 25372841 NR Description: hypothetical protein F5A18.17 [imported] -
  misc_feature (1)..(298): Homolog of NCBI NO: 34393925 NR Description: unknown protein [Oryza sativa (japonica
  misc_feature (106)..(230): Homolog of NCBI NO: 15221905 NR Description: hypothetical protein
  misc_feature (1)..(295): Homolog of NCBI NO: 13702809 NR Description: putative ARP protein [Oryza sativa]
  misc_feature (1)..(108): Homolog of NCBI NO: 15221905 NR Description: hypothetical protein
  misc_feature (123)..(239): Homolog of NCBI NO: 15221905 NR Description: hypothetical protein
  misc_feature (1)..(261): Homolog of NCBI NO: 21593408 NR Description: unknown [Arabidopsis thaliana]
  misc_feature (1)..(245): Homolog of NCBI NO: 18409643 NR Description: expressed protein
  misc_feature (1)..(242): Homolog of NCBI NO: 13324787 NR Description: hypothetical protein [Oryza sativa]
  misc_feature (155)..(344): Homolog of NCBI NO: 13702809 NR Description: putative ARP protein [Oryza sativa]
  misc_feature (1)..(245): Homolog of NCBI NO: 18409643 NR Description: expressed protein
  misc_feature (1)..(261): Homolog of NCBI NO: 21593408 NR Description: unknown [Arabidopsis thaliana]
  misc_feature (123)..(239): Homolog of NCBI NO: 15221905 NR Description: hypothetical protein
  misc_feature (1)..(108): Homolog of NCBI NO: 15221905 NR Description: hypothetical protein
  misc_feature (1)..(295): Homolog of NCBI NO: 13702809 NR Description: putative ARP protein [Oryza sativa]

SEQ ID NO: 19513 - protein, 279 aa, Zea mays subsp. mays; identical to SEQ ID NO: 2872
  peptide (1)..(279): Ceres Seq. ID no. 12364207
  misc_feature (105)..(134): Pfam Name: Zn-finger in Ran binding protein and others Pfam Description: Zn-finger in Ran binding protein and others
  misc_feature (105)..(134): Pfam Name: Zn-finger in Ran binding protein and others Pfam Description: Zn-finger in Ran binding protein and others
  misc_feature (1)..(134): Homolog of NCBI NO: 25372841 NR Description: hypothetical protein F5A18.17 [imported] -
  misc_feature (90)..(279): Homolog of NCBI NO: 13702809 NR Description: putative ARP protein [Oryza sativa]
  misc_feature (1)..(233): Homolog of NCBI NO: 34393925 NR Description: unknown protein [Oryza sativa (japonica
  misc_feature (1)..(177): Homolog of NCBI NO: 13324787 NR Description: hypothetical protein [Oryza sativa]
  misc_feature (41)..(165): Homolog of NCBI NO: 15221905 NR Description: hypothetical protein
  misc_feature (1)..(134): Homolog of NCBI NO: 25372841 NR Description: hypothetical protein F5A18.17 [imported] -
  misc_feature (1)..(233): Homolog of NCBI NO: 34393925 NR Description: unknown protein [Oryza sativa (japonica
  misc_feature (41)..(165): Homolog of NCBI NO: 15221905 NR Description: hypothetical protein
  misc_feature (1)..(230): Homolog of NCBI NO: 13702809 NR Description: putative ARP protein [Oryza sativa]
  misc_feature (1)..(43): Homolog of NCBI NO: 15221905 NR Description: hypothetical protein
  misc_feature (58)..(174): Homolog of NCBI NO: 15221905 NR Description: hypothetical protein
  misc_feature (1)..(196): Homolog of NCBI NO: 21593408 NR Description: unknown [Arabidopsis thaliana]
  misc_feature (1)..(180): Homolog of NCBI NO: 18409643 NR Description: expressed protein
  misc_feature (1)..(177): Homolog of NCBI NO: 13324787 NR Description: hypothetical protein [Oryza sativa]
  misc_feature (90)..(279): Homolog of NCBI NO: 13702809 NR Description: putative ARP protein [Oryza sativa]
  misc_feature (1)..(180): Homolog of NCBI NO: 18409643 NR Description: expressed protein
  misc_feature (1)..(196): Homolog of NCBI NO: 21593408 NR Description: unknown [Arabidopsis thaliana]
  misc_feature (58)..(174): Homolog of NCBI NO: 15221905 NR Description: hypothetical protein
  misc_feature (1)..(43): Homolog of NCBI NO: 15221905 NR Description: hypothetical protein
  misc_feature (1)..(230): Homolog of NCBI NO: 13702809 NR Description: putative ARP protein [Oryza sativa]

SEQ ID NO: 19514 - DNA, 2064 bp, Zea mays subsp. mays
  misc_feature (1)..(2064): Ceres Seq. ID no. 12364043
  misc_feature: MA Experiment ID: 108527 Result: Up-regulated in Transcription
  misc_feature: MA Experiment 108527 PARAMETER Experiment Name: Zm_5mM_NO_P Parameter: Age (day) Value: 8
  misc_feature: MA Experiment 108527 PARAMETER Experiment Name: Zm_5mM_NO_P Parameter: Organism Value: Zea mays
  misc_feature: MA Experiment 108527 PARAMETER Experiment Name: Zm_5mM_NO_P Parameter: Plant Line Value: 35A19
  misc_feature: MA Experiment 108527 PARAMETER Experiment Name: Zm_5mM_NO_P Parameter: Timepoint (hr) Value: 6
  misc_feature: MA Experiment 108527 PARAMETER Experiment Name: Zm_5mM_NO_P Parameter: Tissue Value: Aerial
  misc_feature: MA Experiment 108527 PARAMETER Experiment Name: Zm_5mM_NO_P Parameter: Treatment Value: 5mM NO vs. No Treatment
  misc_feature: MA Experiment ID: 108543 Result: Down-regulated in Transcription
  misc_feature: MA Experiment ID: 108597 Result: Up-regulated in Transcription
  misc_feature: MA Experiment 108597 PARAMETER Experiment Name: Zm_100uM_ABA_P Parameter: Age (day) Value: 9
  misc_feature: MA Experiment 108597 PARAMETER Experiment Name: Zm_100uM_ABA_P Parameter: Organism Value: Zea mays
  misc_feature: MA Experiment 108597 PARAMETER Experiment Name: Zm_100uM_ABA_P Parameter: Plant Line Value: 35A19
  misc_feature: MA Experiment 108597 PARAMETER Experiment Name: Zm_100uM_ABA_P Parameter: Timepoint (hr) Value: 24
  misc_feature: MA Experiment 108597 PARAMETER Experiment Name: Zm_100uM_ABA_P Parameter: Tissue Value: Aerial
  misc_feature: MA Experiment 108597 PARAMETER Experiment Name: Zm_100uM_ABA_P Parameter: Treatment Value: 100uM ABA vs. No Treatment
  misc_feature: MA Experiment ID: 20000478 Result: Up-regulated in Transcription
  misc_feature: MA Experiment 20000478 PARAMETER Experiment Name: Zm_5mM_SA_P Parameter: Age (day) Value: 11
  misc_feature: MA Experiment 20000478 PARAMETER Experiment Name: Zm_5mM_SA_P Parameter: Organism Value: Zea mays
  misc_feature: MA Experiment 20000478 PARAMETER Experiment Name: Zm_5mM_SA_P Parameter: Plant Line Value: 35A19
  misc_feature: MA Experiment 20000478 PARAMETER Experiment Name: Zm_5mM_SA_P Parameter: Timepoint (hr) Value: 72
  misc_feature: MA Experiment 20000478 PARAMETER Experiment Name: Zm_5mM_SA_P Parameter: Tissue Value: Aerial
  misc_feature: MA Experiment 20000478 PARAMETER Experiment Name: Zm_5mM_SA_P Parameter: Treatment Value: 5mM SA vs. No Treatment
  misc_feature: MA Experiment ID: 20000480 Result: Up-regulated in Transcription
  misc_feature: MA Experiment 20000480 PARAMETER Experiment Name: Zm_Drought_P Parameter: Age (day) Value: 11
  misc_feature: MA Experiment 20000480 PARAMETER Experiment Name: Zm_Drought_P Parameter: Organism Value: Zea mays
  misc_feature: MA Experiment 20000480 PARAMETER Experiment Name: Zm_Drought_P Parameter: Plant Line Value: 35A19
  misc_feature: MA Experiment 20000480 PARAMETER Experiment Name: Zm_Drought_P Parameter: Timepoint (hr) Value: 72
  misc_feature: MA Experiment 20000480 PARAMETER Experiment Name: Zm_Drought_P Parameter: Tissue Value: Aerial
  misc_feature: MA Experiment 20000480 PARAMETER Experiment Name: Zm_Drought_P Parameter: Treatment Value: Drought vs. No Drought
  misc_feature: MA Experiment ID: 20000535 Result: Down-regulated in Transcription
  misc_feature: MA Experiment 20000535 PARAMETER Experiment Name: Zm_Hybrid_Seed_Dev_P Parameter: DAP Value: 30 vs. 12
  misc_feature: MA Experiment 20000535 PARAMETER Experiment Name: Zm_Hybrid_Seed_Dev_P Parameter: Organism Value: Zea mays
  misc_feature: MA Experiment 20000535 PARAMETER Experiment Name: Zm_Hybrid_Seed_Dev_P Parameter: Plant Line Value: 35A19
  misc_feature: MA Experiment 20000535 PARAMETER Experiment Name: Zm_Hybrid_Seed_Dev_P Parameter: Tissue Value: Embryo vs. Unfert Floret
  misc_feature: MA Experiment ID: 20000626 Result: Up-regulated in Transcription
  misc_feature: MA Experiment 20000626 PARAMETER Experiment Name: Zm_Herbicide-Treatments_P Parameter: Timepoint (hr) Value: 12
  misc_feature: MA Experiment 20000626 PARAMETER Experiment Name: Zm_Herbicide-Treatments_P Parameter: Tissue Value: Aerial
  misc_feature: MA Experiment 20000626 PARAMETER Experiment Name: Zm_Herbicide-Treatments_P Parameter: Treatment Value: Roundup vs. No Treatment
gcacgagaccattacctagaacatcctaatcgaaaaatagtggtctatgtcaaatcttctagcgctcgcaattcttctcctctccaccacgccggcgccgacggccggtgaacagaccatctgcagcgatgccacgtacgagcgaaacagcacatacaagtccagtctgaggtcggtagccggcgcactgaccggggacgccgcgaggctgcactcgtccaccggcgctgcaggggagggccccgacaaggtctacggcgccgtgctctgccgggcggacacagcgggtgctgactgcgccaggcgcctccgggacgcccttgccgccatcaccgacggggacggccgctcgcgttgcgcgctccacagggacgtggccgtctactccgagctgtaccagctccgtttctccgacagggacttcctcgccgacttcagcaacgcgccggaatgggtcgacgtcacgaacccaggccccgtgccgctcgccgtggccgcgcggttcgaccagcgggtcacggagctgctgagcgcgctcgctgacgcggcggcggggcgaccgggcaggtgggccgtcggcgaagcgccgtggtcgtcgtcggggggcagggaccgggcggtgtacgcgctggcgcagtgcacgctggacatgccgccggaccactgccgggcctgcctcgatggcgccatggcagagcggcgacggaaggtcggcggcggcaagatgggcgcggcagtcttcggggcgcggtgcaccctgcggtatgagatggatctgcagttcttcaacgtcactggcaacagcaagatgctgtccctgcttgggaagaagaaagaccgtgcgttcgtcatcgttgcaacagcttacgcttcggcaatcctctgtacacgcttgcttttctggctgctaagcgtctggaggaaacaaaaaaggaaaatggacttgacggaggagccccagaatgtggatgaaatactcaggtcatggagaattgaagatgctagtttagagttctcgctgtatgatttctctcagattgctgatgccacagtcaacttctcacccaaaaatatgataggggagggcggatttggcccagtttacaagggagtacttactgatggacaagaggtagcgataaaaagactgtctgctcggtcacgacaaggtctagtagagttcaagaatgagatccaggttatagcaaagcttcagcacagaaacctcgtcaggctccttggctgttgcatccatgaagaagagaagatgctggtctacgaatacctgacgaacaaaagcttggaccacttcatttttgatccaatcagacaggcatcgcttgattggaagagacggattaaaatagttgatggtatagcccagggactcctgtacctccacaatctctcgagaatacgcatcatccacagggacttgaaagcaggtaacatcctgttagattctgacctaaacccgaaaatctctgatttcgggatggcgaggatatttccatcggatgccactcaagcaacagccagcagactcgtgggcacatatggatacatggctcctgaatatgtgtctgatggccttctctcgatcaagtcagatgttttcagtttcggggtcctgcttcttgagattataagtggaaagaggagctcaggttttcagcacaatggagagttctacaaccttcttgaatacgcctgggaactgtggaaggatagaagatggaatgagttcattgatcaatcctttggtgatgactacgaactggaagagctgatgaaataccttgctgtggcattgctgtgtgttcaagaaaaaacagtagatcgtcccacaatgcctgatgttgttgcagttcttagcagcgatggcgtcactttgccagaaccaaagcagccagcttactcctatgcgaaagtagatgtgtcagtaaatgtcgctgtgttgagtagcagaaatgatgttaccatcactactacaaatggcagataatagaatgtaatactgttaataaagtgtgcgctacaggtcttggtcatcctccttgtgtt

SEQ ID NO: 19515 - protein, 652 aa, Zea mays subsp. mays
  peptide (1)..(652): Ceres Seq. ID no. 12364044
  misc_feature (5)..(258): Homolog of NCBI NO: 28564782 NR Description: P0683C09.26 [Oryza sativa (japonica
  misc_feature (192)..(652): Homolog of NCBI NO: 28564782 NR Description: P0683C09.26 [Oryza sativa (japonica
  misc_feature (4)..(624): Homolog of NCBI NO: 34899292 NR Description: receptor protein kinase-like protein
  misc_feature (297)..(652): Homolog of NCBI NO: 33146472 NR Description: putative receptor-like protein kinase 4
  misc_feature (4)..(247): Homolog of NCBI NO: 34898776 NR Description: OJ1131_E05.12 [Oryza sativa (japonica
  misc_feature (307)..(647): Homolog of NCBI NO: 34898776 NR Description: OJ1131_E05.12 [Oryza sativa (japonica
  misc_feature (24)..(640): Homolog of NCBI NO: 34898778 NR Description: OJ1131_E05.14 [Oryza sativa (japonica
  misc_feature (24)..(640): Homolog of NCBI NO: 33146474 NR Description: putative receptor-like protein kinase 4
  misc_feature (4)..(244): Homolog of NCBI NO: 34898768 NR Description: OJ1131_E05.8 [Oryza sativa (japonica
  misc_feature (297)..(650): Homolog of NCBI NO: 34898768 NR Description: OJ1131_E05.8 [Oryza sativa (japonica
MSNLLALAILLLSTTPAPTAGEQTICSDATYERNSTYKSSLRSVAGALTGDAARLHSSTGAAGEGPDKVYGAVLCRADTAGADCARRLRDALAAITDGDGRSRCALHRDVAVYSELYQLRFSDRDFLADFSNAPEWVDVTNPGPVPLAVAARFDQRVTELLSALADAAAGRPGRWAVGEAPWSSSGGRDRAVYALAQCTLDMPPDHCRACLDGAMAERRRKVGGGKMGAAVFGARCTLRYEMDLQFFNVTGNSKMLSLLGKKKDRAFVIVATAYASAILCTRLLFWLLSVWRKQKRKMDLTEEPQNVDEILRSWRIEDASLEFSLYDFSQIADATVNFSPKNMIGEGGFGPVYKGVLTDGQEVAIKRLSARSRQGLVEFKNEIQVIAKLQHRNLVRLLGCCIHEEEKMLVYEYLTNKSLDHFIFDPIRQASLDWKRRIKIVDGIAQGLLYLHNLSRIRIIHRDLKAGNILLDSDLNPKISDFGMARIFPSDATQATASRLVGTYGYMAPEYVSDGLLSIKSDVFSFGVLLLEIISGKRSSGFQHNGEFYNLLEYAWELWKDRRWNEFIDQSFGDDYELEELMKYLAVALLCVQEKTVDRPTMPDVVAVLSSDGVTLPEPKQPAYSYAKVDVSVNVAVLSSRNDVTITTTNGR

SEQ ID NO: 19516 - protein, 451 aa, Zea mays subsp. mays
  peptide (1)..(451): Ceres Seq. ID no. 12364045
  misc_feature (96)..(451): Homolog of NCBI NO: 33146472 NR Description: putative receptor-like protein kinase 4
  misc_feature (1)..(46): Homolog of NCBI NO: 34898776 NR Description: OJ1131_E05.12 [Oryza sativa (japonica
  misc_feature (106)..(446): Homolog of NCBI NO: 34898776 NR Description: OJ1131_E05.12 [Oryza sativa (japonica
  misc_feature (1)..(439): Homolog of NCBI NO: 34898778 NR Description: OJ1131_E05.14 [Oryza sativa (japonica
  misc_feature (1)..(439): Homolog of NCBI NO: 33146474 NR Description: putative receptor-like protein kinase 4
  misc_feature (1)..(43): Homolog of NCBI NO: 34898768 NR Description: OJ1131_E05.8 [Oryza sativa (japonica
  misc_feature (96)..(449): Homolog of NCBI NO: 34898768 NR Description: OJ1131_E05.8 [Oryza sativa (japonica
  misc_feature (1)..(57): Homolog of NCBI NO: 28564782 NR Description: P0683C09.26 [Oryza sativa (japonica
  misc_feature (1)..(451): Homolog of NCBI NO: 28564782 NR Description: P0683C09.26 [Oryza sativa (japonica
  misc_feature (1)..(423): Homolog of NCBI NO: 34899292 NR Description: receptor protein kinase-like protein
MPPDHCRACLDGAMAERRRKVGGGKMGAAVFGARCTLRYEMDLQFFNVTGNSKMLSLLGKKKDRAFVIVATAYASAILCTRLLFWLLSVWRKQKRKMDLTEEPQNVDEILRSWRIEDASLEFSLYDFSQIADATVNFSPKNMIGEGGFGPVYKGVLTDGQEVAIKRLSARSRQGLVEFKNEIQVIAKLQHRNLVRLLGCCIHEEEKMLVYEYLTNKSLDHFIFDPIRQASLDWKRRIKIVDGIAQGLLYLHNLSRIRIIHRDLKAGNILLDSDLNPKISDFGMARIFPSDATQATASRLVGTYGYMAPEYVSDGLLSIKSDVFSFGVLLLEIISGKRSSGFQHNGEFYNLLEYAWELWKDRRWNEFIDQSFGDDYELEELMKYLAVALLCVQEKTVDRPTMPDVVAVLSSDGVTLPEPKQPAYSYAKVDVSVNVAVLSSRNDVTITTTNGR

SEQ ID NO: 19517 - protein, 438 aa, Zea mays subsp. mays
  peptide (1)..(438): Ceres Seq. ID no. 12364046
  misc_feature (1)..(44): Homolog of NCBI NO: 28564782 NR Description: P0683C09.26 [Oryza sativa (japonica
  misc_feature (1)..(438): Homolog of NCBI NO: 28564782 NR Description: P0683C09.26 [Oryza sativa (japonica
  misc_feature (1)..(410): Homolog of NCBI NO: 34899292 NR Description: receptor protein kinase-like protein
  misc_feature (83)..(438): Homolog of NCBI NO: 33146472 NR Description: putative receptor-like protein kinase 4
  misc_feature (1)..(33): Homolog of NCBI NO: 34898776 NR Description: OJ1131_E05.12 [Oryza sativa (japonica
  misc_feature (93)..(433): Homolog of NCBI NO: 34898776 NR Description: OJ1131_E05.12 [Oryza sativa (japonica
  misc_feature (1)..(426): Homolog of NCBI NO: 34898778 NR Description: OJ1131_E05.14 [Oryza sativa (japonica
  misc_feature (1)..(426): Homolog of NCBI NO: 33146474 NR Description: putative receptor-like protein kinase 4
  misc_feature (1)..(30): Homolog of NCBI NO: 34898768 NR Description: OJ1131_E05.8 [Oryza sativa (japonica
  misc_feature (83)..(436): Homolog of NCBI NO: 34898768 NR Description: OJ1131_E05.8 [Oryza sativa (japonica
MAERRRKVGGGKMGAAVFGARCTLRYEMDLQFFNVTGNSKMLSLLGKKKDRAFVIVATAYASAILCTRLLFWLLSVWRKQKRKMDLTEEPQNVDEILRSWRIEDASLEFSLYDFSQIADATVNFSPKNMIGEGGFGPVYKGVLTDGQEVAIKRLSARSRQGLVEFKNEIQVIAKLQHRNLVRLLGCCIHEEEKMLVYEYLTNKSLDHFIFDPIRQASLDWKRRIKIVDGIAQGLLYLHNLSRIRIIHRDLKAGNILLDSDLNPKISDFGMARIFPSDATQATASRLVGTYGYMAPEYVSDGLLSIKSDVFSFGVLLLEIISGKRSSGFQHNGEFYNLLEYAWELWKDRRWNEFIDQSFGDDYELEELMKYLAVALLCVQEKTVDRPTMPDVVAVLSSDGVTLPEPKQPAYSYAKVDVSVNVAVLSSRNDVTITTTNGR

SEQ ID NO: 19518 - DNA, 1292 bp, Zea mays subsp. mays
  misc_feature (1)..(1292): Ceres Seq. ID no. 12358774
  misc_feature: MA Experiment ID: 108515 Result: Up-regulated in Transcription
  misc_feature: MA Experiment 108515 PARAMETER Experiment Name: Zm_2mM_SA_P Parameter: Age (day) Value: 8
  misc_feature: MA Experiment 108515 PARAMETER Experiment Name: Zm_2mM_SA_P Parameter: Organism Value: Zea mays
  misc_feature: MA Experiment 108515 PARAMETER Experiment Name: Zm_2mM_SA_P Parameter: Plant Line Value: 35A19
  misc_feature: MA Experiment 108515 PARAMETER Experiment Name: Zm_2mM_SA_P Parameter: Timepoint (hr) Value: 12
  misc_feature: MA Experiment 108515 PARAMETER Experiment Name: Zm_2mM_SA_P Parameter: Tissue Value: Aerial
  misc_feature: MA Experiment 108515 PARAMETER Experiment Name: Zm_2mM_SA_P Parameter: Treatment Value: 2mM SA vs. No Treatment
  misc_feature: MA Experiment ID: 108522 Result: Up-regulated in Transcription
  misc_feature: MA Experiment 108522 PARAMETER Experiment Name: Zm_42deg_Heat_P Parameter: Age (day) Value: 8
  misc_feature: MA Experiment 108522 PARAMETER Experiment Name: Zm_42deg_Heat_P Parameter: Organism Value: Zea mays
  misc_feature: MA Experiment 108522 PARAMETER Experiment Name: Zm_42deg_Heat_P Parameter: Plant Line Value: 35A19
  misc_feature: MA Experiment 108522 PARAMETER Experiment Name: Zm_42deg_Heat_P Parameter: Temperature (deg C) Value: 42 vs. 22
  misc_feature: MA Experiment 108522 PARAMETER Experiment Name: Zm_42deg_Heat_P Parameter: Timepoint (hr) Value: 1
  misc_feature: MA Experiment 108522 PARAMETER Experiment Name: Zm_42deg_Heat_P Parameter: Tissue Value: Aerial
  misc_feature: MA Experiment ID: 108523 Result: Up-regulated in Transcription
  misc_feature: MA Experiment 108523 PARAMETER Experiment Name: Zm_42deg_Heat_P Parameter: Age (day) Value: 8
  misc_feature: MA Experiment 108523 PARAMETER Experiment Name: Zm_42deg_Heat_P Parameter: Organism Value: Zea mays
  misc_feature: MA Experiment 108523 PARAMETER Experiment Name: Zm_42deg_Heat_P Parameter: Plant Line Value: 35A19
  misc_feature: MA Experiment 108523 PARAMETER Experiment Name: Zm_42deg_Heat_P Parameter: Temperature (deg C) Value: 42 vs. 22
  misc_feature: MA Experiment 108523 PARAMETER Experiment Name: Zm_42deg_Heat_P Parameter: Timepoint (hr) Value: 6
  misc_feature: MA Experiment 108523 PARAMETER Experiment Name: Zm_42deg_Heat_P Parameter: Tissue Value: Aerial
  misc_feature: MA Experiment ID: 108526 Result: Up-regulated in Transcription
  misc_feature: MA Experiment 108526 PARAMETER Experiment Name: Zm_5mM_NO_P Parameter: Age (day) Value: 8
  misc_feature: MA Experiment 108526 PARAMETER Experiment Name: Zm_5mM_NO_P Parameter: Organism Value: Zea mays
  misc_feature: MA Experiment 108526 PARAMETER Experiment Name: Zm_5mM_NO_P Parameter: Plant Line Value: 35A19
  misc_feature: MA Experiment 108526 PARAMETER Experiment Name: Zm_5mM_NO_P Parameter: Timepoint (hr) Value: 1
  misc_feature: MA Experiment 108526 PARAMETER Experiment Name: Zm_5mM_NO_P Parameter: Tissue Value: Aerial
  misc_feature: MA Experiment 108526 PARAMETER Experiment Name: Zm_5mM_NO_P Parameter: Treatment Value: 5mM NO vs. No Treatment
  misc_feature: MA Experiment ID: 108527 Result: Up-regulated in Transcription
  misc_feature: MA Experiment 108527 PARAMETER Experiment Name: Zm_5mM_NO_P Parameter: Age (day) Value: 8
  misc_feature: MA Experiment 108527 PARAMETER Experiment Name: Zm_5mM_NO_P Parameter: Organism Value: Zea mays
  misc_feature: MA Experiment 108527 PARAMETER Experiment Name: Zm_5mM_NO_P Parameter: Plant Line Value: 35A19
  misc_feature: MA Experiment 108527 PARAMETER Experiment Name: Zm_5mM_NO_P Parameter: Timepoint (hr) Value: 6
  misc_feature: MA Experiment 108527 PARAMETER Experiment Name: Zm_5mM_NO_P Parameter: Tissue Value: Aerial
  misc_feature: MA Experiment 108527 PARAMETER Experiment Name: Zm_5mM_NO_P Parameter: Treatment Value: 5mM NO vs. No Treatment
  misc_feature: MA Experiment ID: 108528 Result: Down-regulated in Transcription
  misc_feature: MA Experiment 108528 PARAMETER Experiment Name: Zm_Imbibed_Seeds_P Parameter: Age (day) Value: 5 vs. 2
  misc_feature: MA Experiment 108528 PARAMETER Experiment Name: Zm_Imbibed_Seeds_P Parameter: Organism Value: Zea mays
  misc_feature: MA Experiment 108528 PARAMETER Experiment Name: Zm_Imbibed_Seeds_P Parameter: Plant Line Value: 35A19
  misc_feature: MA Experiment 108528 PARAMETER Experiment Name: Zm_Imbibed_Seeds_P Parameter: Tissue Value: Aerial vs. Embryo
  misc_feature: MA Experiment ID: 108530 Result: Down-regulated in Transcription
  misc_feature: MA Experiment 108530 PARAMETER Experiment Name: Zm_Imbibed_Seeds_P Parameter: Age (day) Value: 6 vs. 2
  misc_feature: MA Experiment 108530 PARAMETER Experiment Name: Zm_Imbibed_Seeds_P Parameter: Organism Value: Zea mays
  misc_feature: MA Experiment 108530 PARAMETER Experiment Name: Zm_Imbibed_Seeds_P Parameter: Plant Line Value: 35A19
  misc_feature: MA Experiment 108530 PARAMETER Experiment Name: Zm_Imbibed_Seeds_P Parameter: Tissue Value: Aerial vs. Embryo
  misc_feature: MA Experiment ID: 108533 Result: Up-regulated in Transcription
  misc_feature: MA Experiment 108533 PARAMETER Experiment Name: Zm_4deg_Cold_P Parameter: Age (hr) Value: 8
  misc_feature: MA Experiment 108533 PARAMETER Experiment Name: Zm_4deg_Cold_P Parameter: Organism Value: Zea mays
  misc_feature: MA Experiment 108533 PARAMETER Experiment Name: Zm_4deg_Cold_P Parameter: Plant Line Value: 35A19
  misc_feature: MA Experiment 108533 PARAMETER Experiment Name: Zm_4deg_Cold_P Parameter: Temperature (deg C) Value: 4 vs. 22
  misc_feature: MA Experiment 108533 PARAMETER Experiment Name: Zm_4deg_Cold_P Parameter: Timepoint (hr) Value: 1
  misc_feature: MA Experiment 108533 PARAMETER Experiment Name: Zm_4deg_Cold_P Parameter: Tissue Value: Aerial
  misc_feature: MA Experiment ID: 108534 Result: Up-regulated in Transcription
  misc_feature: MA Experiment 108534 PARAMETER Experiment Name: Zm_4deg_Cold_P Parameter: Age (hr) Value: 8
  misc_feature: MA Experiment 108534 PARAMETER Experiment Name: Zm_4deg_Cold_P Parameter: Organism Value: Zea mays
  misc_feature: MA Experiment 108534 PARAMETER Experiment Name: Zm_4deg_Cold_P Parameter: Plant Line Value: 35A19
  misc_feature: MA Experiment 108534 PARAMETER Experiment Name: Zm_4deg_Cold_P Parameter: Temperature (deg C) Value: 4 vs. 22
  misc_feature: MA Experiment 108534 PARAMETER Experiment Name: Zm_4deg_Cold_P Parameter: Timepoint (hr) Value: 6
  misc_feature: MA Experiment 108534 PARAMETER Experiment Name: Zm_4deg_Cold_P Parameter: Tissue Value: Aerial
  misc_feature: MA Experiment ID: 108536 Result: Up-regulated in Transcription
  misc_feature: MA Experiment 108536 PARAMETER Experiment Name: Zm_Meristem_P Parameter: Age (day) Value: 8
  misc_feature: MA Experiment 108536 PARAMETER Experiment Name: Zm_Meristem_P Parameter: Organism Value: Zea mays
  misc_feature: MA Experiment 108536 PARAMETER Experiment Name: Zm_Meristem_P Parameter: Plant Line Value: 35A19
  misc_feature: MA Experiment 108536 PARAMETER Experiment Name: Zm_Meristem_P Parameter: Tissue Value: Shoot Meristem vs. Above Shoot Meristem
  misc_feature: MA Experiment ID: 108543 Result: Up-regulated in Transcription
  misc_feature: MA Experiment ID: 108545 Result: Down-regulated in Transcription
  misc_feature: MA Experiment 108545 PARAMETER Experiment Name: Zm_Imbibed_Seeds_P Parameter: Age (day) Value: 3 vs. 2
  misc_feature: MA Experiment 108545 PARAMETER Experiment Name: Zm_Imbibed_Seeds_P Parameter: Organism Value: Zea mays
  misc_feature: MA Experiment 108545 PARAMETER Experiment Name: Zm_Imbibed_Seeds_P Parameter: Plant Line Value: 35A19
  misc_feature: MA Experiment 108545 PARAMETER Experiment Name: Zm_Imbibed_Seeds_P Parameter: Tissue Value: Aerial vs. Embryo
  misc_feature: MA Experiment ID: 108687 Result: Up-regulated in Transcription
  misc_feature: MA Experiment 108687 PARAMETER Experiment Name: Zm_Embryos-Flowers__P Parameter: Tissue Value: Embryo vs. Aerial+
  misc_feature: MA Experiment ID: 108688 Result: Down-regulated in Transcription
  misc_feature: MA Experiment 108688 PARAMETER Experiment Name: Zm_Embryos-Flowers__P Parameter: Tissue Value: Immature Flowers vs. Aerial+
  misc_feature: MA Experiment ID: 20000535 Result: Down-regulated in Transcription
  misc_feature: MA Experiment 20000535 PARAMETER Experiment Name: Zm_Hybrid_Seed_Dev_P Parameter: DAP Value: 30 vs. 12
  misc_feature: MA Experiment 20000535 PARAMETER Experiment Name: Zm_Hybrid_Seed_Dev_P Parameter: Organism Value: Zea mays
  misc_feature: MA Experiment 20000535 PARAMETER Experiment Name: Zm_Hybrid_Seed_Dev_P Parameter: Plant Line Value: 35A19
  misc_feature: MA Experiment 20000535 PARAMETER Experiment Name: Zm_Hybrid_Seed_Dev_P Parameter: Tissue Value: Embryo vs. Unfert Floret
  misc_feature: MA Experiment ID: 20000630 Result: Up-regulated in Transcription
  misc_feature: MA Experiment 20000630 PARAMETER Experiment Name: Zm_Herbicide-Treatments_P Parameter: Timepoint (hr) Value: 4
  misc_feature: MA Experiment 20000630 PARAMETER Experiment Name: Zm_Herbicide-Treatments_P Parameter: Tissue Value: Aerial
  misc_feature: MA Experiment 20000630 PARAMETER Experiment Name: Zm_Herbicide-Treatments_P Parameter: Treatment Value: Roundup vs. No Treatment
ttgcacgacgtctccaccactacaccacacctcaagtccacaacaccaccagcctcgtctcagccgcttcagcataccacaccgcacgcaaacccaccgcgcgctacgaccaccaccgtcaccatggccgccgcgcgctacgacgtggagaagggcgggaggaataacggggatgggaagccttcgccgccgccgccgggccacctgtacccgcagcgcgacggggagagggagtggttgccgtggttggtgccgctcgtcgtggccgtcaacatcgtgctcttcgccgtggcgatgtacgtcaacaactgcccggcccacgccgcctcgtctcgccgcggcggcgccggatcatgcgtcgcccgcgggttcctccaccgcttctcgttccagccgctcagcgagaacccgctcctcgggccctcgtcggccacgctgcagaagctgggagcgcttgtatgggacaaagttgtgcgggagcaccaggggtggaggctcgtcacctgcatctggctgcacgccggtgttgcccacctcctggccaacatgatcagcctcgtgctcatcgggctcagactggagcaacagtttggatacgtgagagttggcatcatctaccttgtctctggcgtcggaggcagcgtgctttcgtctctgttcatcaggaacaacatctctgtcggcgcttccggagctctgttcgggctccttggggccatgctgtcggagctcttcaccaactggaccatctatgcaaacaaggctgcagccctggtgaccctgctggtcgtcatcgccatcaacctcgccatcggcatcctcccgcacgtcgacaacttcgcgcacatcggagggttcctcaccggcttcctcctcgggttcgtcttactgatgcgcccgcactacggctggatgcagcgctacgccctgccctccgacgtcaagtacaccaccaagaagtacctggcctaccagtgggctctgctggccgtggcctcggtcctcgctgtcatcgggttcgccgtagggctggggatgcttttcagaggagtgaacgcgaatgatcactgcggctggtgccactacctcagctgtgttccgacctccagatggagctgtgggaagtgaagatcggcgtgctgacaaaatggacttgaagccaggatagagcccatggccgcccatgggaccttttcgagcaagcatttccatgaatagatagatatacagctcgcagtcttactgtacataatgtcaccaggatgtggtttatatatgacattatttatgct

SEQ ID NO: 19519 - protein, 375 aa, Zea mays subsp. mays
  peptide (1)..(375): Ceres Seq. ID no. 12358775
  misc_feature (76)..(372): Homolog of NCBI NO: 15236387 NR Description: putative membrane protein; protein id:
  misc_feature (77)..(375): Homolog of NCBI NO: 11357824 NR Description: hypothetical protein F5K20.80 - Arabidopsis
  misc_feature (75)..(373): Homolog of NCBI NO: 25402744 NR Description: protein T12C24.28 [imported] - Arabidopsis
  misc_feature (75)..(373): Homolog of NCBI NO: 15222058 NR Description: membrane protein, putative
  misc_feature (77)..(375): Homolog of NCBI NO: 30693911 NR Description: membrane protein, Rhomboid family [Arabidopsis
  misc_feature (34)..(375): Homolog of NCBI NO: 38344377 NR Description: OSJNBb0032E06.11 [Oryza sativa (japonica
  misc_feature (50)..(373): Homolog of NCBI NO: 15240744 NR Description: membrane protein
  misc_feature (45)..(373): Homolog of NCBI NO: 15221690 NR Description: membrane protein, putative; protein id:
  misc_feature (55)..(373): Homolog of NCBI NO: 294845 NR Description: membrane protein [Saccharum hybrid cultivar
  misc_feature (43)..(374): Homolog of NCBI NO: 37536172 NR Description: putative membrane protein
LHDVSTTTPHLKSTTPPASSQPLQHTTPHANPPRATTTTVTMAAARYDVEKGGRNNGDGKPSPPPPGHLYPQRDGEREWLPWLVPLVVAVNIVLFAVAMYVNNCPAHAASSRRGGAGSCVARGFLHRFSFQPLSENPLLGPSSATLQKLGALVWDKVVREHQGWRLVTCIWLHAGVAHLLANMISLVLIGLRLEQQFGYVRVGIIYLVSGVGGSVLSSLFIRNNISVGASGALFGLLGAMLSELFTNWTIYANKAAALVTLLVVIAINLAIGILPHVDNFAHIGGFLTGFLLGFVLLMRPHYGWMQRYALPSDVKYTTKKYLAYQWALLAVASVLAVIGFAVGLGMLFRGVNANDHCGWCHYLSCVPTSRWSCGK

SEQ ID NO: 19520 - protein, 334 aa, Zea mays subsp. mays
  peptide (1)..(334): Ceres Seq. ID no. 12358776
  misc_feature (35)..(331): Homolog of NCBI NO: 15236387 NR Description: putative membrane protein; protein id:
  misc_feature (36)..(334): Homolog of NCBI NO: 11357824 NR Description: hypothetical protein F5K20.80 - Arabidopsis
  misc_feature (34)..(332): Homolog of NCBI NO: 25402744 NR Description: protein T12C24.28 [imported] - Arabidopsis
  misc_feature (34)..(332): Homolog of NCBI NO: 15222058 NR Description: membrane protein, putative
  misc_feature (36)..(334): Homolog of NCBI NO: 30693911 NR Description: membrane protein, Rhomboid family [Arabidopsis
  misc_feature (1)..(334): Homolog of NCBI NO: 38344377 NR Description: OSJNBb0032E06.11 [Oryza sativa (japonica
  misc_feature (9)..(332): Homolog of NCBI NO: 15240744 NR Description: membrane protein
  misc_feature (4)..(332): Homolog of NCBI NO: 15221690 NR Description: membrane protein, putative; protein id:
  misc_feature (14)..(332): Homolog of NCBI NO: 294845 NR Description: membrane protein [Saccharum hybrid cultivar
  misc_feature (2)..(333): Homolog of NCBI NO: 37536172 NR Description: putative membrane protein
MAAARYDVEKGGRNNGDGKPSPPPPGHLYPQRDGEREWLPWLVPLVVAVNIVLFAVAMYVNNCPAHAASSRRGGAGSCVARGFLHRFSFQPLSENPLLGPSSATLQKLGALVWDKVVREHQGWRLVTCIWLHAGVAHLLANMISLVLIGLRLEQQFGYVRVGIIYLVSGVGGSVLSSLFIRNNISVGASGALFGLLGAMLSELFTNWTIYANKAAALVTLLVVIAINLAIGILPHVDNFAHIGGFLTGFLLGFVLLMRPHYGWMQRYALPSDVKYTTKKYLAYQWALLAVASVLAVIGFAVGLGMLFRGVNANDHCGWCHYLSCVPTSRWSCGK

SEQ ID NO: 19521 - protein, 277 aa, Zea mays subsp. mays
  peptide (1)..(277): Ceres Seq. ID no. 12358777
  misc_feature (1)..(274): Homolog of NCBI NO: 15236387 NR Description: putative membrane protein; protein id:
  misc_feature (1)..(277): Homolog of NCBI NO: 11357824 NR Description: hypothetical protein F5K20.80 - Arabidopsis
  misc_feature (1)..(275): Homolog of NCBI NO: 25402744 NR Description: protein T12C24.28 [imported] - Arabidopsis
  misc_feature (1)..(275): Homolog of NCBI NO: 15222058 NR Description: membrane protein, putative
  misc_feature (1)..(277): Homolog of NCBI NO: 30693911 NR Description: membrane protein, Rhomboid family [Arabidopsis
  misc_feature (1)..(277): Homolog of NCBI NO: 38344377 NR Description: OSJNBb0032E06.11 [Oryza sativa (japonica
  misc_feature (1)..(275): Homolog of NCBI NO: 15240744 NR Description: membrane protein
  misc_feature (1)..(275): Homolog of NCBI NO: 15221690 NR Description: membrane protein, putative; protein id:
  misc_feature (1)..(275): Homolog of NCBI NO: 294845 NR Description: membrane protein [Saccharum hybrid cultivar
  misc_feature (1)..(276): Homolog of NCBI NO: 37536172 NR Description: putative membrane protein
MYVNNCPAHAASSRRGGAGSCVARGFLHRFSFQPLSENPLLGPSSATLQKLGALVWDKVVREHQGWRLVTCIWLHAGVAHLLANMISLVLIGLRLEQQFGYVRVGIIYLVSGVGGSVLSSLFIRNNISVGASGALFGLLGAMLSELFTNWTIYANKAAALVTLLVVIAINLAIGILPHVDNFAHIGGFLTGFLLGFVLLMRPHYGWMQRYALPSDVKYTTKKYLAYQWALLAVASVLAVIGFAVGLGMLFRGVNANDHCGWCHYLSCVPTSRWSCGK

SEQ ID NO: 19522 - DNA, 1065 bp, Zea mays subsp. mays
  misc_feature (1)..(1065): Ceres Seq. ID no. 12419192
  misc_feature: MA Experiment ID: 20000534 Result: Down-regulated in Transcription
  misc_feature: MA Experiment 20000534 PARAMETER Experiment Name: Zm_Hybrid_Pollen_P Parameter: Age (day) Value: 8
  misc_feature: MA Experiment 20000534 PARAMETER Experiment Name: Zm_Hybrid_Pollen_P Parameter: Organism Value: Zea mays
  misc_feature: MA Experiment 20000534 PARAMETER Experiment Name: Zm_Hybrid_Pollen_P Parameter: Plant Line Value: 35A19
  misc_feature: MA Experiment 20000534 PARAMETER Experiment Name: Zm_Hybrid_Pollen_P Parameter: Tissue Value: Pollen vs. Aerial
aacacgtgagctctttttgcagtctgctcgctggcgattgcgattcccaccagtcccccagccccaggcacgaaacctaacccacccaagcggcaaccatggagccctcccccatcggcgccagcggctcggcggagcggtggcgcgcggaggcggcgcgggcgttccagcactacctggaccgctcggcgccgcacacggcggggcggtgggcgggcacgctcgtggccgcggcggtgtacgcgctgcgggtctactacgtgcggggcttctacgtcgtcacctacgggctgggcatctacctgatcaacctcctcatcggcttcctctcccccatggtcgaaccggagctcgaggccgggcccgggctcccaaccagcggctccgacgagttcaagcccttcatccgtcgcctccccgagttcaagttctggtatgccgtcacaaaagccttttgcattgcctttgtcatgaccttcttctctgtattcgacgttcctgtcttttggccaatacttctctgttattggattgtgctttttgtcctgacaatgaagcgacaaattgtgcatatgatcaagtacaagtatgtcccattcagcataggaaagcagaggtatggcggaaagaaaggccctgccgccagtgcatctaaggagtaaagacggagggagggtgtgggacctcgagagcagtgcatgtgctatctttgagggcatcctgctggcatggtggtattttgagtaccagggctactgatagtgaacgcacaccatattcgctagtggagagtggagattgcagagaagctgaccagacttttgcattggttgatgatttctgttttacgtgtcggtagtttatgtacaatggcatggagcatagctagtagatcaaatttccggatcctctgttgtactgtccctttgtggacaagttgtggacctgttggatccttgcaaacgcattgtgatccaggacctagaggacaaaatcaaactgtccagcgattgttacttggaccttccaacattgactgcatactagtaccagcgattcgtagcc

SEQ ID NO: 19523 - protein, 217 aa, Zea mays subsp. mays
  peptide (1)..(217): Ceres Seq. ID no. 12419193
TRELFLQSARWRLRFPPVPQPQARNLTHPSGNHGALPHRRQRLGGAVARGGGAGVPALPGPLGAAHGGAVGGHARGRGGVRAAGLLRAGLLRRHLRAGHLPDQPPHRLPLPHGRTGARGRARAPNQRLRRVQALHPSPPRVQVLVCRHKSLLHCLCHDLLLCIRRSCLLANTSLLLDCAFCPDNEATNCAYDQVQVCPIQHRKAEVWRKERPCRQCI

SEQ ID NO: 19524 - protein, 187 aa, Zea mays subsp. mays
  peptide (1)..(187): Ceres Seq. ID no. 12419194
  misc_feature (7)..(173): Pfam Name: Rer1 family Pfam Description: Rer1 family
  misc_feature (24)..(172): Homolog of NCBI NO: 7488292 NR Description: probable integral membrane protein At2g23310
  misc_feature (24)..(184): Homolog of NCBI NO: 30682033 NR Description: integral membrane protein -related [Arabidopsis
  misc_feature (24)..(184): Homolog of NCBI NO: 18400234 NR Description: putative integral membrane protein
  misc_feature (2)..(171): Homolog of NCBI NO: 25411844 NR Description: probable integral membrane protein
  misc_feature (2)..(171): Homolog of NCBI NO: 30680307 NR Description: integral membrane protein -related [Arabidopsis
  misc_feature (2)..(171): Homolog of NCBI NO: 18398679 NR Description: putative integral membrane protein; protein id:
  misc_feature (18)..(183): Homolog of NCBI NO: 15226596 NR Description: AtRer1B
  misc_feature (18)..(183): Homolog of NCBI NO: 11281669 NR Description: endoplasmatic reticulum retrieval protein Rer1B
  misc_feature (7)..(184): Homolog of NCBI NO: 15234975 NR Description: AtRer1A
  misc_feature (7)..(173): Homolog of NCBI NO: 34894094 NR Description: putative Rer1A protein (AtRer1A)
MEPSPIGASGSAERWRAEAARAFQHYLDRSAPHTAGRWAGTLVAAAVYALRVYYVRGFYVVTYGLGIYLINLLIGFLSPMVEPELEAGPGLPTSGSDEFKPFIRRLPEFKFWYAVTKAFCIAFVMTFFSVFDVPVFWPILLCYWIVLFVLTMKRQIVHMIKYKYVPFSIGKQRYGGKKGPAASASKE

SEQ ID NO: 19525 - protein, 108 aa, Zea mays subsp. mays
  peptide (1)..(108): Ceres Seq. ID no. 12419195
  misc_feature (1)..(94): Pfam Name: Rer1 family Pfam Description: Rer1 family
  misc_feature (1)..(93): Homolog of NCBI NO: 7488292 NR Description: probable integral membrane protein At2g23310
  misc_feature (1)..(105): Homolog of NCBI NO: 30682033 NR Description: integral membrane protein -related [Arabidopsis
  misc_feature (1)..(105): Homolog of NCBI NO: 18400234 NR Description: putative integral membrane protein
  misc_feature (1)..(92): Homolog of NCBI NO: 30680307 NR Description: integral membrane protein -related [Arabidopsis
  misc_feature (1)..(92): Homolog of NCBI NO: 25411844 NR Description: probable integral membrane protein
  misc_feature (1)..(92): Homolog of NCBI NO: 18398679 NR Description: putative integral membrane protein; protein id:
  misc_feature (1)..(104): Homolog of NCBI NO: 15226596 NR Description: AtRer1B
  misc_feature (1)..(104): Homolog of NCBI NO: 11281669 NR Description: endoplasmatic reticulum retrieval protein Rer1B
  misc_feature (1)..(105): Homolog of NCBI NO: 15234975 NR Description: AtRer1A
  misc_feature (1)..(94): Homolog of NCBI NO: 34894094 NR Description: putative Rer1A protein (AtRer1A)
MVEPELEAGPGLPTSGSDEFKPFIRRLPEFKFWYAVTKAFCIAFVMTFFSVFDVPVFWPILLCYWIVLFVLTMKRQIVHMIKYKYVPFSIGKQRYGGKKGPAASASKE

SEQ ID NO: 19526 - DNA, 986 bp, Zea mays subsp. mays
  misc_feature (1)..(986): Ceres Seq. ID no. 12350239
  misc_feature: MA Experiment ID: 20000534 Result: Up-regulated in Transcription
  misc_feature: MA Experiment 20000534 PARAMETER Experiment Name: Zm_Hybrid_Pollen_P Parameter: Age (day) Value: 8
  misc_feature: MA Experiment 20000534 PARAMETER Experiment Name: Zm_Hybrid_Pollen_P Parameter: Organism Value: Zea mays
  misc_feature: MA Experiment 20000534 PARAMETER Experiment Name: Zm_Hybrid_Pollen_P Parameter: Plant Line Value: 35A19
  misc_feature: MA Experiment 20000534 PARAMETER Experiment Name: Zm_Hybrid_Pollen_P Parameter: Tissue Value: Pollen vs. Aerial
aattttggactggcgaagaaaatgcaggcccccctgctgctgctgcacgtccgtcaaatagattggtagggagcccagagggtgatgggaatggcgaaggagcagcacttcgtgcttgttcatggcgaagggcatggggcctggtgctggttcaagctccgctggctcctcgagggcgctggccaccgtgtcacgtgcgttgacctggccggaggcggcgtcgatcctaccgaccccaacaccatccggtccttcaagcagtacgacaagccgctcatagacctcatctccaacttgccagacggagagaaggtgattctgatcggacatggcgctggagggctgagtgtgatccatgcaatgcatgaatttgttgacaggatcggtcaagcatttttcgtggccgccacaatgctgccgtttggatttcaagccgatgaagataagaacgatgggttaccgactttgcccgagaacgagattgagttgacacttggtgcaggagcagatgatcctccaacaaccattgccttgaggccagaattccagcgtgatcgactatcacaacaaagccctgaagaggaatcagtacttgcttcaatgctgatgcgtccgtggcctgcaacagctatcagtacagcaagcttcgaaggagatgatgagagattgaaccgaatcaaacgaactttcataaagatggagcgcgaccacatgctggatcctcaacagcaagactccatgatcaaaaagtggccacccagtgaggttttggtcatagatacagatcacagccccttcttctctgcaccagaacagctgttcaatttaatagtcaaatctctatgatgacaaatgcagaaagctactgactggggttgcccaaattcttgtaacactacccacaaacaataatcaccacaagatttaggacctcagatttgtcaaacatgcttctcaatgaatcttcctggcatatccgcatatct

SEQ ID NO: 19527 - protein, 253 aa, Zea mays subsp. mays
  peptide (1)..(253): Ceres Seq. ID no. 12350240
  misc_feature (36)..(251): Pfam Name: alpha/beta hydrolase fold Pfam Description: alpha/beta hydrolase fold
  misc_feature (5)..(251): Homolog of NCBI NO: 30681236 NR Description: hydrolase family [Arabidopsis thaliana]
  misc_feature (8)..(251): Homolog of NCBI NO: 15230077 NR Description: alpha/beta hydrolase, putative; protein id:
  misc_feature (5)..(251): Homolog of NCBI NO: 15227865 NR Description: putative acetone-cyanohydrin lyase; protein id:
  misc_feature (9)..(251): Homolog of NCBI NO: 25518661 NR Description: hypothetical protein F12G12.19 - Arabidopsis
  misc_feature (9)..(251): Homolog of NCBI NO: 21595837 NR Description: polyneuridine aldehyde esterase, putative
  misc_feature (9)..(251): Homolog of NCBI NO: 15218463 NR Description: polyneuridine aldehyde esterase, putative
  misc_feature (8)..(253): Homolog of NCBI NO: 15235844 NR Description: cyanohydrin lyase like protein
  misc_feature (8)..(253): Homolog of NCBI NO: 15866583 NR Description: hypothetical protein [Capsella rubella]
  misc_feature (6)..(252): Homolog of NCBI NO: 15237165 NR Description: polyneuridine aldehyde esterase-like
  misc_feature (5)..(252): Homolog of NCBI NO: 15228391 NR Description: putative alpha-hydroxynitrile lyase
MGMAKEQHFVLVHGEGHGAWCWFKLRWLLEGAGHRVTCVDLAGGGVDPTDPNTIRSFKQYDKPLIDLISNLPDGEKVILIGHGAGGLSVIHAMHEFVDRIGQAFFVAATMLPFGFQADEDKNDGLPTLPENEIELTLGAGADDPPTTIALRPEFQRDRLSQQSPEEESVLASMLMRPWPATAISTASFEGDDERLNRIKRTFIKMERDHMLDPQQQDSMIKKWPPSEVLVIDTDHSPFFSAPEQLFNLIVKSL

SEQ ID NO: 19528 - protein, 251 aa, Zea mays subsp. mays
  peptide (1)..(251): Ceres Seq. ID no. 12350241
  misc_feature (34)..(249): Pfam Name: alpha/beta hydrolase fold Pfam Description: alpha/beta hydrolase fold
  misc_feature (6)..(251): Homolog of NCBI NO: 15866583 NR Description: hypothetical protein [Capsella rubella]
  misc_feature (4)..(250): Homolog of NCBI NO: 15237165 NR Description: polyneuridine aldehyde esterase-like
  misc_feature (6)..(249): Homolog of NCBI NO: 15230077 NR Description: alpha/beta hydrolase, putative; protein id:
  misc_feature (7)..(249): Homolog of NCBI NO: 21595837 NR Description: polyneuridine aldehyde esterase, putative
  misc_feature (7)..(249): Homolog of NCBI NO: 15218463 NR Description: polyneuridine aldehyde esterase, putative
  misc_feature (6)..(251): Homolog of NCBI NO: 15235844 NR Description: cyanohydrin lyase like protein
  misc_feature (7)..(249): Homolog of NCBI NO: 25518661 NR Description: hypothetical protein F12G12.19 - Arabidopsis
  misc_feature (3)..(249): Homolog of NCBI NO: 15227865 NR Description: putative acetone-cyanohydrin lyase; protein id:
  misc_feature (3)..(249): Homolog of NCBI NO: 30681236 NR Description: hydrolase family [Arabidopsis thaliana]
  misc_feature (3)..(250): Homolog of NCBI NO: 15228391 NR Description: putative alpha-hydroxynitrile lyase
MAKEQHFVLVHGEGHGAWCWFKLRWLLEGAGHRVTCVDLAGGGVDPTDPNTIRSFKQYDKPLIDLISNLPDGEKVILIGHGAGGLSVIHAMHEFVDRIGQAFFVAATMLPFGFQADEDKNDGLPTLPENEIELTLGAGADDPPTTIALRPEFQRDRLSQQSPEEESVLASMLMRPWPATAISTASFEGDDERLNRIKRTFIKMERDHMLDPQQQDSMIKKWPPSEVLVIDTDHSPFFSAPEQLFNLIVKSL

SEQ ID NO: 19529 - protein, 161 aa, Zea mays subsp. mays
  peptide (1)..(161): Ceres Seq. ID no. 12350242
  misc_feature (1)..(159): Pfam Name: alpha/beta hydrolase fold Pfam Description: alpha/beta hydrolase fold
  misc_feature (1)..(159): Homolog of NCBI NO: 30681236 NR Description: hydrolase family [Arabidopsis thaliana]
  misc_feature (1)..(159): Homolog of NCBI NO: 15230077 NR Description: alpha/beta hydrolase, putative; protein id:
  misc_feature (1)..(159): Homolog of NCBI NO: 15227865 NR Description: putative acetone-cyanohydrin lyase; protein id:
  misc_feature (1)..(159): Homolog of NCBI NO: 25518661 NR Description: hypothetical protein F12G12.19 - Arabidopsis
  misc_feature (1)..(159): Homolog of NCBI NO: 21595837 NR Description: polyneuridine aldehyde esterase, putative
  misc_feature (1)..(159): Homolog of NCBI NO: 15218463 NR Description: polyneuridine aldehyde esterase, putative
  misc_feature (1)..(161): Homolog of NCBI NO: 15235844 NR Description: cyanohydrin lyase like protein
  misc_feature (1)..(161): Homolog of NCBI NO: 15866583 NR Description: hypothetical protein [Capsella rubella]
  misc_feature (1)..(160): Homolog of NCBI NO: 15237165 NR Description: polyneuridine aldehyde esterase-like
  misc_feature (1)..(160): Homolog of NCBI NO: 15228391 NR Description: putative alpha-hydroxynitrile lyase
MHEFVDRIGQAFFVAATMLPFGFQADEDKNDGLPTLPENEIELTLGAGADDPPTTIALRPEFQRDRLSQQSPEEESVLASMLMRPWPATAISTASFEGDDERLNRIKRTFIKMERDHMLDPQQQDSMIKKWPPSEVLVIDTDHSPFFSAPEQLFNLIVKSL

SEQ ID NO: 19530 - DNA, 2237 bp, Zea mays subsp. mays
  misc_feature (1)..(2237): Ceres Seq. ID no. 12368411
  misc_feature: MA Experiment ID: 108556 Result: Down-regulated in Transcription
  misc_feature: MA Experiment 108556 PARAMETER Experiment Name: Zm_Drought_P Parameter: Age (day) Value: 9
  misc_feature: MA Experiment 108556 PARAMETER Experiment Name: Zm_Drought_P Parameter: Organism Value: Zea mays
  misc_feature: MA Experiment 108556 PARAMETER Experiment Name: Zm_Drought_P Parameter: Plant Line Value: 35A19
  misc_feature: MA Experiment 108556 PARAMETER Experiment Name: Zm_Drought_P Parameter: Timepoint (hr) Value: 24
  misc_feature: MA Experiment 108556 PARAMETER Experiment Name: Zm_Drought_P Parameter: Tissue Value: Aerial
  misc_feature: MA Experiment 108556 PARAMETER Experiment Name: Zm_Drought_P Parameter: Treatment Value: Drought vs. No Drought
  misc_feature: MA Experiment ID: 20000477 Result: Down-regulated in Transcription
  misc_feature: MA Experiment 20000477 PARAMETER Experiment Name: Zm_5mM_SA_P Parameter: Age (day) Value: 10
  misc_feature: MA Experiment 20000477 PARAMETER Experiment Name: Zm_5mM_SA_P Parameter: Organism Value: Zea mays
  misc_feature: MA Experiment 20000477 PARAMETER Experiment Name: Zm_5mM_SA_P Parameter: Plant Line Value: 35A19
  misc_feature: MA Experiment 20000477 PARAMETER Experiment Name: Zm_5mM_SA_P Parameter: Timepoint (hr) Value: 48
  misc_feature: MA Experiment 20000477 PARAMETER Experiment Name: Zm_5mM_SA_P Parameter: Tissue Value: Aerial
  misc_feature: MA Experiment 20000477 PARAMETER Experiment Name: Zm_5mM_SA_P Parameter: Treatment Value: 5mM SA vs. No Treatment
  misc_feature: MA Experiment ID: 20000478 Result: Down-regulated in Transcription
  misc_feature: MA Experiment 20000478 PARAMETER Experiment Name: Zm_5mM_SA_P Parameter: Age (day) Value: 11
  misc_feature: MA Experiment 20000478 PARAMETER Experiment Name: Zm_5mM_SA_P Parameter: Organism Value: Zea mays
  misc_feature: MA Experiment 20000478 PARAMETER Experiment Name: Zm_5mM_SA_P Parameter: Plant Line Value: 35A19
  misc_feature: MA Experiment 20000478 PARAMETER Experiment Name: Zm_5mM_SA_P Parameter: Timepoint (hr) Value: 72
  misc_feature: MA Experiment 20000478 PARAMETER Experiment Name: Zm_5mM_SA_P Parameter: Tissue Value: Aerial
  misc_feature: MA Experiment 20000478 PARAMETER Experiment Name: Zm_5mM_SA_P Parameter: Treatment Value: 5mM SA vs. No Treatment
  misc_feature: MA Experiment ID: 20000479 Result: Down-regulated in Transcription
  misc_feature: MA Experiment 20000479 PARAMETER Experiment Name: Zm_Drought_P Parameter: Age (day) Value: 10
  misc_feature: MA Experiment 20000479 PARAMETER Experiment Name: Zm_Drought_P Parameter: Organism Value: Zea mays
  misc_feature: MA Experiment 20000479 PARAMETER Experiment Name: Zm_Drought_P Parameter: Plant Line Value: 35A19
  misc_feature: MA Experiment 20000479 PARAMETER Experiment Name: Zm_Drought_P Parameter: Timepoint (hr) Value: 48
  misc_feature: MA Experiment 20000479 PARAMETER Experiment Name: Zm_Drought_P Parameter: Tissue Value: Aerial
  misc_feature: MA Experiment 20000479 PARAMETER Experiment Name: Zm_Drought_P Parameter: Treatment Value: Drought vs. No Drought
  misc_feature: MA Experiment ID: 20000480 Result: Down-regulated in Transcription
  misc_feature: MA Experiment 20000480 PARAMETER Experiment Name: Zm_Drought_P Parameter: Age (day) Value: 11
  misc_feature: MA Experiment 20000480 PARAMETER Experiment Name: Zm_Drought_P Parameter: Organism Value: Zea mays
  misc_feature: MA Experiment 20000480 PARAMETER Experiment Name: Zm_Drought_P Parameter: Plant Line Value: 35A19
  misc_feature: MA Experiment 20000480 PARAMETER Experiment Name: Zm_Drought_P Parameter: Timepoint (hr) Value: 72
  misc_feature: MA Experiment 20000480 PARAMETER Experiment Name: Zm_Drought_P Parameter: Tissue Value: Aerial
  misc_feature: MA Experiment 20000480 PARAMETER Experiment Name: Zm_Drought_P Parameter: Treatment Value: Drought vs. No Drought
  misc_feature: MA Experiment ID: 20000535 Result: Down-regulated in Transcription
  misc_feature: MA Experiment 20000535 PARAMETER Experiment Name: Zm_Hybrid_Seed_Dev_P Parameter: DAP Value: 30 vs. 12
  misc_feature: MA Experiment 20000535 PARAMETER Experiment Name: Zm_Hybrid_Seed_Dev_P Parameter: Organism Value: Zea mays
  misc_feature: MA Experiment 20000535 PARAMETER Experiment Name: Zm_Hybrid_Seed_Dev_P Parameter: Plant Line Value: 35A19
  misc_feature: MA Experiment 20000535 PARAMETER Experiment Name: Zm_Hybrid_Seed_Dev_P Parameter: Tissue Value: Embryo vs. Unfert Floret
gcacgagaccattacctagaacatcctaatcgaaaaatctcccagccccgctccccaaatctcagccccgctccttcccagtcccagtcccagatccaggatgtcctcctccgacccggacgacgcccccgacgggggcgaggactcgcccctcttccgccgcagcggggggccgtcctccggcggcaccgttggcgacgtccccgtctcgcagtcgctcatcaaggcggcaagcaacgtgtgcttctccctcttcgtgctcgccgtccttgtcgtcaccgtcgtcgccgtcacataccagccgccggacccctggctccagtcctccgccgccatcaccacctcgctctcccgcgtcctccccaactccaccttcctcgtccccgacgactcgctcctccccaccggcgaggatttcaactcctccaccgccgtcccagccccggtgcgggatgacgatgacgcggctgcggccgtcagcgccgcctccgccgcggccgcgggcaacaggacctgcgacccggacgcgccgctgaactgctccgacccgcgcgtcctcgccgccgtcaaggcgttcaacgccagggccttcttccggaagtccatcgtgtttctcagctacgaggcgccggtgtccggccccaagcctggccagtgcgatgtcgcctggaggttccggaaccgccgggagaagtcgtggcgccgctacagggactaccgtcgcttcagcctcgcctcgggcgatggctgcgctcttgacatcgtcagcgtcggcaagttccgctcggggacgaatgcagctcgccggccgtatcctaagggctcgaagtcgaagaggccccgcgtgtcgccgccgcctgtcgatgcggagatcaatgacacaatccctgtcgtcggatcagaggcagagttcaagaagggaaagtacttgtactacatgagaggaggtgaccattgcaagagcatgaaccagttcgtctggagcttcttgtgtggactcggcgaagccaagttcctcaaccggacgttcgtgatggatctgaacatctgtttgtccggggcacacacggtcgacgggaaggatgtggatgggaaagatttcccggtactatttcgatttcgagcacttgaaggagagtgtgccggtggtggaggaaggggacttcctgaaggattggaagcgttgggataagaagaagggcccaggacggatcacagtgcggaaggttccatcgtacaaggtaacaccaatgcagctgaagagggacaagagcaacatcatctggaggcaatttaatggccatgagcccgagaattactggtaccgagtttgcgaaggacgagctgccaaagtcatccaaaggccttggtatgctatctggaagtccaagagactgatgaacattgtgactgagattgcaggtaggatggattgggattacgacggtttacatgttgtccgagggtggaaggcgcagaacaagcaaatgtatccaaacctggattccgacacgtcgcctgatgcgctcgttgataaggtgaccaagcttgttaagccgatgagagatctctacatcgcaactaatgagccattctataactacttcgacaagctcaggtcacacttccatgtccatttgcttgatgattacaaggagctttggtcaaacactagtgaatggtacaacgagacaacaacacttagtcggggtaaaccagttccattcgacgcctacatgagggtgattgtggacactgaggtattttacagatcgaagacacaggttgagacgttcaacaacttgacaagggattgcaaagatggaatcaatacgtgcaacttgtgacacatgagttcacgcttcggatcatttgttggtgttcaatatacccttctagtggctggaacatcagaactcagtggaactcatccagggtttgtcttttggcattaccatcgttatgtatttcttgtcatggaatgtttagctggtttcatgtttatctgagttgtgtgctctccatttttttttttcttttgtagtttatgtactactcttccagagtccagacgtccgaaaaatttgtatttagtgggcaatctgcaacatctatgctctctgtacccgcactaaattaagtgagaactatagcttcacctttacagtgtatctgttttcacgagtcacacgcttcttgcccgaatatttggaggaaatgaatttgtcagtgagctc

SEQ ID NO: 19531 - protein, 363 aa, Zea mays subsp. mays
  peptide (1)..(363): Ceres Seq. ID no. 12368412
  misc_feature (171)..(332): Homolog of NCBI NO: 34909040 NR Description: P0034E02.33 [Oryza sativa (japonica
  misc_feature (254)..(344): Homolog of NCBI NO: 37534994 NR Description: unknown protein [Oryza sativa (japonica
  misc_feature (20)..(134): Homolog of NCBI NO: 37534994 NR Description: unknown protein [Oryza sativa (japonica
  misc_feature (22)..(344): Homolog of NCBI NO: 15235454 NR Description: putative protein; protein id: At4g12700.1
  misc_feature (18)..(344): Homolog of NCBI NO: 18395698 NR Description: expressed protein
  misc_feature (35)..(344): Homolog of NCBI NO: 15236611 NR Description: putative protein
  misc_feature (1)..(344): Homolog of NCBI NO: 34913308 NR Description: P0519E12.32 [Oryza sativa (japonica
MSSSDPDDAPDGGEDSPLFRRSGGPSSGGTVGDVPVSQSLIKAASNVCFSLFVLAVLVVTVVAVTYQPPDPWLQSSAAITTSLSRVLPNSTFLVPDDSLLPTGEDFNSSTAVPAPVRDDDDAAAAVSAASAAAAGNRTCDPDAPLNCSDPRVLAAVKAFNARAFFRKSIVFLSYEAPVSGPKPGQCDVAWRFRNRREKSWRRYRDYRRFSLASGDGCALDIVSVGKFRSGTNAARRPYPKGSKSKRPRVSPPPVDAEINDTIPVVGSEAEFKKGKYLYYMRGGDHCKSMNQFVWSFLCGLGEAKFLNRTFVMDLNICLSGAHTVDGKDVDGKDFPVLFRFRALEGECAGGGGRGLPEGLEALG

SEQ ID NO: 19532 - protein, 254 aa, Zea mays subsp. mays
  peptide (1)..(254): Ceres Seq. ID no. 12368413
  misc_feature (1)..(236): Homolog of NCBI NO: 34909040 NR Description: P0034E02.33 [Oryza sativa (japonica
  misc_feature (8)..(252): Homolog of NCBI NO: 37534994 NR Description: unknown protein [Oryza sativa (japonica
  misc_feature (1)..(254): Homolog of NCBI NO: 15235454 NR Description: putative protein; protein id: At4g12700.1
  misc_feature (1)..(253): Homolog of NCBI NO: 18395698 NR Description: expressed protein
  misc_feature (1)..(252): Homolog of NCBI NO: 15236611 NR Description: putative protein
  misc_feature (1)..(254): Homolog of NCBI NO: 34913308 NR Description: P0519E12.32 [Oryza sativa (japonica
MWMGKISRYYFDFEHLKESVPVVEEGDFLKDWKRWDKKKGPGRITVRKVPSYKVTPMQLKRDKSNIIWRQFNGHEPENYWYRVCEGRAAKVIQRPWYAIWKSKRLMNIVTEIAGRMDWDYDGLHVVRGWKAQNKQMYPNLDSDTSPDALVDKVTKLVKPMRDLYIATNEPFYNYFDKLRSHFHVHLLDDYKELWSNTSEWYNETTTLSRGKPVPFDAYMRVIVDTEVFYRSKTQVETFNNLTRDCKDGINTCNL

SEQ ID NO: 19533 - protein, 252 aa, Zea mays subsp. mays
  peptide (1)..(252): Ceres Seq. ID no. 12368414
  misc_feature (1)..(234): Homolog of NCBI NO: 34909040 NR Description: P0034E02.33 [Oryza sativa (japonica
  misc_feature (6)..(250): Homolog of NCBI NO: 37534994 NR Description: unknown protein [Oryza sativa (japonica
  misc_feature (1)..(252): Homolog of NCBI NO: 15235454 NR Description: putative protein; protein id: At4g12700.1
  misc_feature (1)..(251): Homolog of NCBI NO: 18395698 NR Description: expressed protein
  misc_feature (1)..(250): Homolog of NCBI NO: 15236611 NR Description: putative protein
  misc_feature (1)..(252): Homolog of NCBI NO: 34913308 NR Description: P0519E12.32 [Oryza sativa (japonica
MGKISRYYFDFEHLKESVPVVEEGDFLKDWKRWDKKKGPGRITVRKVPSYKVTPMQLKRDKSNIIWRQFNGHEPENYWYRVCEGRAAKVIQRPWYAIWKSKRLMNIVTEIAGRMDWDYDGLHVVRGWKAQNKQMYPNLDSDTSPDALVDKVTKLVKPMRDLYIATNEPFYNYFDKLRSHFHVHLLDDYKELWSNTSEWYNETTTLSRGKPVPFDAYMRVIVDTEVFYRSKTQVETFNNLTRDCKDGINTCNL

SEQ ID NO: 19534 - DNA, 1417 bp, Zea mays subsp. mays
  misc_feature (1)..(1417): Ceres Seq. ID no. 12633968
  misc_feature: MA Experiment ID: 108523 Result: Down-regulated in Transcription
  misc_feature: MA Experiment 108523 PARAMETER Experiment Name: Zm_42deg_Heat_P Parameter: Age (day) Value: 8
  misc_feature: MA Experiment 108523 PARAMETER Experiment Name: Zm_42deg_Heat_P Parameter: Organism Value: Zea mays
  misc_feature: MA Experiment 108523 PARAMETER Experiment Name: Zm_42deg_Heat_P Parameter: Plant Line Value: 35A19
  misc_feature: MA Experiment 108523 PARAMETER Experiment Name: Zm_42deg_Heat_P Parameter: Temperature (deg C) Value: 42 vs. 22
  misc_feature: MA Experiment 108523 PARAMETER Experiment Name: Zm_42deg_Heat_P Parameter: Timepoint (hr) Value: 6
  misc_feature: MA Experiment 108523 PARAMETER Experiment Name: Zm_42deg_Heat_P Parameter: Tissue Value: Aerial
  misc_feature: MA Experiment ID: 108527 Result: Down-regulated in Transcription
  misc_feature: MA Experiment 108527 PARAMETER Experiment Name: Zm_5mM_NO_P Parameter: Age (day) Value: 8
  misc_feature: MA Experiment 108527 PARAMETER Experiment Name: Zm_5mM_NO_P Parameter: Organism Value: Zea mays
  misc_feature: MA Experiment 108527 PARAMETER Experiment Name: Zm_5mM_NO_P Parameter: Plant Line Value: 35A19
  misc_feature: MA Experiment 108527 PARAMETER Experiment Name: Zm_5mM_NO_P Parameter: Timepoint (hr) Value: 6
  misc_feature: MA Experiment 108527 PARAMETER Experiment Name: Zm_5mM_NO_P Parameter: Tissue Value: Aerial
  misc_feature: MA Experiment 108527 PARAMETER Experiment Name: Zm_5mM_NO_P Parameter: Treatment Value: 5mM NO vs. No Treatment
  misc_feature: MA Experiment ID: 108528 Result: Up-regulated in Transcription
  misc_feature: MA Experiment 108528 PARAMETER Experiment Name: Zm_Imbibed_Seeds_P Parameter: Age (day) Value: 5 vs. 2
  misc_feature: MA Experiment 108528 PARAMETER Experiment Name: Zm_Imbibed_Seeds_P Parameter: Organism Value: Zea mays
  misc_feature: MA Experiment 108528 PARAMETER Experiment Name: Zm_Imbibed_Seeds_P Parameter: Plant Line Value: 35A19
  misc_feature: MA Experiment 108528 PARAMETER Experiment Name: Zm_Imbibed_Seeds_P Parameter: Tissue Value: Aerial vs. Embryo
  misc_feature: MA Experiment ID: 108530 Result: Up-regulated in Transcription
  misc_feature: MA Experiment 108530 PARAMETER Experiment Name: Zm_Imbibed_Seeds_P Parameter: Age (day) Value: 6 vs. 2
  misc_feature: MA Experiment 108530 PARAMETER Experiment Name: Zm_Imbibed_Seeds_P Parameter: Organism Value: Zea mays
  misc_feature: MA Experiment 108530 PARAMETER Experiment Name: Zm_Imbibed_Seeds_P Parameter: Plant Line Value: 35A19
  misc_feature: MA Experiment 108530 PARAMETER Experiment Name: Zm_Imbibed_Seeds_P Parameter: Tissue Value: Aerial vs. Embryo
  misc_feature: MA Experiment ID: 108536 Result: Down-regulated in Transcription
  misc_feature: MA Experiment 108536 PARAMETER Experiment Name: Zm_Meristem_P Parameter: Age (day) Value: 8
  misc_feature: MA Experiment 108536 PARAMETER Experiment Name: Zm_Meristem_P Parameter: Organism Value: Zea mays
  misc_feature: MA Experiment 108536 PARAMETER Experiment Name: Zm_Meristem_P Parameter: Plant Line Value: 35A19
  misc_feature: MA Experiment 108536 PARAMETER Experiment Name: Zm_Meristem_P Parameter: Tissue Value: Shoot Meristem vs. Above Shoot Meristem
  misc_feature: MA Experiment ID: 108545 Result: Up-regulated in Transcription
  misc_feature: MA Experiment 108545 PARAMETER Experiment Name: Zm_Imbibed_Seeds_P Parameter: Age (day) Value: 3 vs. 2
  misc_feature: MA Experiment 108545 PARAMETER Experiment Name: Zm_Imbibed_Seeds_P Parameter: Organism Value: Zea mays
  misc_feature: MA Experiment 108545 PARAMETER Experiment Name: Zm_Imbibed_Seeds_P Parameter: Plant Line Value: 35A19
  misc_feature: MA Experiment 108545 PARAMETER Experiment Name: Zm_Imbibed_Seeds_P Parameter: Tissue Value: Aerial vs. Embryo
  misc_feature: MA Experiment ID: 108547 Result: Up-regulated in Transcription
  misc_feature: MA Experiment 108547 PARAMETER Experiment Name: Zm_Imbibed_Seeds_P Parameter: Age (day) Value: 4 vs. 2
  misc_feature: MA Experiment 108547 PARAMETER Experiment Name: Zm_Imbibed_Seeds_P Parameter: Organism Value: Zea mays
  misc_feature: MA Experiment 108547 PARAMETER Experiment Name: Zm_Imbibed_Seeds_P Parameter: Plant Line Value: 35A19
  misc_feature: MA Experiment 108547 PARAMETER Experiment Name: Zm_Imbibed_Seeds_P Parameter: Tissue Value: Aerial vs. Embryo
  misc_feature: MA Experiment ID: 108556 Result: Down-regulated in Transcription
  misc_feature: MA Experiment 108556 PARAMETER Experiment Name: Zm_Drought_P Parameter: Age (day) Value: 9
  misc_feature: MA Experiment 108556 PARAMETER Experiment Name: Zm_Drought_P Parameter: Organism Value: Zea mays
  misc_feature: MA Experiment 108556 PARAMETER Experiment Name: Zm_Drought_P Parameter: Plant Line Value: 35A19
  misc_feature: MA Experiment 108556 PARAMETER Experiment Name: Zm_Drought_P Parameter: Timepoint (hr) Value: 24
  misc_feature: MA Experiment 108556 PARAMETER Experiment Name: Zm_Drought_P Parameter: Tissue Value: Aerial
  misc_feature: MA Experiment 108556 PARAMETER Experiment Name: Zm_Drought_P Parameter: Treatment Value: Drought vs. No Drought
  misc_feature: MA Experiment ID: 108559 Result: Down-regulated in Transcription
  misc_feature: MA Experiment 108559 PARAMETER Experiment Name: Zm_5mM_NO_P Parameter: Age (day) Value: 8
  misc_feature: MA Experiment 108559 PARAMETER Experiment Name: Zm_5mM_NO_P Parameter: Organism Value: Zea mays
  misc_feature: MA Experiment 108559 PARAMETER Experiment Name: Zm_5mM_NO_P Parameter: Plant Line Value: 35A19
  misc_feature: MA Experiment 108559 PARAMETER Experiment Name: Zm_5mM_NO_P Parameter: Timepoint (hr) Value: 12
  misc_feature: MA Experiment 108559 PARAMETER Experiment Name: Zm_5mM_NO_P Parameter: Tissue Value: Aerial
  misc_feature: MA Experiment 108559 PARAMETER Experiment Name: Zm_5mM_NO_P Parameter: Treatment Value: 5mM NO vs. No Treatment
  misc_feature: MA Experiment ID: 108597 Result: Down-regulated in Transcription
  misc_feature: MA Experiment 108597 PARAMETER Experiment Name: Zm_100uM_ABA_P Parameter: Age (day) Value: 9
  misc_feature: MA Experiment 108597 PARAMETER Experiment Name: Zm_100uM_ABA_P Parameter: Organism Value: Zea mays
  misc_feature: MA Experiment 108597 PARAMETER Experiment Name: Zm_100uM_ABA_P Parameter: Plant Line Value: 35A19
  misc_feature: MA Experiment 108597 PARAMETER Experiment Name: Zm_100uM_ABA_P Parameter: Timepoint (hr) Value: 24
  misc_feature: MA Experiment 108597 PARAMETER Experiment Name: Zm_100uM_ABA_P Parameter: Tissue Value: Aerial
  misc_feature: MA Experiment 108597 PARAMETER Experiment Name: Zm_100uM_ABA_P Parameter: Treatment Value: 100uM ABA vs. No Treatment
  misc_feature: MA Experiment ID: 108687 Result: Down-regulated in Transcription
  misc_feature: MA Experiment 108687 PARAMETER Experiment Name: Zm_Embryos-Flowers__P Parameter: Tissue Value: Embryo vs. Aerial+
  misc_feature: MA Experiment ID: 108688 Result: Down-regulated in Transcription
  misc_feature: MA Experiment 108688 PARAMETER Experiment Name: Zm_Embryos-Flowers__P Parameter: Tissue Value: Immature Flowers vs. Aerial+
  misc_feature: MA Experiment ID: 20000626 Result: Down-regulated in Transcription
  misc_feature: MA Experiment 20000626 PARAMETER Experiment Name: Zm_Herbicide-Treatments_P Parameter: Timepoint (hr) Value: 12
  misc_feature: MA Experiment 20000626 PARAMETER Experiment Name: Zm_Herbicide-Treatments_P Parameter: Tissue Value: Aerial
  misc_feature: MA Experiment 20000626 PARAMETER Experiment Name: Zm_Herbicide-Treatments_P Parameter: Treatment Value: Roundup vs. No Treatment
gcacgagaccattacctagaacatcctaatcgaaaaagaaaaaggcttcgccttggtccttggatccccccacacaacgcagcacccgcactctccaggcgtctgccaatccgaaacgaaacccacccgtaggcaaaccaggactgagattgagctgagagcagcacagtcatggcggggcaggaggtggcgaacaagcgggtggtactgaagcgctacgtgacggggttccccggcgcggacgacatggaggtggtcaccggcaccgcgcgcgtggccgtgccgccggggtcgacggccatggtgctcaagaacctctacgtgtcgtgcgacccttacatgcgcggccgtatgaccaagcacgagaggcccagctacgtcccggacttcgtcgtgggggaggttttggaaaactttggcgtctgcaaggtgatagcatctgggcaccaggatttcaaggttggggatcttgtgtgggggatgaccggatgggaggagtacactctcatccataacccggagtcatttttcaagatcaatcatcctgaattgcctctgtcctactacacaggcgttcttggcatgccgggccttactgcttgggctggatttttcgatgtgggcaagcccaagaaaggcgataatgtcttcgtctcagcagcatcaggagccgttggtcagcttgttgggcagtttgctaagctcacaggatgttatgttgtcggcagtgctggttctgacgagaaggttaatcttctgaaaacaaagtttggcttcgatgaagcattcaactacaagaaagagcaggacctcgatgccgccttgagaaggtacttcccagagggcattgacatctacttcgagaacgtgggtggcagcacactggaagccgtgcttcccaacatgcgtatccatggtcggatccctacctgcggaatgatctcgcagtacaatctggaggagccagagggtgtgcacaacctattcgaaatcatcgctaagcgcctgcgcatggagggtttcatggtcttcgactactacggccagtaccacaagttcgagcaagagatggccgggtacctcaaggcggggaagatagcctacgtcgaggacattgctgaggggctagagaaggcgccggaggcactcatcgggctcttcaccgggcgcaacgtcggcaagcaactggtcgccattgcgcgggaatgaatgctggacatccatattatatctacgttgagaataatgtcagcatgcgtgttcagatgtgttaggaattgatgatttgtagtgcttgcagttttgtgctgttcgtgtgaaatgtttcgattttctgccgtttgttttctgggcgatatgcgtgtgaaaactcagcacacgcgcttcttctgaggagaaatagacaagcagtttgccg

SEQ ID NO: 19535 - protein, 345 aa, Zea mays subsp. mays
  peptide (1)..(345): Ceres Seq. ID no. 12633969
  misc_feature (95)..(342): Pfam Name: Zinc-binding dehydrogenase Pfam Description: Zinc-binding dehydrogenase
  misc_feature (8)..(345): Homolog of NCBI NO: 15240810 NR Description: quinone oxidoreductase -like protein
  misc_feature (8)..(345): Homolog of NCBI NO: 22326861 NR Description: quinone oxidoreductase - like protein
  misc_feature (8)..(345): Homolog of NCBI NO: 15237890 NR Description: quinone oxidoreductase - like protein
  misc_feature (8)..(345): Homolog of NCBI NO: 17529140 NR Description: putative quinone oxidoreductase [Arabidopsis
  misc_feature (8)..(345): Homolog of NCBI NO: 21536967 NR Description: quinone oxidoreductase-like protein [Arabidopsis
  misc_feature (6)..(345): Homolog of NCBI NO: 15222685 NR Description: allyl alcohol dehydrogenase, putative
  misc_feature (6)..(345): Homolog of NCBI NO: 21593645 NR Description: allyl alcohol dehydrogenase, putative
  misc_feature (6)..(345): Homolog of NCBI NO: 15228456 NR Description: putative NADP-dependent oxidoreductase; protein
  misc_feature (8)..(345): Homolog of NCBI NO: 38345384 NR Description: OSJNBa0067K08.13 [Oryza sativa (japonica
  misc_feature (4)..(345): Homolog of NCBI NO: 6692816 NR Description: allyl alcohol dehydrogenase [Nicotiana tabacum]
MAGQEVANKRVVLKRYVTGFPGADDMEVVTGTARVAVPPGSTAMVLKNLYVSCDPYMRGRMTKHERPSYVPDFVVGEVLENFGVCKVIASGHQDFKVGDLVWGMTGWEEYTLIHNPESFFKINHPELPLSYYTGVLGMPGLTAWAGFFDVGKPKKGDNVFVSAASGAVGQLVGQFAKLTGCYVVGSAGSDEKVNLLKTKFGFDEAFNYKKEQDLDAALRRYFPEGIDIYFENVGGSTLEAVLPNMRIHGRIPTCGMISQYNLEEPEGVHNLFEIIAKRLRMEGFMVFDYYGQYHKFEQEMAGYLKAGKIAYVEDIAEGLEKAPEALIGLFTGRNVGKQLVAIARE

SEQ ID NO: 19536 - protein, 320 aa, Zea mays subsp. mays
  peptide (1)..(320): Ceres Seq. ID no. 12633970
  misc_feature (70)..(317): Pfam Name: Zinc-binding dehydrogenase Pfam Description: Zinc-binding dehydrogenase
  misc_feature (1)..(320): Homolog of NCBI NO: 15240810 NR Description: quinone oxidoreductase -like protein
  misc_feature (1)..(320): Homolog of NCBI NO: 22326861 NR Description: quinone oxidoreductase - like protein
  misc_feature (1)..(320): Homolog of NCBI NO: 15237890 NR Description: quinone oxidoreductase - like protein
  misc_feature (1)..(320): Homolog of NCBI NO: 17529140 NR Description: putative quinone oxidoreductase [Arabidopsis
  misc_feature (1)..(320): Homolog of NCBI NO: 21536967 NR Description: quinone oxidoreductase-like protein [Arabidopsis
  misc_feature (1)..(320): Homolog of NCBI NO: 15222685 NR Description: allyl alcohol dehydrogenase, putative
  misc_feature (1)..(320): Homolog of NCBI NO: 21593645 NR Description: allyl alcohol dehydrogenase, putative
  misc_feature (1)..(320): Homolog of NCBI NO: 15228456 NR Description: putative NADP-dependent oxidoreductase; protein
  misc_feature (1)..(320): Homolog of NCBI NO: 38345384 NR Description: OSJNBa0067K08.13 [Oryza sativa (japonica
  misc_feature (1)..(320): Homolog of NCBI NO: 6692816 NR Description: allyl alcohol dehydrogenase [Nicotiana tabacum]
MEVVTGTARVAVPPGSTAMVLKNLYVSCDPYMRGRMTKHERPSYVPDFVVGEVLENFGVCKVIASGHQDFKVGDLVWGMTGWEEYTLIHNPESFFKINHPELPLSYYTGVLGMPGLTAWAGFFDVGKPKKGDNVFVSAASGAVGQLVGQFAKLTGCYVVGSAGSDEKVNLLKTKFGFDEAFNYKKEQDLDAALRRYFPEGIDIYFENVGGSTLEAVLPNMRIHGRIPTCGMISQYNLEEPEGVHNLFEIIAKRLRMEGFMVFDYYGQYHKFEQEMAGYLKAGKIAYVEDIAEGLEKAPEALIGLFTGRNVGKQLVAIARE

SEQ ID NO: 19537 - protein, 302 aa, Zea mays subsp. mays
  peptide (1)..(302): Ceres Seq. ID no. 12633971
  misc_feature (52)..(299): Pfam Name: Zinc-binding dehydrogenase Pfam Description: Zinc-binding dehydrogenase
  misc_feature (1)..(302): Homolog of NCBI NO: 15240810 NR Description: quinone oxidoreductase -like protein
  misc_feature (1)..(302): Homolog of NCBI NO: 22326861 NR Description: quinone oxidoreductase - like protein
  misc_feature (1)..(302): Homolog of NCBI NO: 15237890 NR Description: quinone oxidoreductase - like protein
  misc_feature (1)..(302): Homolog of NCBI NO: 17529140 NR Description: putative quinone oxidoreductase [Arabidopsis
  misc_feature (1)..(302): Homolog of NCBI NO: 21536967 NR Description: quinone oxidoreductase-like protein [Arabidopsis
  misc_feature (1)..(302): Homolog of NCBI NO: 15222685 NR Description: allyl alcohol dehydrogenase, putative
  misc_feature (1)..(302): Homolog of NCBI NO: 21593645 NR Description: allyl alcohol dehydrogenase, putative
  misc_feature (1)..(302): Homolog of NCBI NO: 15228456 NR Description: putative NADP-dependent oxidoreductase; protein
  misc_feature (1)..(302): Homolog of NCBI NO: 38345384 NR Description: OSJNBa0067K08.13 [Oryza sativa (japonica
  misc_feature (1)..(302): Homolog of NCBI NO: 6692816 NR Description: allyl alcohol dehydrogenase [Nicotiana tabacum]
MVLKNLYVSCDPYMRGRMTKHERPSYVPDFVVGEVLENFGVCKVIASGHQDFKVGDLVWGMTGWEEYTLIHNPESFFKINHPELPLSYYTGVLGMPGLTAWAGFFDVGKPKKGDNVFVSAASGAVGQLVGQFAKLTGCYVVGSAGSDEKVNLLKTKFGFDEAFNYKKEQDLDAALRRYFPEGIDIYFENVGGSTLEAVLPNMRIHGRIPTCGMISQYNLEEPEGVHNLFEIIAKRLRMEGFMVFDYYGQYHKFEQEMAGYLKAGKIAYVEDIAEGLEKAPEALIGLFTGRNVGKQLVAIARE

SEQ ID NO: 19538 - DNA, 1051 bp, Zea mays subsp. mays
  misc_feature (1)..(1051): Ceres Seq. ID no. 12387956
  misc_feature: MA Experiment ID: 108528 Result: Up-regulated in Transcription
  misc_feature: MA Experiment 108528 PARAMETER Experiment Name: Zm_Imbibed_Seeds_P Parameter: Age (day) Value: 5 vs. 2
  misc_feature: MA Experiment 108528 PARAMETER Experiment Name: Zm_Imbibed_Seeds_P Parameter: Organism Value: Zea mays
  misc_feature: MA Experiment 108528 PARAMETER Experiment Name: Zm_Imbibed_Seeds_P Parameter: Plant Line Value: 35A19
  misc_feature: MA Experiment 108528 PARAMETER Experiment Name: Zm_Imbibed_Seeds_P Parameter: Tissue Value: Aerial vs. Embryo
  misc_feature: MA Experiment ID: 108529 Result: Up-regulated in Transcription
  misc_feature: MA Experiment 108529 PARAMETER Experiment Name: Zm_Imbibed_Seeds_P Parameter: Age (day) Value: 5 vs. 2
  misc_feature: MA Experiment 108529 PARAMETER Experiment Name: Zm_Imbibed_Seeds_P Parameter: Organism Value: Zea mays
  misc_feature: MA Experiment 108529 PARAMETER Experiment Name: Zm_Imbibed_Seeds_P Parameter: Plant Line Value: 35A19
  misc_feature: MA Experiment 108529 PARAMETER Experiment Name: Zm_Imbibed_Seeds_P Parameter: Tissue Value: Roots vs. Embryo
  misc_feature: MA Experiment ID: 108530 Result: Up-regulated in Transcription
  misc_feature: MA Experiment 108530 PARAMETER Experiment Name: Zm_Imbibed_Seeds_P Parameter: Age (day) Value: 6 vs. 2
  misc_feature: MA Experiment 108530 PARAMETER Experiment Name: Zm_Imbibed_Seeds_P Parameter: Organism Value: Zea mays
  misc_feature: MA Experiment 108530 PARAMETER Experiment Name: Zm_Imbibed_Seeds_P Parameter: Plant Line Value: 35A19
  misc_feature: MA Experiment 108530 PARAMETER Experiment Name: Zm_Imbibed_Seeds_P Parameter: Tissue Value: Aerial vs. Embryo
  misc_feature: MA Experiment ID: 108535 Result: Down-regulated in Transcription
  misc_feature: MA Experiment 108535 PARAMETER Experiment Name: Zm_Meristem_P Parameter: Age (day) Value: 8
  misc_feature: MA Experiment 108535 PARAMETER Experiment Name: Zm_Meristem_P Parameter: Organism Value: Zea mays
  misc_feature: MA Experiment 108535 PARAMETER Experiment Name: Zm_Meristem_P Parameter: Plant Line Value: 35A19
  misc_feature: MA Experiment 108535 PARAMETER Experiment Name: Zm_Meristem_P Parameter: Tissue Value: Root Meristem vs. Above Root Meristem
  misc_feature: MA Experiment ID: 108543 Result: Down-regulated in Transcription
  misc_feature: MA Experiment ID: 108547 Result: Up-regulated in Transcription
  misc_feature: MA Experiment 108547 PARAMETER Experiment Name: Zm_Imbibed_Seeds_P Parameter: Age (day) Value: 4 vs. 2
  misc_feature: MA Experiment 108547 PARAMETER Experiment Name: Zm_Imbibed_Seeds_P Parameter: Organism Value: Zea mays
  misc_feature: MA Experiment 108547 PARAMETER Experiment Name: Zm_Imbibed_Seeds_P Parameter: Plant Line Value: 35A19
  misc_feature: MA Experiment 108547 PARAMETER Experiment Name: Zm_Imbibed_Seeds_P Parameter: Tissue Value: Aerial vs. Embryo
  misc_feature: MA Experiment ID: 20000535 Result: Down-regulated in Transcription
  misc_feature: MA Experiment 20000535 PARAMETER Experiment Name: Zm_Hybrid_Seed_Dev_P Parameter: DAP Value: 30 vs. 12
  misc_feature: MA Experiment 20000535 PARAMETER Experiment Name: Zm_Hybrid_Seed_Dev_P Parameter: Organism Value: Zea mays
  misc_feature: MA Experiment 20000535 PARAMETER Experiment Name: Zm_Hybrid_Seed_Dev_P Parameter: Plant Line Value: 35A19
  misc_feature: MA Experiment 20000535 PARAMETER Experiment Name: Zm_Hybrid_Seed_Dev_P Parameter: Tissue Value: Embryo vs. Unfert Floret
gcacgagaccattacctagaacatcctaatcgaaaaaaggaaacgagaagacaaggcctccgcggctccgcccccgatgcctccgctcctcacctcacccgcctccctcccctccgcctcccctctcctcgtctcctgtatcggcgctctccaccgccccggccccttcctccaccagcgcgccgccgcctcggtccacttcctcgcgccgcacaggaagacccgaccgccccccgcgatgagctggcttgggaagctgggcctgagcgggcttggaggcagcccgcgcgcgtcggaggcgtcggcagcgctggcgcaggggcccgacgaggaccagcccgcgccggggaacgagttcgcgcaattcggcgccggctgcttctggggcgtggagctcgcgttccagctcgtgccgggagtcacccgcacggaggtcggctacagccagggcaacatccacgatccgacctacgaggacgtctgcaccggcaccacaaaccacaacgaggtcgtccgcgtgcagtacgacccggccgcctgcaagtacgacgacctcctcgacaccttctgggcgcgccacgaccccactactcccaaccgacagggcaatgatgttggaacacagtataggtcagggatatactactataacccagagcaggagaaggcggcaagagagtccctggagaagcagcagaagcttctgaaccggaagatcgtcaccgagatcgttccagcgaagaggttctatagagcagaagagtaccatcagcagtacctggagaagggcggccgcttcggcttcgggcaatctgcagccaagggctgcaatgaccccatccgatgctacggatgagccaaatggacctctacgtgcatggtgtgaatcgtaactgaataagggatgcatcaaagccagattttatactgctttcctaggtttgttttgccactattgaacggctgtaagagtttagctatatactaccatggtactccaatcatcgtgtacaaaaccatattgtattacatgcaagtgcgagtgagattt

SEQ ID NO: 19539 - protein, 259 aa, Zea mays subsp. mays
  peptide (1)..(259): Ceres Seq. ID no. 12387957
  misc_feature (93)..(246): Pfam Name: Peptide methionine sulfoxide reductase Pfam Description: Peptide methionine sulfoxide reductase
  misc_feature (65)..(259): Homolog of NCBI NO: 21592658 NR Description: peptide methionine sulfoxide reductase (msr)
  misc_feature (1)..(259): Homolog of NCBI NO: 21593143 NR Description: protein-methionine-S-oxide reductase [Arabidopsis
  misc_feature (30)..(259): Homolog of NCBI NO: 29469000 NR Description: peptide methionine sulfoxide reductase; cPMSR
  misc_feature (1)..(259): Homolog of NCBI NO: 1279212 NR Description: methionine sulfoxide reductase [Arabidopsis
  misc_feature (1)..(259): Homolog of NCBI NO: 15146324 NR Description: AT4g25130/F13M23_270 [Arabidopsis thaliana]
  misc_feature (1)..(259): Homolog of NCBI NO: 15234942 NR Description: protein-methionine-S-oxide reductase
  misc_feature (65)..(259): Homolog of NCBI NO: 15240796 NR Description: peptide methionine sulfoxide reductase (msr)
  misc_feature (55)..(259): Homolog of NCBI NO: 18424492 NR Description: peptide methionine sulfoxide reductase - like
  misc_feature (6)..(259): Homolog of NCBI NO: 12230349 NR Description: Peptide methionine sulfoxide reductase
  misc_feature (55)..(259): Homolog of NCBI NO: 37536896 NR Description: putative peptide methionine sulfoxide reductase
MPPLLTSPASLPSASPLLVSCIGALHRPGPFLHQRAAASVHFLAPHRKTRPPPAMSWLGKLGLSGLGGSPRASEASAALAQGPDEDQPAPGNEFAQFGAGCFWGVELAFQLVPGVTRTEVGYSQGNIHDPTYEDVCTGTTNHNEVVRVQYDPAACKYDDLLDTFWARHDPTTPNRQGNDVGTQYRSGIYYYNPEQEKAARESLEKQQKLLNRKIVTEIVPAKRFYRAEEYHQQYLEKGGRFGFGQSAAKGCNDPIRCYG

SEQ ID NO: 19540 - protein, 205 aa, Zea mays subsp. mays
  peptide (1)..(205): Ceres Seq. ID no. 12387958
  misc_feature (39)..(192): Pfam Name: Peptide methionine sulfoxide reductase Pfam Description: Peptide methionine sulfoxide reductase
  misc_feature (1)..(205): Homolog of NCBI NO: 18424492 NR Description: peptide methionine sulfoxide reductase - like
  misc_feature (1)..(205): Homolog of NCBI NO: 1279212 NR Description: methionine sulfoxide reductase [Arabidopsis
  misc_feature (11)..(205): Homolog of NCBI NO: 15240796 NR Description: peptide methionine sulfoxide reductase (msr)
  misc_feature (1)..(205): Homolog of NCBI NO: 15146324 NR Description: AT4g25130/F13M23_270 [Arabidopsis thaliana]
  misc_feature (1)..(205): Homolog of NCBI NO: 15234942 NR Description: protein-methionine-S-oxide reductase
  misc_feature (11)..(205): Homolog of NCBI NO: 21592658 NR Description: peptide methionine sulfoxide reductase (msr)
  misc_feature (1)..(205): Homolog of NCBI NO: 21593143 NR Description: protein-methionine-S-oxide reductase [Arabidopsis
  misc_feature (1)..(205): Homolog of NCBI NO: 29469000 NR Description: peptide methionine sulfoxide reductase; cPMSR
  misc_feature (1)..(205): Homolog of NCBI NO: 12230349 NR Description: Peptide methionine sulfoxide reductase
  misc_feature (1)..(205): Homolog of NCBI NO: 37536896 NR Description: putative peptide methionine sulfoxide reductase
MSWLGKLGLSGLGGSPRASEASAALAQGPDEDQPAPGNEFAQFGAGCFWGVELAFQLVPGVTRTEVGYSQGNIHDPTYEDVCTGTTNHNEVVRVQYDPAACKYDDLLDTFWARHDPTTPNRQGNDVGTQYRSGIYYYNPEQEKAARESLEKQQKLLNRKIVTEIVPAKRFYRAEEYHQQYLEKGGRFGFGQSAAKGCNDPIRCYG

SEQ ID NO: 19541 - protein, 203 aa, Zea mays subsp. mays
  peptide (1)..(203): Ceres Seq. ID no. 12387959
  misc_feature (18)..(176): Pfam Name: Herpesvirus leader protein Pfam Description: Herpesvirus leader protein
ARDHYLEHPNRKKETRRQGLRGSAPDASAPHLTRLPPLRLPSPRLLYRRSPPPRPLPPPARRRLGPLPRAAQEDPTAPRDELAWEAGPERAWRQPARVGGVGSAGAGARRGPARAGERVRAIRRRLLLGRGARVPARAGSHPHGGRLQPGQHPRSDLRGRLHRHHKPQRGRPRAVRPGRLQVRRPPRHLLGAPRPHYSQPTGQ

SEQ ID NO: 19542 - DNA, 1755 bp, Zea mays subsp. mays
  misc_feature (1)..(1755): Ceres Seq. ID no. 12384370
  misc_feature: MA Experiment ID: 108522 Result: Down-regulated in Transcription
  misc_feature: MA Experiment 108522 PARAMETER Experiment Name: Zm_42deg_Heat_P Parameter: Age (day) Value: 8
  misc_feature: MA Experiment 108522 PARAMETER Experiment Name: Zm_42deg_Heat_P Parameter: Organism Value: Zea mays
  misc_feature: MA Experiment 108522 PARAMETER Experiment Name: Zm_42deg_Heat_P Parameter: Plant Line Value: 35A19
  misc_feature: MA Experiment 108522 PARAMETER Experiment Name: Zm_42deg_Heat_P Parameter: Temperature (deg C) Value: 42 vs. 22
  misc_feature: MA Experiment 108522 PARAMETER Experiment Name: Zm_42deg_Heat_P Parameter: Timepoint (hr) Value: 1
  misc_feature: MA Experiment 108522 PARAMETER Experiment Name: Zm_42deg_Heat_P Parameter: Tissue Value: Aerial
  misc_feature: MA Experiment ID: 108556 Result: Down-regulated in Transcription
  misc_feature: MA Experiment 108556 PARAMETER Experiment Name: Zm_Drought_P Parameter: Age (day) Value: 9
  misc_feature: MA Experiment 108556 PARAMETER Experiment Name: Zm_Drought_P Parameter: Organism Value: Zea mays
  misc_feature: MA Experiment 108556 PARAMETER Experiment Name: Zm_Drought_P Parameter: Plant Line Value: 35A19
  misc_feature: MA Experiment 108556 PARAMETER Experiment Name: Zm_Drought_P Parameter: Timepoint (hr) Value: 24
  misc_feature: MA Experiment 108556 PARAMETER Experiment Name: Zm_Drought_P Parameter: Tissue Value: Aerial
  misc_feature: MA Experiment 108556 PARAMETER Experiment Name: Zm_Drought_P Parameter: Treatment Value: Drought vs. No Drought
  misc_feature: MA Experiment ID: 20000477 Result: Down-regulated in Transcription
  misc_feature: MA Experiment 20000477 PARAMETER Experiment Name: Zm_5mM_SA_P Parameter: Age (day) Value: 10
  misc_feature: MA Experiment 20000477 PARAMETER Experiment Name: Zm_5mM_SA_P Parameter: Organism Value: Zea mays
  misc_feature: MA Experiment 20000477 PARAMETER Experiment Name: Zm_5mM_SA_P Parameter: Plant Line Value: 35A19
  misc_feature: MA Experiment 20000477 PARAMETER Experiment Name: Zm_5mM_SA_P Parameter: Timepoint (hr) Value: 48
  misc_feature: MA Experiment 20000477 PARAMETER Experiment Name: Zm_5mM_SA_P Parameter: Tissue Value: Aerial
  misc_feature: MA Experiment 20000477 PARAMETER Experiment Name: Zm_5mM_SA_P Parameter: Treatment Value: 5mM SA vs. No Treatment
  misc_feature: MA Experiment ID: 20000479 Result: Down-regulated in Transcription
  misc_feature: MA Experiment 20000479 PARAMETER Experiment Name: Zm_Drought_P Parameter: Age (day) Value: 10
  misc_feature: MA Experiment 20000479 PARAMETER Experiment Name: Zm_Drought_P Parameter: Organism Value: Zea mays
  misc_feature: MA Experiment 20000479 PARAMETER Experiment Name: Zm_Drought_P Parameter: Plant Line Value: 35A19
  misc_feature: MA Experiment 20000479 PARAMETER Experiment Name: Zm_Drought_P Parameter: Timepoint (hr) Value: 48
  misc_feature: MA Experiment 20000479 PARAMETER Experiment Name: Zm_Drought_P Parameter: Tissue Value: Aerial
  misc_feature: MA Experiment 20000479 PARAMETER Experiment Name: Zm_Drought_P Parameter: Treatment Value: Drought vs. No Drought
  misc_feature: MA Experiment ID: 20000480 Result: Down-regulated in Transcription
  misc_feature: MA Experiment 20000480 PARAMETER Experiment Name: Zm_Drought_P Parameter: Age (day) Value: 11
  misc_feature: MA Experiment 20000480 PARAMETER Experiment Name: Zm_Drought_P Parameter: Organism Value: Zea mays
  misc_feature: MA Experiment 20000480 PARAMETER Experiment Name: Zm_Drought_P Parameter: Plant Line Value: 35A19
  misc_feature: MA Experiment 20000480 PARAMETER Experiment Name: Zm_Drought_P Parameter: Timepoint (hr) Value: 72
  misc_feature: MA Experiment 20000480 PARAMETER Experiment Name: Zm_Drought_P Parameter: Tissue Value: Aerial
  misc_feature: MA Experiment 20000480 PARAMETER Experiment Name: Zm_Drought_P Parameter: Treatment Value: Drought vs. No Drought
gcacgagaccattacctagaacatcctaatcgaaaactctgtctccctcgtgctgccctcgccctccttttttttttagtttacccgccgtcccgcgcgccgccgtttcggttgctcggctagagggactagggagtgccagcgagtccatggcagcggcgagggcgtgcttcgtcgcgctggcgctggtggcggcgctcttcgtggccggatcggcggcagcggcggcggggaatgccggaggccgctcgcagctgacgctcaggcagcggcgccggcagctgctgcggcagcggcaggtgcgcagccacctcaagaggctcaacaaggcgccgctcgccaccatcgagagtccagacggagacatcatagactgcgtgcatatctccaaccagcccgccttggatcaccccttcctcaagaaccacaccgtccagatgcggcctgcataccacccggaaggtctgtacgacgacgagtccaaggttgcatcgcagcggaacgcgcagacgatcacccagatgtggcatcagaacggcaggtgccccgagggcacgataccgatcaggcggaccaaggaggaggacgtgctgagggccagctccgtcaggaggtatggcaagaagaagcgcaggagtgcccccaaccccatgtcggttgaccctgacatgctcaacgagagcggccaccagcacgccatagcgtacgtggaaggagacaagtactacggcgccaaggctaccatcaatgtgtggcagccgaagatcgagcaggccaatgagttcagcctgtcccagctctggatcctggggggctccttcggccaggacctcaacagcatcgaagcaggatggcaggttagcccagacctgtatggggacaacaacactaggctcttcacctactggactagcgatgcctaccaggcaacaggatgctacaacctgctgtgctcggggttcatccagataaacaaccagatcgccatgggcgccagcatcttccctatctccaactacggcggctcccagtatgacatcaacatcttggtctggaaggaccccaaggagggcaactggtggctgcagttcggcaacgactacgtcctggggtactggccgtcgttcctcttctcgtacctggcggacagtgcctccatgatcgagtggggcggcgaggtggtgaactcggagcccgacggcagccacaccagcacgcagatgggcagcggccacttccccgaggaagggttcggcaaggccagctacttcaggaacgtccaggtggtggactccaccaacaacctcaaggcgcccaggggcgtgggcaccttcaccgagcagtccagctgctacgacgtgcaggacggcagcaacgccgactggggcacatacttctactacggcgggcccgggaagaactcaaactgtccatagcccaagactgactgagctgagccgccgcctatcacactcactaccagagccgcctaaccttaacacacctcagctgtatcattcatgcatccggtcaattagtttatactgcctcagatttttaacttttttttcgttttgtttcgctctttcttgcttctacctaccccctagtttactgactcctaccctaggtgagtgagcgtgtgtgttgtagacatgtgagattgttctctctgcctcagagagagtgagatgaaggagagatgtcggtcgtctggttctagggaagagatgaggaggactagggggtaggtag

SEQ ID NO: 19543 - protein, 428 aa, Zea mays subsp. mays
  peptide (1)..(428): Ceres Seq. ID no. 12384371
  misc_feature (192)..(386): Pfam Name: Arabidopsis proteins of unknown function Pfam Description: Arabidopsis proteins of unknown function
  misc_feature (41)..(427): Homolog of NCBI NO: 15238835 NR Description: putative protein
  misc_feature (50)..(428): Homolog of NCBI NO: 18406483 NR Description: expressed protein
  misc_feature (42)..(427): Homolog of NCBI NO: 15241244 NR Description: putative protein
  misc_feature (42)..(428): Homolog of NCBI NO: 27311623 NR Description: unknown protein [Arabidopsis thaliana]
  misc_feature (42)..(428): Homolog of NCBI NO: 15222707 NR Description: unknown protein; protein id: At1g55360.1
  misc_feature (47)..(428): Homolog of NCBI NO: 21593294 NR Description: putative carboxyl-terminal peptidase [Arabidopsis
  misc_feature (47)..(428): Homolog of NCBI NO: 18400044 NR Description: expressed protein
  misc_feature (54)..(428): Homolog of NCBI NO: 30103019 NR Description: unknown protein [Oryza sativa (japonica
  misc_feature (50)..(428): Homolog of NCBI NO: 34393299 NR Description: putative DD1A protein [Oryza sativa (japonica
  misc_feature (2)..(428): Homolog of NCBI NO: 34393554 NR Description: putative carboxyl-terminal proteinase
MAAARACFVALALVAALFVAGSAAAAAGNAGGRSQLTLRQRRRQLLRQRQVRSHLKRLNKAPLATIESPDGDIIDCVHISNQPALDHPFLKNHTVQMRPAYHPEGLYDDESKVASQRNAQTITQMWHQNGRCPEGTIPIRRTKEEDVLRASSVRRYGKKKRRSAPNPMSVDPDMLNESGHQHAIAYVEGDKYYGAKATINVWQPKIEQANEFSLSQLWILGGSFGQDLNSIEAGWQVSPDLYGDNNTRLFTYWTSDAYQATGCYNLLCSGFIQINNQIAMGASIFPISNYGGSQYDINILVWKDPKEGNWWLQFGNDYVLGYWPSFLFSYLADSASMIEWGGEVVNSEPDGSHTSTQMGSGHFPEEGFGKASYFRNVQVVDSTNNLKAPRGVGTFTEQSSCYDVQDGSNADWGTYFYYGGPGKNSNCP

SEQ ID NO: 19544 - protein, 332 aa, Zea mays subsp. mays
  peptide (1)..(332): Ceres Seq. ID no. 12384372
  misc_feature (96)..(290): Pfam Name: Arabidopsis proteins of unknown function Pfam Description: Arabidopsis proteins of unknown function
  misc_feature (1)..(331): Homolog of NCBI NO: 15238835 NR Description: putative protein
  misc_feature (1)..(332): Homolog of NCBI NO: 18406483 NR Description: expressed protein
  misc_feature (1)..(331): Homolog of NCBI NO: 15241244 NR Description: putative protein
  misc_feature (1)..(332): Homolog of NCBI NO: 27311623 NR Description: unknown protein [Arabidopsis thaliana]
  misc_feature (1)..(332): Homolog of NCBI NO: 15222707 NR Description: unknown protein; protein id: At1g55360.1
  misc_feature (1)..(332): Homolog of NCBI NO: 21593294 NR Description: putative carboxyl-terminal peptidase [Arabidopsis
  misc_feature (1)..(332): Homolog of NCBI NO: 18400044 NR Description: expressed protein
  misc_feature (1)..(332): Homolog of NCBI NO: 30103019 NR Description: unknown protein [Oryza sativa (japonica
  misc_feature (1)..(332): Homolog of NCBI NO: 34393299 NR Description: putative DD1A protein [Oryza sativa (japonica
  misc_feature (1)..(332): Homolog of NCBI NO: 34393554 NR Description: putative carboxyl-terminal proteinase
MRPAYHPEGLYDDESKVASQRNAQTITQMWHQNGRCPEGTIPIRRTKEEDVLRASSVRRYGKKKRRSAPNPMSVDPDMLNESGHQHAIAYVEGDKYYGAKATINVWQPKIEQANEFSLSQLWILGGSFGQDLNSIEAGWQVSPDLYGDNNTRLFTYWTSDAYQATGCYNLLCSGFIQINNQIAMGASIFPISNYGGSQYDINILVWKDPKEGNWWLQFGNDYVLGYWPSFLFSYLADSASMIEWGGEVVNSEPDGSHTSTQMGSGHFPEEGFGKASYFRNVQVVDSTNNLKAPRGVGTFTEQSSCYDVQDGSNADWGTYFYYGGPGKNSNCP

SEQ ID NO: 19545 - protein, 304 aa, Zea mays subsp. mays
  peptide (1)..(304): Ceres Seq. ID no. 12384373
  misc_feature (68)..(262): Pfam Name: Arabidopsis proteins of unknown function Pfam Description: Arabidopsis proteins of unknown function
  misc_feature (1)..(303): Homolog of NCBI NO: 15238835 NR Description: putative protein
  misc_feature (1)..(304): Homolog of NCBI NO: 18406483 NR Description: expressed protein
  misc_feature (1)..(303): Homolog of NCBI NO: 15241244 NR Description: putative protein
  misc_feature (1)..(304): Homolog of NCBI NO: 27311623 NR Description: unknown protein [Arabidopsis thaliana]
  misc_feature (1)..(304): Homolog of NCBI NO: 15222707 NR Description: unknown protein; protein id: At1g55360.1
  misc_feature (1)..(304): Homolog of NCBI NO: 21593294 NR Description: putative carboxyl-terminal peptidase [Arabidopsis
  misc_feature (1)..(304): Homolog of NCBI NO: 18400044 NR Description: expressed protein
  misc_feature (1)..(304): Homolog of NCBI NO: 30103019 NR Description: unknown protein [Oryza sativa (japonica
  misc_feature (1)..(304): Homolog of NCBI NO: 34393299 NR Description: putative DD1A protein [Oryza sativa (japonica
  misc_feature (1)..(304): Homolog of NCBI NO: 34393554 NR Description: putative carboxyl-terminal proteinase
MWHQNGRCPEGTIPIRRTKEEDVLRASSVRRYGKKKRRSAPNPMSVDPDMLNESGHQHAIAYVEGDKYYGAKATINVWQPKIEQANEFSLSQLWILGGSFGQDLNSIEAGWQVSPDLYGDNNTRLFTYWTSDAYQATGCYNLLCSGFIQINNQIAMGASIFPISNYGGSQYDINILVWKDPKEGNWWLQFGNDYVLGYWPSFLFSYLADSASMIEWGGEVVNSEPDGSHTSTQMGSGHFPEEGFGKASYFRNVQVVDSTNNLKAPRGVGTFTEQSSCYDVQDGSNADWGTYFYYGGPGKNSNCP

SEQ ID NO: 19546 - DNA, 1214 bp, Zea mays subsp. mays
  misc_feature (1)..(1214): Ceres Seq. ID no. 12359952
  misc_feature: MA Experiment ID: 108527 Result: Up-regulated in Transcription
  misc_feature: MA Experiment 108527 PARAMETER Experiment Name: Zm_5mM_NO_P Parameter: Age (day) Value: 8
  misc_feature: MA Experiment 108527 PARAMETER Experiment Name: Zm_5mM_NO_P Parameter: Organism Value: Zea mays
  misc_feature: MA Experiment 108527 PARAMETER Experiment Name: Zm_5mM_NO_P Parameter: Plant Line Value: 35A19
  misc_feature: MA Experiment 108527 PARAMETER Experiment Name: Zm_5mM_NO_P Parameter: Timepoint (hr) Value: 6
  misc_feature: MA Experiment 108527 PARAMETER Experiment Name: Zm_5mM_NO_P Parameter: Tissue Value: Aerial
  misc_feature: MA Experiment 108527 PARAMETER Experiment Name: Zm_5mM_NO_P Parameter: Treatment Value: 5mM NO vs. No Treatment
agcggcggcttggccacctctgagcctcaagccctcaacctccctcttcggcgcgtaacgtcagtcctcaggtattggcagcataaagtgttagatttgtccttgattgaggtaccccttcaaaggtcaagatgttgtggcgcgcagtacgcagtatggatgtaataatgcattcttcgagtttccttcttccgaaactgtatcaacctgtcaacaaaccagtcaagaactatgctttagttgttctaaaccagcatcttccacgattcatgcctcgactctgggatcatgcaaacttgaagatctgcgctgatggaggagctaatcatatttttgatgagatgtatcagataaccaatgatgaagacaaaaaaagcaccagaaataagtatgttccagaaataattgaaggggacatggattctataagacctgaagtaaaactgttctactctagtcagggatccaaaatttctgataagtcacataaccaggagacaacagatctacacaaatgtatttctcgaatccatcattgtacgcctgatgatgaaaaaccaaatctctgtgtacttgttactggagcactaggtggaaggtttgatcacgaggcggcaaatatcaatgttctgtatctgttttcggacatgaggattgtcctcctatcagacgattgcttgatccgacttcttccgagaacacatcgccatgagctttatattgagtcgtctgttgaaggaccccattgtgggcttttccctgttggagcaccatcaacaagcacaacaactactggcctgaaatggaatctaagtgaatcaaagatgagatttgggagcatgataagcacatccaacattgtgcagtcggagaaagtaactgtagaatctgatgcagatctcttgtggacaatttctctgcgaaatctgacataagcagttcctagtttgttatcttttttcttctctttcctgtcaagtggcaaccaagctcttgtacagccacttttgtgtttatgagttgtgtgtctggtaaataaataccatctgatgacaaatcgatgaggtctcatcattagacaggatgtctaccacgatcttgaactgctgatgaattatgtgaataacacgagcaggcatgatggttgtatcctctctagttgtataactgtattgttgtacttgcaacggggtttcttgtataaaattgttctc

SEQ ID NO: 19547 - protein, 267 aa, Zea mays subsp. mays
  peptide (1)..(267): Ceres Seq. ID no. 12359953
  misc_feature (40)..(180): Pfam Name: Thiamin pyrophosphokinase, catalytic domain Pfam Description: Thiamin pyrophosphokinase, catalytic domain
  misc_feature (14)..(265): Homolog of NCBI NO: 14278354 NR Description: Chain A, Mouse Thiamin Pyrophosphokinase
  misc_feature (80)..(264): Homolog of NCBI NO: 30678410 NR Description: thiamin pyrophosphokinase -related [Arabidopsis
  misc_feature (14)..(265): Homolog of NCBI NO: 34907130 NR Description: putative thiamine pyrophosphokinase
  misc_feature (8)..(264): Homolog of NCBI NO: 18406621 NR Description: putative thiamin pyrophosphokinase
  misc_feature (9)..(264): Homolog of NCBI NO: 7488367 NR Description: probable thiamin pyrophosphokinase At2g44750
  misc_feature (8)..(264): Homolog of NCBI NO: 30689827 NR Description: thiamin pyrophosphokinase -related [Arabidopsis
  misc_feature (9)..(264): Homolog of NCBI NO: 18379026 NR Description: thiamin pyrophosphokinase, putative
  misc_feature (8)..(264): Homolog of NCBI NO: 30678415 NR Description: thiamin pyrophosphokinase -related [Arabidopsis
  misc_feature (9)..(86): Homolog of NCBI NO: 34915046 NR Description: putative thiamin pyrophosphokinase
  misc_feature (110)..(267): Homolog of NCBI NO: 34915046 NR Description: putative thiamin pyrophosphokinase
MLWRAVRSMDVIMHSSSFLLPKLYQPVNKPVKNYALVVLNQHLPRFMPRLWDHANLKICADGGANHIFDEMYQITNDEDKKSTRNKYVPEIIEGDMDSIRPEVKLFYSSQGSKISDKSHNQETTDLHKCISRIHHCTPDDEKPNLCVLVTGALGGRFDHEAANINVLYLFSDMRIVLLSDDCLIRLLPRTHRHELYIESSVEGPHCGLFPVGAPSTSTTTTGLKWNLSESKMRFGSMISTSNIVQSEKVTVESDADLLWTISLRNLT

SEQ ID NO: 19548 - protein, 259 aa, Zea mays subsp. mays
  peptide (1)..(259): Ceres Seq. ID no. 12359954
  misc_feature (32)..(172): Pfam Name: Thiamin pyrophosphokinase, catalytic domain Pfam Description: Thiamin pyrophosphokinase, catalytic domain
  misc_feature (6)..(257): Homolog of NCBI NO: 14278354 NR Description: Chain A, Mouse Thiamin Pyrophosphokinase
  misc_feature (72)..(256): Homolog of NCBI NO: 30678410 NR Description: thiamin pyrophosphokinase -related [Arabidopsis
  misc_feature (6)..(257): Homolog of NCBI NO: 34907130 NR Description: putative thiamine pyrophosphokinase
  misc_feature (1)..(256): Homolog of NCBI NO: 18406621 NR Description: putative thiamin pyrophosphokinase
  misc_feature (1)..(256): Homolog of NCBI NO: 7488367 NR Description: probable thiamin pyrophosphokinase At2g44750
  misc_feature (1)..(256): Homolog of NCBI NO: 30689827 NR Description: thiamin pyrophosphokinase -related [Arabidopsis
  misc_feature (1)..(256): Homolog of NCBI NO: 18379026 NR Description: thiamin pyrophosphokinase, putative
  misc_feature (1)..(256): Homolog of NCBI NO: 30678415 NR Description: thiamin pyrophosphokinase -related [Arabidopsis
  misc_feature (1)..(78): Homolog of NCBI NO: 34915046 NR Description: putative thiamin pyrophosphokinase
  misc_feature (102)..(259): Homolog of NCBI NO: 34915046 NR Description: putative thiamin pyrophosphokinase
MDVIMHSSSFLLPKLYQPVNKPVKNYALVVLNQHLPRFMPRLWDHANLKICADGGANHIFDEMYQITNDEDKKSTRNKYVPEIIEGDMDSIRPEVKLFYSSQGSKISDKSHNQETTDLHKCISRIHHCTPDDEKPNLCVLVTGALGGRFDHEAANINVLYLFSDMRIVLLSDDCLIRLLPRTHRHELYIESSVEGPHCGLFPVGAPSTSTTTTGLKWNLSESKMRFGSMISTSNIVQSEKVTVESDADLLWTISLRNLT

SEQ ID NO: 19549 - protein, 255 aa, Zea mays subsp. mays
  peptide (1)..(255): Ceres Seq. ID no. 12359955
  misc_feature (28)..(168): Pfam Name: Thiamin pyrophosphokinase, catalytic domain Pfam Description: Thiamin pyrophosphokinase, catalytic domain
  misc_feature (2)..(253): Homolog of NCBI NO: 34907130 NR Description: putative thiamine pyrophosphokinase
  misc_feature (1)..(252): Homolog of NCBI NO: 18406621 NR Description: putative thiamin pyrophosphokinase
  misc_feature (1)..(252): Homolog of NCBI NO: 7488367 NR Description: probable thiamin pyrophosphokinase At2g44750
  misc_feature (1)..(252): Homolog of NCBI NO: 30689827 NR Description: thiamin pyrophosphokinase -related [Arabidopsis
  misc_feature (2)..(253): Homolog of NCBI NO: 14278354 NR Description: Chain A, Mouse Thiamin Pyrophosphokinase
  misc_feature (68)..(252): Homolog of NCBI NO: 30678410 NR Description: thiamin pyrophosphokinase -related [Arabidopsis
  misc_feature (1)..(252): Homolog of NCBI NO: 18379026 NR Description: thiamin pyrophosphokinase, putative
  misc_feature (1)..(252): Homolog of NCBI NO: 30678415 NR Description: thiamin pyrophosphokinase -related [Arabidopsis
  misc_feature (1)..(74): Homolog of NCBI NO: 34915046 NR Description: putative thiamin pyrophosphokinase
  misc_feature (98)..(255): Homolog of NCBI NO: 34915046 NR Description: putative thiamin pyrophosphokinase
MHSSSFLLPKLYQPVNKPVKNYALVVLNQHLPRFMPRLWDHANLKICADGGANHIFDEMYQITNDEDKKSTRNKYVPEIIEGDMDSIRPEVKLFYSSQGSKISDKSHNQETTDLHKCISRIHHCTPDDEKPNLCVLVTGALGGRFDHEAANINVLYLFSDMRIVLLSDDCLIRLLPRTHRHELYIESSVEGPHCGLFPVGAPSTSTTTTGLKWNLSESKMRFGSMISTSNIVQSEKVTVESDADLLWTISLRNLT

SEQ ID NO: 19550 - DNA, 2673 bp, Zea mays subsp. mays
  misc_feature (1)..(2673): Ceres Seq. ID no. 12375740
  misc_feature: MA Experiment ID: 20000534 Result: Down-regulated in Transcription
  misc_feature: MA Experiment 20000534 PARAMETER Experiment Name: Zm_Hybrid_Pollen_P Parameter: Age (day) Value: 8
  misc_feature: MA Experiment 20000534 PARAMETER Experiment Name: Zm_Hybrid_Pollen_P Parameter: Organism Value: Zea mays
  misc_feature: MA Experiment 20000534 PARAMETER Experiment Name: Zm_Hybrid_Pollen_P Parameter: Plant Line Value: 35A19
  misc_feature: MA Experiment 20000534 PARAMETER Experiment Name: Zm_Hybrid_Pollen_P Parameter: Tissue Value: Pollen vs. Aerial
gcacgagaccattacctagaacatcctaatcgaaaagtaaacctagctgctctacctacccgcacccccaccccgtggagagcaagtgcagccatggcggcggatcgggagaaggagcgcgaggcggagctggagggcgccatgtacactaactgcctactcctcggcctcgatcccgcggtcctcggctctccctcttcccccgccggccgcgtgggcctatttcgtcactccaacccccgccttggcgagcaactcctctacttccttctctcctcgctccgcggccccgcgcagtccgcgaaggattttgacaaggtctggccaatcttcgactccgctcagtccagggagttcaggaagatcgtgcaagggatcatcagcgagctggaacagcatggggcactgcctcggagcaattctagggtctcgtcacttgccacatgctgcggaccgagatttgttgagcttttgtggcaactatctgtacatgccctgagagaagtccacaagagaacatttgcagctgatgttgtatcaaatccactacctgcagcactaacagatgtttcttatcttcatgctgcttctttactcccagtaaccaaggcaagaatagctctggagaggcgtaaatttcttaaaaatgcaaacatagctgttcagaggcaaatgacatggtcaaatttggcccatgagatgacagctgagttccgaagtctatgtgctgaagaggcttatttgcaacaagagttagagaaactacaagatatgagaaacaaagcaaaactggaaggcgaactctgggacgaacggctctcaggctcatctgggcagaactctcatttggtttctaaggcaactcgtctttgggaatcaatattggctcgcaaaggccagcacgaggttttagcttctggaccaattgaagatcttatagcacatcgggagcacagataccggatatcaggatcacagttactagcagcaatggatatgagttcaagtgttccacattctgagttactatcatctaaagctggtgaaacttctataattttggagaagcaggaagaattttctcagctattccaagaaaaggaagaagcccttacaaggtcagatgataggaatggacgtactcagcaaactgtttatgtagctgaaattcttcgccgctggacccatgctttacaacgtattcataaacaatctcttcatttggccaaagcgaatgatggagaggggcctgaattactgaggagtgcatccagcggagaggccagtactcattctgattcgttaactgcaacattagctgaacatcgccagcatttagtcagtatacagggtctaattaatcaactcaaggaggctattccagcaatgcagcagtctatagacgaactctcagaagaagtgaatagtgtatctattaactcaatggaccaattgaactcgaggctgccactgccagtacaaattgcagggtttggaacatcagaagaaagcagcagtgaagtttcggagatcaattctaagctctcttctacacacttggataagcctgggggcagtcctgctctaaagctaccaccattatttagtctgactccaagttcttctggaaaaggaatacagacacaaaaacggagtgcattggctcgtcaacgtagccaggacatcacatcagaacagaaaacgcttaccatcccctcaactaaggatcaaatgaatggttcaatgcacgaaaatgatgactattctgctcatgacattagacgttctgttcgtgaagctgctttatctaagccattgaagaatacagagagaccacaagataaaaatagtgatgatggttcggaacacttctttattccgctgtcaattagtgctgcgaagaaggaaatggattcggtggcaaatcgatgtaaccaaagattaggtttgtcacctcagatgaagttcccaaagagcacaagctacaatgcagataccccaatcaacaaaagtccaattctgttaagtgaactcaatggacatgattcgatcagtgccatgagtttccttgacccggctggtggtctggcacatcagtcctttatcactgatgatgctctggatcaagtattctctcctctattgatggaatcttcgttgttccatgatgcagatgaggatctacttgcacccttgtcagagactgatgcagcattaatggaatattaagcttcacatgtgcactatgtaatattttgaccactgcagacgcagcctggaggttattgtggcttatgtttgtcttattgactattcggctagttgcttgcgagttgcaaccatgttgagatacagatgcttcatcagaatttgtggggtatatgttgactattgatgcggggagaggtgatattgatgctgttttttccccttctggacaaggctctataggtgccggcgttgtaccaactgtagtggacgcaataggaaagcccaatcttgtatatttagttactatacatcagcagtatttgtgctgtaatactttttcgaattgctgaaatatgtgtttttctgctagttgcgtcctcctgagttttctcagtttcagtgtacgaaattgcaaatcacgaatctaatgaggttaagccaacggggactgtgttcagagtt

SEQ ID NO: 19551 - protein, 742 aa, Zea mays subsp. mays
  peptide (1)..(742): Ceres Seq. ID no. 12375741
  misc_feature (268)..(742): Homolog of NCBI NO: 18422020 NR Description: putative protein
  misc_feature (268)..(742): Homolog of NCBI NO: 9758101 NR Description: gene_id:MNF13.29~unknown protein [Arabidopsis
  misc_feature (32)..(477): Homolog of NCBI NO: 18422020 NR Description: putative protein
  misc_feature (32)..(740): Homolog of NCBI NO: 9758101 NR Description: gene_id:MNF13.29~unknown protein [Arabidopsis
ARDHYLEHPNRKVNLAALPTRTPTPWRASAAMAADREKEREAELEGAMYTNCLLLGLDPAVLGSPSSPAGRVGLFRHSNPRLGEQLLYFLLSSLRGPAQSAKDFDKVWPIFDSAQSREFRKIVQGIISELEQHGALPRSNSRVSSLATCCGPRFVELLWQLSVHALREVHKRTFAADVVSNPLPAALTDVSYLHAASLLPVTKARIALERRKFLKNANIAVQRQMTWSNLAHEMTAEFRSLCAEEAYLQQELEKLQDMRNKAKLEGELWDERLSGSSGQNSHLVSKATRLWESILARKGQHEVLASGPIEDLIAHREHRYRISGSQLLAAMDMSSSVPHSELLSSKAGETSIILEKQEEFSQLFQEKEEALTRSDDRNGRTQQTVYVAEILRRWTHALQRIHKQSLHLAKANDGEGPELLRSASSGEASTHSDSLTATLAEHRQHLVSIQGLINQLKEAIPAMQQSIDELSEEVNSVSINSMDQLNSRLPLPVQIAGFGTSEESSSEVSEINSKLSSTHLDKPGGSPALKLPPLFSLTPSSSGKGIQTQKRSALARQRSQDITSEQKTLTIPSTKDQMNGSMHENDDYSAHDIRRSVREAALSKPLKNTERPQDKNSDDGSEHFFIPLSISAAKKEMDSVANRCNQRLGLSPQMKFPKSTSYNADTPINKSPILLSELNGHDSISAMSFLDPAGGLAHQSFITDDALDQVFSPLLMESSLFHDADEDLLAPLSETDAALMEY

SEQ ID NO: 19552 - protein, 711 aa, Zea mays subsp. mays
  peptide (1)..(711): Ceres Seq. ID no. 12375742
  misc_feature (237)..(711): Homolog of NCBI NO: 18422020 NR Description: putative protein
  misc_feature (237)..(711): Homolog of NCBI NO: 9758101 NR Description: gene_id:MNF13.29~unknown protein [Arabidopsis
  misc_feature (1)..(446): Homolog of NCBI NO: 18422020 NR Description: putative protein
  misc_feature (1)..(709): Homolog of NCBI NO: 9758101 NR Description: gene_id:MNF13.29~unknown protein [Arabidopsis
MAADREKEREAELEGAMYTNCLLLGLDPAVLGSPSSPAGRVGLFRHSNPRLGEQLLYFLLSSLRGPAQSAKDFDKVWPIFDSAQSREFRKIVQGIISELEQHGALPRSNSRVSSLATCCGPRFVELLWQLSVHALREVHKRTFAADVVSNPLPAALTDVSYLHAASLLPVTKARIALERRKFLKNANIAVQRQMTWSNLAHEMTAEFRSLCAEEAYLQQELEKLQDMRNKAKLEGELWDERLSGSSGQNSHLVSKATRLWESILARKGQHEVLASGPIEDLIAHREHRYRISGSQLLAAMDMSSSVPHSELLSSKAGETSIILEKQEEFSQLFQEKEEALTRSDDRNGRTQQTVYVAEILRRWTHALQRIHKQSLHLAKANDGEGPELLRSASSGEASTHSDSLTATLAEHRQHLVSIQGLINQLKEAIPAMQQSIDELSEEVNSVSINSMDQLNSRLPLPVQIAGFGTSEESSSEVSEINSKLSSTHLDKPGGSPALKLPPLFSLTPSSSGKGIQTQKRSALARQRSQDITSEQKTLTIPSTKDQMNGSMHENDDYSAHDIRRSVREAALSKPLKNTERPQDKNSDDGSEHFFIPLSISAAKKEMDSVANRCNQRLGLSPQMKFPKSTSYNADTPINKSPILLSELNGHDSISAMSFLDPAGGLAHQSFITDDALDQVFSPLLMESSLFHDADEDLLAPLSETDAALMEY

SEQ ID NO: 19553 - protein, 695 aa, Zea mays subsp. mays
  peptide (1)..(695): Ceres Seq. ID no. 12375743
  misc_feature (221)..(695): Homolog of NCBI NO: 18422020 NR Description: putative protein
  misc_feature (221)..(695): Homolog of NCBI NO: 9758101 NR Description: gene_id:MNF13.29~unknown protein [Arabidopsis
  misc_feature (1)..(430): Homolog of NCBI NO: 18422020 NR Description: putative protein
  misc_feature (1)..(693): Homolog of NCBI NO: 9758101 NR Description: gene_id:MNF13.29~unknown protein [Arabidopsis
MYTNCLLLGLDPAVLGSPSSPAGRVGLFRHSNPRLGEQLLYFLLSSLRGPAQSAKDFDKVWPIFDSAQSREFRKIVQGIISELEQHGALPRSNSRVSSLATCCGPRFVELLWQLSVHALREVHKRTFAADVVSNPLPAALTDVSYLHAASLLPVTKARIALERRKFLKNANIAVQRQMTWSNLAHEMTAEFRSLCAEEAYLQQELEKLQDMRNKAKLEGELWDERLSGSSGQNSHLVSKATRLWESILARKGQHEVLASGPIEDLIAHREHRYRISGSQLLAAMDMSSSVPHSELLSSKAGETSIILEKQEEFSQLFQEKEEALTRSDDRNGRTQQTVYVAEILRRWTHALQRIHKQSLHLAKANDGEGPELLRSASSGEASTHSDSLTATLAEHRQHLVSIQGLINQLKEAIPAMQQSIDELSEEVNSVSINSMDQLNSRLPLPVQIAGFGTSEESSSEVSEINSKLSSTHLDKPGGSPALKLPPLFSLTPSSSGKGIQTQKRSALARQRSQDITSEQKTLTIPSTKDQMNGSMHENDDYSAHDIRRSVREAALSKPLKNTERPQDKNSDDGSEHFFIPLSISAAKKEMDSVANRCNQRLGLSPQMKFPKSTSYNADTPINKSPILLSELNGHDSISAMSFLDPAGGLAHQSFITDDALDQVFSPLLMESSLFHDADEDLLAPLSETDAALMEY

SEQ ID NO: 19554 - DNA, 448 bp, Zea mays subsp. mays
  misc_feature (1)..(448): Ceres Seq. ID no. 4614514
  misc_feature: MA Experiment ID: 108522 Result: Down-regulated in Transcription
  misc_feature: MA Experiment 108522 PARAMETER Experiment Name: Zm_42deg_Heat_P Parameter: Age (day) Value: 8
  misc_feature: MA Experiment 108522 PARAMETER Experiment Name: Zm_42deg_Heat_P Parameter: Organism Value: Zea mays
  misc_feature: MA Experiment 108522 PARAMETER Experiment Name: Zm_42deg_Heat_P Parameter: Plant Line Value: 35A19
  misc_feature: MA Experiment 108522 PARAMETER Experiment Name: Zm_42deg_Heat_P Parameter: Temperature (deg C) Value: 42 vs. 22
  misc_feature: MA Experiment 108522 PARAMETER Experiment Name: Zm_42deg_Heat_P Parameter: Timepoint (hr) Value: 1
  misc_feature: MA Experiment 108522 PARAMETER Experiment Name: Zm_42deg_Heat_P Parameter: Tissue Value: Aerial
tttgagaagcttgggccaagcctatatgactttctgcgaaagaatagctaccgttcatttcctattgaccttgtccgagaatttgccagacaaatattagagtctgttgcatttatgcatgacttgcgacttattcacacggatctgaagccagagaacattctccttgtttcatcagagtctatcagggtgcctgattataaggtttctatacgaccaccaaaggatggttctttctttaagaaccttccaaaatctagtgctatcaagctgattgattttgggagtacaactttcgagagccaagaccacaattatgtggtgtcgacaagacattatcgtgcaccagaagttatccttggtcttgggtggaactatccatgcgacttgtggagtgtgggttgcattttagttgagctttgttcgggggaagctctctttcaaacac

SEQ ID NO: 19555 - protein, 149 aa, Zea mays subsp. mays
  peptide (1)..(149): Ceres Seq. ID no. 4614515
  misc_feature (1)..(148): Pfam Name: Protein kinase domain Pfam Description: Protein kinase domain
  misc_feature (1)..(148): Homolog of NCBI NO: 15233872 NR Description: protein kinase AME3
  misc_feature (1)..(148): Homolog of NCBI NO: 601791 NR Description: protein kinase
  misc_feature (1)..(148): Homolog of NCBI NO: 34912246 NR Description: putative protein kinase AFC3
  misc_feature (1)..(148): Homolog of NCBI NO: 15233948 NR Description: protein kinase (AFC2)
  misc_feature (1)..(148): Homolog of NCBI NO: 7211773 NR Description: protein kinase MK5 [Mesembryanthemum crystallinum]
  misc_feature (1)..(148): Homolog of NCBI NO: 7489189 NR Description: protein kinase PK12 (EC 2.7.1.-),
  misc_feature (1)..(148): Homolog of NCBI NO: 30693861 NR Description: protein kinase (AME2/AFC1) [Arabidopsis thaliana]
  misc_feature (1)..(148): Homolog of NCBI NO: 15231839 NR Description: protein kinase (AME2/AFC1)
  misc_feature (1)..(148): Homolog of NCBI NO: 601787 NR Description: protein kinase
  misc_feature (1)..(148): Homolog of NCBI NO: 34908100 NR Description: putative protein kinase AFC1
FEKLGPSLYDFLRKNSYRSFPIDLVREFARQILESVAFMHDLRLIHTDLKPENILLVSSESIRVPDYKVSIRPPKDGSFFKNLPKSSAIKLIDFGSTTFESQDHNYVVSTRHYRAPEVILGLGWNYPCDLWSVGCILVELCSGEALFQT

SEQ ID NO: 19556 - protein, 111 aa, Zea mays subsp. mays
  peptide (1)..(111): Ceres Seq. ID no. 4614516
  misc_feature (1)..(110): Pfam Name: Protein kinase domain Pfam Description: Protein kinase domain
  misc_feature (1)..(110): Homolog of NCBI NO: 15233872 NR Description: protein kinase AME3
  misc_feature (1)..(110): Homolog of NCBI NO: 601791 NR Description: protein kinase
  misc_feature (1)..(110): Homolog of NCBI NO: 34912246 NR Description: putative protein kinase AFC3
  misc_feature (1)..(110): Homolog of NCBI NO: 15233948 NR Description: protein kinase (AFC2)
  misc_feature (1)..(110): Homolog of NCBI NO: 7211773 NR Description: protein kinase MK5 [Mesembryanthemum crystallinum]
  misc_feature (1)..(110): Homolog of NCBI NO: 7489189 NR Description: protein kinase PK12 (EC 2.7.1.-),
  misc_feature (1)..(110): Homolog of NCBI NO: 30693861 NR Description: protein kinase (AME2/AFC1) [Arabidopsis thaliana]
  misc_feature (1)..(110): Homolog of NCBI NO: 15231839 NR Description: protein kinase (AME2/AFC1)
  misc_feature (1)..(110): Homolog of NCBI NO: 601787 NR Description: protein kinase
  misc_feature (1)..(110): Homolog of NCBI NO: 34908100 NR Description: putative protein kinase AFC1
MHDLRLIHTDLKPENILLVSSESIRVPDYKVSIRPPKDGSFFKNLPKSSAIKLIDFGSTTFESQDHNYVVSTRHYRAPEVILGLGWNYPCDLWSVGCILVELCSGEALFQT

SEQ ID NO: 19557 - DNA, 1621 bp, Zea mays subsp. mays
  misc_feature (1)..(1621): Ceres Seq. ID no. 12391606
  misc_feature: MA Experiment ID: 108535 Result: Up-regulated in Transcription
  misc_feature: MA Experiment 108535 PARAMETER Experiment Name: Zm_Meristem_P Parameter: Age (day) Value: 8
  misc_feature: MA Experiment 108535 PARAMETER Experiment Name: Zm_Meristem_P Parameter: Organism Value: Zea mays
  misc_feature: MA Experiment 108535 PARAMETER Experiment Name: Zm_Meristem_P Parameter: Plant Line Value: 35A19
  misc_feature: MA Experiment 108535 PARAMETER Experiment Name: Zm_Meristem_P Parameter: Tissue Value: Root Meristem vs. Above Root Meristem
  misc_feature: MA Experiment ID: 108544 Result: Down-regulated in Transcription
  misc_feature: MA Experiment ID: 20000487 Result: Down-regulated in Transcription
  misc_feature: MA Experiment 20000487 PARAMETER Experiment Name: Zm_50mM_NH4NO3_L_to_H_P Parameter: Organism Value: Zea mays
  misc_feature: MA Experiment 20000487 PARAMETER Experiment Name: Zm_50mM_NH4NO3_L_to_H_P Parameter: Timepoint (hr) Value: 4
  misc_feature: MA Experiment 20000487 PARAMETER Experiment Name: Zm_50mM_NH4NO3_L_to_H_P Parameter: Tissue Value: Leaves
  misc_feature: MA Experiment 20000487 PARAMETER Experiment Name: Zm_50mM_NH4NO3_L_to_H_P Parameter: Treatment Value: 50mM NH4NO3 vs. 100mM Mannitol
aggctctgggtctcgcatcacgatcagatccaatccaaggccgcgccccagcccggcggatggattccgccgccgtggccatcgtgacggtgccgttcccggcgcagggccacctgaaccagctgctgcacctgtccctgctcctggcatcgcgggggcttcctgtccacttcgtcgcgccggagccgcacctccgggaggcccgcgcgcgcctgcacggctgggggcccgaccccgcgtcggtgtgcttccgcgcgctggacgtgcccgcgcacgactccccctccccggacccatcctccccgttcccggcgcacatgcagcccctgttcgaggccttctgcaccggcgcgcgggcctcgctagccgcgctcctggcggagctggccgcgtcgcaccgccgcgtcgtcgtcctctacgaccgcatggcggccttcgcggcggccgaggccgcgcgcttacccaacgccgaggccctcggcgtgcactgcctcgccgcctcctacaacgtcgggtgggcggacccggggcacgccctcctgcgccgccacggcctcgtgttccacccgcccgacgcttgcgccacgccggagttcgtcgcgctcgccaggcggatgggccaggagcgccggcgcgcgcccggagccggcatggtcgtcaacacctgccgcgcgctcgagggcgacttcctcgacgcactccgggggatcccgtcctccgacggcccaaggctgttcgccgtcgggcctctcagcccggtgctccccctccccggcgcgagcgggactcggcacgagtgcctgggctggctcgacgcgcagccgccctcgtcggtgctctacgtgtcgttcggtacgacgtcgtcgctccgcccggagcaggtgcgcgagctggccgccgcgctgcgggacagcggggcgcgcttcgtgtgggcgctgcgggacgccgaccgcgcgggcatgcgcggcggagagggggatactacgaccgaggccctccacgccgccgcggcgtccgagctcggccccgacggcgctggcgtggtggtcaccgggtgggcgccgcagctggagatcctggcgcacggcgccaccgcggcgttcatgagccactgcggctggaactccaccgtggagagcatcagccacgggaagcccatcctggcgtggcccatgcatagcgaccagccctgggacgccgagctcgtgtgcaagtacctccgcgccggcgtcctggtgcgcccgtgggagcggcgccatgacgtgacccccgcggccgacatccgcgacgctatcgacagggtcatggcctcggaggaaggggctgagatccggcggcgggccggggcgctcggggaggccgttcgcggcgccgtggccgagggcgggtcgtctaggcaggacctggaggagctcgtcgcgtacgtgacgaggtgattccgtcgcgatggcccatgcggcgactgtgccgcgtggcggcgctgctgcctgcattaacgatttgtttccatggactatattagttgaaatgaaatccgaaggttttaggccaggctatggtttcatttgagggttggccaggccatcttcagtagtctatctatctattttataaacttgtg

SEQ ID NO: 19558 - protein, 477 aa, Zea mays subsp. mays
  peptide (1)..(477): Ceres Seq. ID no. 12391607
  misc_feature (25)..(477): Homolog of NCBI NO: 20067054 NR Description: putative glucosyltransferase [Phaseolus lunatus]
  misc_feature (25)..(383): Homolog of NCBI NO: 38345592 NR Description: OSJNBb0012E24.10 [Oryza sativa (japonica
  misc_feature (25)..(477): Homolog of NCBI NO: 38345407 NR Description: OSJNBa0017B10.13 [Oryza sativa (japonica
  misc_feature (24)..(477): Homolog of NCBI NO: 38345403 NR Description: OSJNBa0017B10.9 [Oryza sativa (japonica
  misc_feature (24)..(477): Homolog of NCBI NO: 38345594 NR Description: OSJNBb0012E24.12 [Oryza sativa (japonica
  misc_feature (24)..(477): Homolog of NCBI NO: 38345593 NR Description: OSJNBb0012E24.11 [Oryza sativa (japonica
  misc_feature (24)..(477): Homolog of NCBI NO: 19743738 NR Description: cis-zeatin O-glucosyltransferase 2 [Zea mays]
  misc_feature (24)..(477): Homolog of NCBI NO: 18568243 NR Description: putative cis-zeatin O-glucosyltransferase [Zea
  misc_feature (24)..(477): Homolog of NCBI NO: 14091010 NR Description: cis-zeatin O-glucosyltransferase [Zea mays]
  misc_feature (22)..(477): Homolog of NCBI NO: 34899110 NR Description: putative cis-zeatin O-glucosyltransferase
ALGLASRSDPIQGRAPARRMDSAAVAIVTVPFPAQGHLNQLLHLSLLLASRGLPVHFVAPEPHLREARARLHGWGPDPASVCFRALDVPAHDSPSPDPSSPFPAHMQPLFEAFCTGARASLAALLAELAASHRRVVVLYDRMAAFAAAEAARLPNAEALGVHCLAASYNVGWADPGHALLRRHGLVFHPPDACATPEFVALARRMGQERRRAPGAGMVVNTCRALEGDFLDALRGIPSSDGPRLFAVGPLSPVLPLPGASGTRHECLGWLDAQPPSSVLYVSFGTTSSLRPEQVRELAAALRDSGARFVWALRDADRAGMRGGEGDTTTEALHAAAASELGPDGAGVVVTGWAPQLEILAHGATAAFMSHCGWNSTVESISHGKPILAWPMHSDQPWDAELVCKYLRAGVLVRPWERRHDVTPAADIRDAIDRVMASEEGAEIRRRAGALGEAVRGAVAEGGSSRQDLEELVAYVTR

SEQ ID NO: 19559 - protein, 458 aa, Zea mays subsp. mays
  peptide (1)..(458): Ceres Seq. ID no. 12391608
  misc_feature (6)..(458): Homolog of NCBI NO: 20067054 NR Description: putative glucosyltransferase [Phaseolus lunatus]
  misc_feature (6)..(364): Homolog of NCBI NO: 38345592 NR Description: OSJNBb0012E24.10 [Oryza sativa (japonica
  misc_feature (6)..(458): Homolog of NCBI NO: 38345407 NR Description: OSJNBa0017B10.13 [Oryza sativa (japonica
  misc_feature (5)..(458): Homolog of NCBI NO: 38345403 NR Description: OSJNBa0017B10.9 [Oryza sativa (japonica
  misc_feature (5)..(458): Homolog of NCBI NO: 38345594 NR Description: OSJNBb0012E24.12 [Oryza sativa (japonica
  misc_feature (5)..(458): Homolog of NCBI NO: 38345593 NR Description: OSJNBb0012E24.11 [Oryza sativa (japonica
  misc_feature (5)..(458): Homolog of NCBI NO: 19743738 NR Description: cis-zeatin O-glucosyltransferase 2 [Zea mays]
  misc_feature (5)..(458): Homolog of NCBI NO: 18568243 NR Description: putative cis-zeatin O-glucosyltransferase [Zea
  misc_feature (5)..(458): Homolog of NCBI NO: 14091010 NR Description: cis-zeatin O-glucosyltransferase [Zea mays]
  misc_feature (3)..(458): Homolog of NCBI NO: 34899110 NR Description: putative cis-zeatin O-glucosyltransferase
MDSAAVAIVTVPFPAQGHLNQLLHLSLLLASRGLPVHFVAPEPHLREARARLHGWGPDPASVCFRALDVPAHDSPSPDPSSPFPAHMQPLFEAFCTGARASLAALLAELAASHRRVVVLYDRMAAFAAAEAARLPNAEALGVHCLAASYNVGWADPGHALLRRHGLVFHPPDACATPEFVALARRMGQERRRAPGAGMVVNTCRALEGDFLDALRGIPSSDGPRLFAVGPLSPVLPLPGASGTRHECLGWLDAQPPSSVLYVSFGTTSSLRPEQVRELAAALRDSGARFVWALRDADRAGMRGGEGDTTTEALHAAAASELGPDGAGVVVTGWAPQLEILAHGATAAFMSHCGWNSTVESISHGKPILAWPMHSDQPWDAELVCKYLRAGVLVRPWERRHDVTPAADIRDAIDRVMASEEGAEIRRRAGALGEAVRGAVAEGGSSRQDLEELVAYVTR

SEQ ID NO: 19560 - protein, 392 aa, Zea mays subsp. mays
  peptide (1)..(392): Ceres Seq. ID no. 12391609
  misc_feature (35)..(210): Pfam Name: Herpesvirus UL87 family Pfam Description: Herpesvirus UL87 family
  misc_feature (14)..(392): Homolog of NCBI NO: 23106243 NR Description: hypothetical protein [Azotobacter vinelandii]
  misc_feature (1)..(392): Homolog of NCBI NO: 23106243 NR Description: hypothetical protein [Azotobacter vinelandii]
GSGSRITIRSNPRPRPSPADGFRRRGHRDGAVPGAGPPEPAAAPVPAPGIAGASCPLRRAGAAPPGGPRAPARLGARPRVGVLPRAGRARARLPLPGPILPVPGAHAAPVRGLLHRRAGLASRAPGGAGRVAPPRRRPLRPHGGLRGGRGRALTQRRGPRRALPRRLLQRRVGGPGARPPAPPRPRVPPARRLRHAGVRRARQADGPGAPARARSRHGRQHLPRARGRLPRRTPGDPVLRRPKAVRRRASQPGAPPPRRERDSARVPGLARRAAALVGALRVVRYDVVAPPGAGARAGRRAAGQRGALRVGAAGRRPRGHARRRGGYYDRGPPRRRGVRARPRRRWRGGHRVGAAAGDPGARRHRGVHEPLRLELHRGEHQPREAHPGVAHA

SEQ ID NO: 19561 - DNA, 2139 bp, Zea mays subsp. mays
  misc_feature (1)..(2139): Ceres Seq. ID no. 12419732
  misc_feature: MA Experiment ID: 108535 Result: Down-regulated in Transcription
  misc_feature: MA Experiment 108535 PARAMETER Experiment Name: Zm_Meristem_P Parameter: Age (day) Value: 8
  misc_feature: MA Experiment 108535 PARAMETER Experiment Name: Zm_Meristem_P Parameter: Organism Value: Zea mays
  misc_feature: MA Experiment 108535 PARAMETER Experiment Name: Zm_Meristem_P Parameter: Plant Line Value: 35A19
  misc_feature: MA Experiment 108535 PARAMETER Experiment Name: Zm_Meristem_P Parameter: Tissue Value: Root Meristem vs. Above Root Meristem
  misc_feature: MA Experiment ID: 108536 Result: Up-regulated in Transcription
  misc_feature: MA Experiment 108536 PARAMETER Experiment Name: Zm_Meristem_P Parameter: Age (day) Value: 8
  misc_feature: MA Experiment 108536 PARAMETER Experiment Name: Zm_Meristem_P Parameter: Organism Value: Zea mays
  misc_feature: MA Experiment 108536 PARAMETER Experiment Name: Zm_Meristem_P Parameter: Plant Line Value: 35A19
  misc_feature: MA Experiment 108536 PARAMETER Experiment Name: Zm_Meristem_P Parameter: Tissue Value: Shoot Meristem vs. Above Shoot Meristem
  misc_feature: MA Experiment ID: 108556 Result: Down-regulated in Transcription
  misc_feature: MA Experiment 108556 PARAMETER Experiment Name: Zm_Drought_P Parameter: Age (day) Value: 9
  misc_feature: MA Experiment 108556 PARAMETER Experiment Name: Zm_Drought_P Parameter: Organism Value: Zea mays
  misc_feature: MA Experiment 108556 PARAMETER Experiment Name: Zm_Drought_P Parameter: Plant Line Value: 35A19
  misc_feature: MA Experiment 108556 PARAMETER Experiment Name: Zm_Drought_P Parameter: Timepoint (hr) Value: 24
  misc_feature: MA Experiment 108556 PARAMETER Experiment Name: Zm_Drought_P Parameter: Tissue Value: Aerial
  misc_feature: MA Experiment 108556 PARAMETER Experiment Name: Zm_Drought_P Parameter: Treatment Value: Drought vs. No Drought
  misc_feature: MA Experiment ID: 108687 Result: Down-regulated in Transcription
  misc_feature: MA Experiment 108687 PARAMETER Experiment Name: Zm_Embryos-Flowers__P Parameter: Tissue Value: Embryo vs. Aerial+
  misc_feature: MA Experiment ID: 20000626 Result: Down-regulated in Transcription
  misc_feature: MA Experiment 20000626 PARAMETER Experiment Name: Zm_Herbicide-Treatments_P Parameter: Timepoint (hr) Value: 12
  misc_feature: MA Experiment 20000626 PARAMETER Experiment Name: Zm_Herbicide-Treatments_P Parameter: Tissue Value: Aerial
  misc_feature: MA Experiment 20000626 PARAMETER Experiment Name: Zm_Herbicide-Treatments_P Parameter: Treatment Value: Roundup vs. No Treatment
gcacgagaccattacctagaacatcctaatcaaaaaaacaaattggcactgctcgtcgccgacccctcctccctccccgcgtcccccgacaagccatccgcggccatgatcaccgcgctggacctctaccacgtgctgacggcggtggtgccgctgtacgtggccatgacgctggcgtacggctccgtccgctggtggcgcatcttcacgccggaccagtgctccgggatcaaccgcttcgtggcgctcttcgccgtgccgctcctctccttccacttcatctccaccaacgaccccttcgccatgaacctgcgcttcctggccgccgacacgctgcagaaggtggccgtcctcgcgctgctggcgctggcctcccgcggcctctcctccccgcgcgcgctcgggctcgactggagcatcacgctcttctccctctccacgctccccaacacgctcgtcatgggcatcccgctgctgcgaggcatgtacggccgcgtcgtcggccggcacgctcatggtccaggtcgtcgtcctccagtgcatcatctggtacacgctcatgctcttcctcttcgagtaccgcgccgcgcgcgcgctcgtcctcgaccagttccccgacggcgccgccgcgtccatcgtctccttccgcgtcgactccgacgtcgtctcgctcgccaggggggacgtcgagctcgaggccgagcccgacggcgtcgccggcgccggcgccgtctcctcccgcggcggggacgccgggcgggtgcgcgtcaccgtgcgcaagtccaccagctcgcgctccgaggccgcgtgctcgcactcgcactcccagaccatgcagccccgtgtgtccaacctctccggcgtggagatctactcgctgcagtcgtcgcgcaaccccaccccgcgcgggtccagcttcaaccacgccgacttcttcaacatcgtcggcgccgccgccaagggaggcggaggagcggcgggggacgaggagaagggcgcatgcggcggcggcggcggaggacactcgccgcagccgcaggccgtcgccgtgccggccaagaggaaggacctgcacatgctcgtctggagctccagcgcctcgcccgtgtccgagcgcgccgccgtgcacgtcttcggcgccggcggcgctgaccatgccgacgtcctcgccaaaggagcccaggcctacgacgagtacgggcgcgacgactacagcagcaggacgaagaacgggagcggcggcgcggacaagggcgggccgacgctgtcgaagctggggtccaactcgacggcgcagctgtaccccaaggacgacggcaaggggagggcggcggcggtggcgatgccgccggcgagcgtgatgacgcggctcatcctcatcatggtgtggaggaagctgatccggaaccccaacacctactccagcctcatcggcgtcgtctggtccctggtctcctacaggtggggcatcgagatgccagcgatcatcgcccggtcgatttcgatcctgtcggacgcgggtctcgggatggccatgttcagcctaggcctgttcatggcgctgcagccgaggatcatcgcgtgcgggaacaagctggcggccatcgcgatgggcgtccggttcgtcgcaggccccgcggtcatggccgccgcctccatcgccgtcggtctgcgcggcgtcctcctccacatcgccatcgtccaggctgctctgcctcaggggatcgtgccgttcgtgttcgccaaggagtacggcgttcatcccgacatcctgagcacagccgtgatcttcgggatgctcatcgctctgcccatcaccctggtctactacatcttgctggggctgtgagcctctctcgctcgcttcttcagcgtgcggaaggcgccatgctgtggtgtatcggccccacatgaaatttctgatgagcattagcgattactattagcttaggtagggaaacgaaagatagctccgacgacagcgatctattcagtgattcagtgagtgaggcattgcgatctgtcaaacatgctgacctgcggtcgaagaatcgatatatatatatcttatcttgcttcatgctgtcttaagataaacattatatatcttgtttcctttggagaaatattagcaatttt

SEQ ID NO: 19562 - protein, 444 aa, Zea mays subsp. mays
  peptide (1)..(444): Ceres Seq. ID no. 12419733
  misc_feature (1)..(174): Pfam Name: Auxin Efflux Carrier Pfam Description: Auxin Efflux Carrier
  misc_feature (227)..(444): Homolog of NCBI NO: 21435938 NR Description: PIN1-like auxin transport protein
  misc_feature (1)..(153): Homolog of NCBI NO: 25986777 NR Description: auxin efflux carrier protein [Medicago truncatula]
  misc_feature (117)..(444): Homolog of NCBI NO: 25986777 NR Description: auxin efflux carrier protein [Medicago truncatula]
  misc_feature (1)..(174): Homolog of NCBI NO: 4151319 NR Description: putative auxin efflux carrier protein; AtPIN1
  misc_feature (128)..(444): Homolog of NCBI NO: 4151319 NR Description: putative auxin efflux carrier protein; AtPIN1
  misc_feature (1)..(174): Homolog of NCBI NO: 15219501 NR Description: auxin transporter splice variant b, putative
  misc_feature (128)..(444): Homolog of NCBI NO: 15219501 NR Description: auxin transporter splice variant b, putative
  misc_feature (1)..(444): Homolog of NCBI NO: 21435940 NR Description: PIN1-like auxin transport protein
  misc_feature (1)..(157): Homolog of NCBI NO: 25956262 NR Description: PIN1-like auxin transport protein [Cucumis
  misc_feature (110)..(444): Homolog of NCBI NO: 25956262 NR Description: PIN1-like auxin transport protein [Cucumis
MVQVVVLQCIIWYTLMLFLFEYRAARALVLDQFPDGAAASIVSFRVDSDVVSLARGDVELEAEPDGVAGAGAVSSRGGDAGRVRVTVRKSTSSRSEAACSHSHSQTMQPRVSNLSGVEIYSLQSSRNPTPRGSSFNHADFFNIVGAAAKGGGGAAGDEEKGACGGGGGGHSPQPQAVAVPAKRKDLHMLVWSSSASPVSERAAVHVFGAGGADHADVLAKGAQAYDEYGRDDYSSRTKNGSGGADKGGPTLSKLGSNSTAQLYPKDDGKGRAAAVAMPPASVMTRLILIMVWRKLIRNPNTYSSLIGVVWSLVSYRWGIEMPAIIARSISILSDAGLGMAMFSLGLFMALQPRIIACGNKLAAIAMGVRFVAGPAVMAAASIAVGLRGVLLHIAIVQAALPQGIVPFVFAKEYGVHPDILSTAVIFGMLIALPITLVYYILLGL

SEQ ID NO: 19563 - protein, 429 aa, Zea mays subsp. mays
  peptide (1)..(429): Ceres Seq. ID no. 12419734
  misc_feature (1)..(159): Pfam Name: Auxin Efflux Carrier Pfam Description: Auxin Efflux Carrier
  misc_feature (212)..(429): Homolog of NCBI NO: 21435938 NR Description: PIN1-like auxin transport protein
  misc_feature (1)..(138): Homolog of NCBI NO: 25986777 NR Description: auxin efflux carrier protein [Medicago truncatula]
  misc_feature (102)..(429): Homolog of NCBI NO: 25986777 NR Description: auxin efflux carrier protein [Medicago truncatula]
  misc_feature (1)..(159): Homolog of NCBI NO: 4151319 NR Description: putative auxin efflux carrier protein; AtPIN1
  misc_feature (113)..(429): Homolog of NCBI NO: 4151319 NR Description: putative auxin efflux carrier protein; AtPIN1
  misc_feature (1)..(159): Homolog of NCBI NO: 15219501 NR Description: auxin transporter splice variant b, putative
  misc_feature (113)..(429): Homolog of NCBI NO: 15219501 NR Description: auxin transporter splice variant b, putative
  misc_feature (1)..(429): Homolog of NCBI NO: 21435940 NR Description: PIN1-like auxin transport protein
  misc_feature (1)..(142): Homolog of NCBI NO: 25956262 NR Description: PIN1-like auxin transport protein [Cucumis
  misc_feature (95)..(429): Homolog of NCBI NO: 25956262 NR Description: PIN1-like auxin transport protein [Cucumis
MLFLFEYRAARALVLDQFPDGAAASIVSFRVDSDVVSLARGDVELEAEPDGVAGAGAVSSRGGDAGRVRVTVRKSTSSRSEAACSHSHSQTMQPRVSNLSGVEIYSLQSSRNPTPRGSSFNHADFFNIVGAAAKGGGGAAGDEEKGACGGGGGGHSPQPQAVAVPAKRKDLHMLVWSSSASPVSERAAVHVFGAGGADHADVLAKGAQAYDEYGRDDYSSRTKNGSGGADKGGPTLSKLGSNSTAQLYPKDDGKGRAAAVAMPPASVMTRLILIMVWRKLIRNPNTYSSLIGVVWSLVSYRWGIEMPAIIARSISILSDAGLGMAMFSLGLFMALQPRIIACGNKLAAIAMGVRFVAGPAVMAAASIAVGLRGVLLHIAIVQAALPQGIVPFVFAKEYGVHPDILSTAVIFGMLIALPITLVYYILLGL

SEQ ID NO: 19564 - protein, 383 aa, Zea mays subsp. mays
  peptide (1)..(383): Ceres Seq. ID no. 12419735
  misc_feature (44)..(168): Pfam Name: Auxin Efflux Carrier Pfam Description: Auxin Efflux Carrier
  misc_feature (36)..(168): Homolog of NCBI NO: 18379216 NR Description: putative auxin transport protein
  misc_feature (36)..(168): Homolog of NCBI NO: 25986771 NR Description: auxin efflux carrier protein [Medicago truncatula]
  misc_feature (36)..(168): Homolog of NCBI NO: 4322486 NR Description: root gravitropism control protein [Arabidopsis
  misc_feature (36)..(168): Homolog of NCBI NO: 18423936 NR Description: (NM_125091) auxin transport protein EIR1
  misc_feature (36)..(168): Homolog of NCBI NO: 21435938 NR Description: PIN1-like auxin transport protein
  misc_feature (36)..(168): Homolog of NCBI NO: 25986777 NR Description: auxin efflux carrier protein [Medicago truncatula]
  misc_feature (36)..(168): Homolog of NCBI NO: 4151319 NR Description: putative auxin efflux carrier protein; AtPIN1
  misc_feature (36)..(168): Homolog of NCBI NO: 15219501 NR Description: auxin transporter splice variant b, putative
  misc_feature (36)..(168): Homolog of NCBI NO: 21435940 NR Description: PIN1-like auxin transport protein
  misc_feature (36)..(168): Homolog of NCBI NO: 25956262 NR Description: PIN1-like auxin transport protein [Cucumis
ARDHYLEHPNQKNKLALLVADPSSLPASPDKPSAAMITALDLYHVLTAVVPLYVAMTLAYGSVRWWRIFTPDQCSGINRFVALFAVPLLSFHFISTNDPFAMNLRFLAADTLQKVAVLALLALASRGLSSPRALGLDWSITLFSLSTLPNTLVMGIPLLRGMYGRVVGRHAHGPGRRPPVHHLVHAHALPLRVPRRARARPRPVPRRRRRVHRLLPRRLRRRLARQGGRRARGRARRRRRRRRRLLPRRGRRAGARHRAQVHQLALRGRVLALALPDHAAPCVQPLRRGDLLAAVVAQPHPARVQLQPRRLLQHRRRRRQGRRRSGGGRGEGRMRRRRRRTLAAAAGRRRAGQEEGPAHARLELQRLARVRARRRARLRRRRR

SEQ ID NO: 19565 - DNA, 1239 bp, Zea mays subsp. mays
  misc_feature (1)..(1239): Ceres Seq. ID no. 12379487
  misc_feature: MA Experiment ID: 108504 Result: Down-regulated in Transcription
  misc_feature: MA Experiment 108504 PARAMETER Experiment Name: Zm_Drought_P Parameter: Age (day) Value: 8
  misc_feature: MA Experiment 108504 PARAMETER Experiment Name: Zm_Drought_P Parameter: Organism Value: Zea mays
  misc_feature: MA Experiment 108504 PARAMETER Experiment Name: Zm_Drought_P Parameter: Plant Line Value: 35A19
  misc_feature: MA Experiment 108504 PARAMETER Experiment Name: Zm_Drought_P Parameter: Timepoint (hr) Value: 12
  misc_feature: MA Experiment 108504 PARAMETER Experiment Name: Zm_Drought_P Parameter: Tissue Value: Aerial
  misc_feature: MA Experiment 108504 PARAMETER Experiment Name: Zm_Drought_P Parameter: Treatment Value: Drought vs. No Drought
  misc_feature: MA Experiment ID: 108527 Result: Down-regulated in Transcription
  misc_feature: MA Experiment 108527 PARAMETER Experiment Name: Zm_5mM_NO_P Parameter: Age (day) Value: 8
  misc_feature: MA Experiment 108527 PARAMETER Experiment Name: Zm_5mM_NO_P Parameter: Organism Value: Zea mays
  misc_feature: MA Experiment 108527 PARAMETER Experiment Name: Zm_5mM_NO_P Parameter: Plant Line Value: 35A19
  misc_feature: MA Experiment 108527 PARAMETER Experiment Name: Zm_5mM_NO_P Parameter: Timepoint (hr) Value: 6
  misc_feature: MA Experiment 108527 PARAMETER Experiment Name: Zm_5mM_NO_P Parameter: Tissue Value: Aerial
  misc_feature: MA Experiment 108527 PARAMETER Experiment Name: Zm_5mM_NO_P Parameter: Treatment Value: 5mM NO vs. No Treatment
  misc_feature: MA Experiment ID: 108529 Result: Down-regulated in Transcription
  misc_feature: MA Experiment 108529 PARAMETER Experiment Name: Zm_Imbibed_Seeds_P Parameter: Age (day) Value: 5 vs. 2
  misc_feature: MA Experiment 108529 PARAMETER Experiment Name: Zm_Imbibed_Seeds_P Parameter: Organism Value: Zea mays
  misc_feature: MA Experiment 108529 PARAMETER Experiment Name: Zm_Imbibed_Seeds_P Parameter: Plant Line Value: 35A19
  misc_feature: MA Experiment 108529 PARAMETER Experiment Name: Zm_Imbibed_Seeds_P Parameter: Tissue Value: Roots vs. Embryo
  misc_feature: MA Experiment ID: 108533 Result: Up-regulated in Transcription
  misc_feature: MA Experiment 108533 PARAMETER Experiment Name: Zm_4deg_Cold_P Parameter: Age (hr) Value: 8
  misc_feature: MA Experiment 108533 PARAMETER Experiment Name: Zm_4deg_Cold_P Parameter: Organism Value: Zea mays
  misc_feature: MA Experiment 108533 PARAMETER Experiment Name: Zm_4deg_Cold_P Parameter: Plant Line Value: 35A19
  misc_feature: MA Experiment 108533 PARAMETER Experiment Name: Zm_4deg_Cold_P Parameter: Temperature (deg C) Value: 4 vs. 22
  misc_feature: MA Experiment 108533 PARAMETER Experiment Name: Zm_4deg_Cold_P Parameter: Timepoint (hr) Value: 1
  misc_feature: MA Experiment 108533 PARAMETER Experiment Name: Zm_4deg_Cold_P Parameter: Tissue Value: Aerial
  misc_feature: MA Experiment ID: 108535 Result: Down-regulated in Transcription
  misc_feature: MA Experiment 108535 PARAMETER Experiment Name: Zm_Meristem_P Parameter: Age (day) Value: 8
  misc_feature: MA Experiment 108535 PARAMETER Experiment Name: Zm_Meristem_P Parameter: Organism Value: Zea mays
  misc_feature: MA Experiment 108535 PARAMETER Experiment Name: Zm_Meristem_P Parameter: Plant Line Value: 35A19
  misc_feature: MA Experiment 108535 PARAMETER Experiment Name: Zm_Meristem_P Parameter: Tissue Value: Root Meristem vs. Above Root Meristem
  misc_feature: MA Experiment ID: 108536 Result: Up-regulated in Transcription
  misc_feature: MA Experiment 108536 PARAMETER Experiment Name: Zm_Meristem_P Parameter: Age (day) Value: 8
  misc_feature: MA Experiment 108536 PARAMETER Experiment Name: Zm_Meristem_P Parameter: Organism Value: Zea mays
  misc_feature: MA Experiment 108536 PARAMETER Experiment Name: Zm_Meristem_P Parameter: Plant Line Value: 35A19
  misc_feature: MA Experiment 108536 PARAMETER Experiment Name: Zm_Meristem_P Parameter: Tissue Value: Shoot Meristem vs. Above Shoot Meristem
  misc_feature: MA Experiment ID: 108543 Result: Up-regulated in Transcription
  misc_feature: MA Experiment ID: 108544 Result: Up-regulated in Transcription
  misc_feature: MA Experiment ID: 108546 Result: Down-regulated in Transcription
  misc_feature: MA Experiment 108546 PARAMETER Experiment Name: Zm_Imbibed_Seeds_P Parameter: Age (day) Value: 3 vs. 2
  misc_feature: MA Experiment 108546 PARAMETER Experiment Name: Zm_Imbibed_Seeds_P Parameter: Organism Value: Zea mays
  misc_feature: MA Experiment 108546 PARAMETER Experiment Name: Zm_Imbibed_Seeds_P Parameter: Plant Line Value: 35A19
  misc_feature: MA Experiment 108546 PARAMETER Experiment Name: Zm_Imbibed_Seeds_P Parameter: Tissue Value: Roots vs. Embryo
  misc_feature: MA Experiment ID: 108556 Result: Down-regulated in Transcription
  misc_feature: MA Experiment 108556 PARAMETER Experiment Name: Zm_Drought_P Parameter: Age (day) Value: 9
  misc_feature: MA Experiment 108556 PARAMETER Experiment Name: Zm_Drought_P Parameter: Organism Value: Zea mays
  misc_feature: MA Experiment 108556 PARAMETER Experiment Name: Zm_Drought_P Parameter: Plant Line Value: 35A19
  misc_feature: MA Experiment 108556 PARAMETER Experiment Name: Zm_Drought_P Parameter: Timepoint (hr) Value: 24
  misc_feature: MA Experiment 108556 PARAMETER Experiment Name: Zm_Drought_P Parameter: Tissue Value: Aerial
  misc_feature: MA Experiment 108556 PARAMETER Experiment Name: Zm_Drought_P Parameter: Treatment Value: Drought vs. No Drought
  misc_feature: MA Experiment ID: 108559 Result: Down-regulated in Transcription
  misc_feature: MA Experiment 108559 PARAMETER Experiment Name: Zm_5mM_NO_P Parameter: Age (day) Value: 8
  misc_feature: MA Experiment 108559 PARAMETER Experiment Name: Zm_5mM_NO_P Parameter: Organism Value: Zea mays
  misc_feature: MA Experiment 108559 PARAMETER Experiment Name: Zm_5mM_NO_P Parameter: Plant Line Value: 35A19
  misc_feature: MA Experiment 108559 PARAMETER Experiment Name: Zm_5mM_NO_P Parameter: Timepoint (hr) Value: 12
  misc_feature: MA Experiment 108559 PARAMETER Experiment Name: Zm_5mM_NO_P Parameter: Tissue Value: Aerial
  misc_feature: MA Experiment 108559 PARAMETER Experiment Name: Zm_5mM_NO_P Parameter: Treatment Value: 5mM NO vs. No Treatment
  misc_feature: MA Experiment ID: 108597 Result: Down-regulated in Transcription
  misc_feature: MA Experiment 108597 PARAMETER Experiment Name: Zm_100uM_ABA_P Parameter: Age (day) Value: 9
  misc_feature: MA Experiment 108597 PARAMETER Experiment Name: Zm_100uM_ABA_P Parameter: Organism Value: Zea mays
  misc_feature: MA Experiment 108597 PARAMETER Experiment Name: Zm_100uM_ABA_P Parameter: Plant Line Value: 35A19
  misc_feature: MA Experiment 108597 PARAMETER Experiment Name: Zm_100uM_ABA_P Parameter: Timepoint (hr) Value: 24
  misc_feature: MA Experiment 108597 PARAMETER Experiment Name: Zm_100uM_ABA_P Parameter: Tissue Value: Aerial
  misc_feature: MA Experiment 108597 PARAMETER Experiment Name: Zm_100uM_ABA_P Parameter: Treatment Value: 100uM ABA vs. No Treatment
  misc_feature: MA Experiment ID: 20000478 Result: Down-regulated in Transcription
  misc_feature: MA Experiment 20000478 PARAMETER Experiment Name: Zm_5mM_SA_P Parameter: Age (day) Value: 11
  misc_feature: MA Experiment 20000478 PARAMETER Experiment Name: Zm_5mM_SA_P Parameter: Organism Value: Zea mays
  misc_feature: MA Experiment 20000478 PARAMETER Experiment Name: Zm_5mM_SA_P Parameter: Plant Line Value: 35A19
  misc_feature: MA Experiment 20000478 PARAMETER Experiment Name: Zm_5mM_SA_P Parameter: Timepoint (hr) Value: 72
  misc_feature: MA Experiment 20000478 PARAMETER Experiment Name: Zm_5mM_SA_P Parameter: Tissue Value: Aerial
  misc_feature: MA Experiment 20000478 PARAMETER Experiment Name: Zm_5mM_SA_P Parameter: Treatment Value: 5mM SA vs. No Treatment
  misc_feature: MA Experiment ID: 20000480 Result: Down-regulated in Transcription
  misc_feature: MA Experiment 20000480 PARAMETER Experiment Name: Zm_Drought_P Parameter: Age (day) Value: 11
  misc_feature: MA Experiment 20000480 PARAMETER Experiment Name: Zm_Drought_P Parameter: Organism Value: Zea mays
  misc_feature: MA Experiment 20000480 PARAMETER Experiment Name: Zm_Drought_P Parameter: Plant Line Value: 35A19
  misc_feature: MA Experiment 20000480 PARAMETER Experiment Name: Zm_Drought_P Parameter: Timepoint (hr) Value: 72
  misc_feature: MA Experiment 20000480 PARAMETER Experiment Name: Zm_Drought_P Parameter: Tissue Value: Aerial
  misc_feature: MA Experiment 20000480 PARAMETER Experiment Name: Zm_Drought_P Parameter: Treatment Value: Drought vs. No Drought
  misc_feature: MA Experiment ID: 20000626 Result: Down-regulated in Transcription
  misc_feature: MA Experiment 20000626 PARAMETER Experiment Name: Zm_Herbicide-Treatments_P Parameter: Timepoint (hr) Value: 12
  misc_feature: MA Experiment 20000626 PARAMETER Experiment Name: Zm_Herbicide-Treatments_P Parameter: Tissue Value: Aerial
  misc_feature: MA Experiment 20000626 PARAMETER Experiment Name: Zm_Herbicide-Treatments_P Parameter: Treatment Value: Roundup vs. No Treatment
gcacgagaccattacctagaacatcctaatcgaaaaactcacggtcggaatgagcgttcaccgtcacaatcactgaatcacacaagcacgaccacgcacacgcggtaaacacgcgcgcgctcaaacagttcgaaatggcgctcgccgccgccatcatcgtcgtcttcctgcttcctggccttctcctcacggcgatggcggccacgccgtaccctcacggccgcggcgccgacgctctcgtgggcgcgtccaagaagtacgagggcagctccaacctggtggacctccgctaccacatgtccccgtcctctccgccgcgccgctccgcctctacgtgctctggtacggccgatgggaccccgcgcaccaggtccccgtccgcgacttcctcctctccctctccgacacgtccctgccgcgcccctccgtcgccgactggtgggccaccgccgcgctctacgccgaccagaccctcgccaacgtcacctgccgcgtcgacctggccggggaagccgccgacgagtcggcctcgctgggccgctcgctctcccggctcgacatccagcgcgtgctcgcctctgcggtcgccgcgggccggctccctgccgncacccgcggcggcgcctaccttgttctcacggcgcccggcgtcggcgtccaggacttctgccgcgccgtatgcggcttccactacttcaccttcccgtcgctcgtgggccacacgctgccctacgcgtgggtcgggcacagcggcggccgctgcgccgacgtctgcgcgtacccgttcgcgctgtcgtcgtacatggcccggagcggcatggcggcgctgcggccgcccaacggcgacgcgggcgtcgacggcatggtcagcgtcatcgcgcacgagctggccgagctcgccacgaacccgctcgtcaacgcgtggtacgccggggaggaccccacggcgcccaccgagatcgccgacctgtgcgagggggtgtacggtacgggcggcggcggcgggtacgccgggaaggtgtcggtggacgcgcaggggaggagctggaatgtgaatgggaggaaggggaggaaattcttggtgcagtggctgtggagcccagaggctaaggcgtgcgtggggcccaatgccagtgactaggcttattggccactgctagcatgtaactaccatgtagtagtagtttattattctcagctttactttatattatattatatataaaaaactattatatg

SEQ ID NO: 19566 - protein, 306 aa, Zea mays subsp. mays
  peptide (1)..(306): Ceres Seq. ID no. 12379488
  misc_feature (11)..(262): Pfam Name: Equine herpesvirus glycoprotein gp2 Pfam Description: Equine herpesvirus glycoprotein gp2
  misc_feature (56)..(295): Homolog of NCBI NO: 11360318 NR Description: probable mucin DKFZp434C196.1 - human (fragment)
  misc_feature (56)..(299): Homolog of NCBI NO: 11360318 NR Description: probable mucin DKFZp434C196.1 - human (fragment)
  misc_feature (6)..(60): Homolog of NCBI NO: 25408357 NR Description: hypothetical protein At2g35150 [imported] -
  misc_feature (6)..(60): Homolog of NCBI NO: 18403760 NR Description: Expressed protein
  misc_feature (3)..(57): Homolog of NCBI NO: 21592873 NR Description: unknown [Arabidopsis thaliana]
  misc_feature (3)..(57): Homolog of NCBI NO: 15242118 NR Description: putative protein
  misc_feature (3)..(57): Homolog of NCBI NO: 16604527 NR Description: AT5g51550/K17N15_10 [Arabidopsis thaliana]
  misc_feature (38)..(61): Homolog of NCBI NO: 21594010 NR Description: unknown [Arabidopsis thaliana]
  misc_feature (38)..(61): Homolog of NCBI NO: 18398352 NR Description: expressed protein
  misc_feature (159)..(159): Xaa is any aa, unknown or other
MALAAAIIVVFLLPGLLLTAMAATPYPHGRGADALVGASKKYEGSSNLVDLRYHMSPSSPPRRSASTCSGTADGTPRTRSPSATSSSPSPTRPCRAPPSPTGGPPPRSTPTRPSPTSPAASTWPGKPPTSRPRWAARSPGSTSSACSPLRSPRAGSLPXPAAAPTLFSRRPASASRTSAAPYAASTTSPSRRSWATRCPTRGSGTAAAAAPTSARTRSRCRRTWPGAAWRRCGRPTATRASTAWSASSRTSWPSSPRTRSSTRGTPGRTPRRPPRSPTCARGCTVRAAAAGTPGRCRWTRRGGAGM

SEQ ID NO: 19567 - protein, 286 aa, Zea mays subsp. mays
  peptide (1)..(286): Ceres Seq. ID no. 12379489
  misc_feature (1)..(242): Pfam Name: Equine herpesvirus glycoprotein gp2 Pfam Description: Equine herpesvirus glycoprotein gp2
  misc_feature (1)..(37): Homolog of NCBI NO: 16604527 NR Description: AT5g51550/K17N15_10 [Arabidopsis thaliana]
  misc_feature (18)..(41): Homolog of NCBI NO: 21594010 NR Description: unknown [Arabidopsis thaliana]
  misc_feature (36)..(279): Homolog of NCBI NO: 11360318 NR Description: probable mucin DKFZp434C196.1 - human (fragment)
  misc_feature (1)..(40): Homolog of NCBI NO: 18403760 NR Description: Expressed protein
  misc_feature (1)..(37): Homolog of NCBI NO: 15242118 NR Description: putative protein
  misc_feature (1)..(37): Homolog of NCBI NO: 21592873 NR Description: unknown [Arabidopsis thaliana]
  misc_feature (1)..(40): Homolog of NCBI NO: 25408357 NR Description: hypothetical protein At2g35150 [imported] -
  misc_feature (36)..(275): Homolog of NCBI NO: 11360318 NR Description: probable mucin DKFZp434C196.1 - human (fragment)
  misc_feature (18)..(41): Homolog of NCBI NO: 18398352 NR Description: expressed protein
  misc_feature (139)..(139): Xaa is any aa, unknown or other
MAATPYPHGRGADALVGASKKYEGSSNLVDLRYHMSPSSPPRRSASTCSGTADGTPRTRSPSATSSSPSPTRPCRAPPSPTGGPPPRSTPTRPSPTSPAASTWPGKPPTSRPRWAARSPGSTSSACSPLRSPRAGSLPXPAAAPTLFSRRPASASRTSAAPYAASTTSPSRRSWATRCPTRGSGTAAAAAPTSARTRSRCRRTWPGAAWRRCGRPTATRASTAWSASSRTSWPSSPRTRSSTRGTPGRTPRRPPRSPTCARGCTVRAAAAGTPGRCRWTRRGGAGM

SEQ ID NO: 19568 - protein, 252 aa, Zea mays subsp. mays
  peptide (1)..(252): Ceres Seq. ID no. 12379490
  misc_feature (1)..(208): Pfam Name: Equine herpesvirus glycoprotein gp2 Pfam Description: Equine herpesvirus glycoprotein gp2
  misc_feature (2)..(241): Homolog of NCBI NO: 11360318 NR Description: probable mucin DKFZp434C196.1 - human (fragment)
  misc_feature (2)..(245): Homolog of NCBI NO: 11360318 NR Description: probable mucin DKFZp434C196.1 - human (fragment)
  misc_feature (105)..(105): Xaa is any aa, unknown or other
MSPSSPPRRSASTCSGTADGTPRTRSPSATSSSPSPTRPCRAPPSPTGGPPPRSTPTRPSPTSPAASTWPGKPPTSRPRWAARSPGSTSSACSPLRSPRAGSLPXPAAAPTLFSRRPASASRTSAAPYAASTTSPSRRSWATRCPTRGSGTAAAAAPTSARTRSRCRRTWPGAAWRRCGRPTATRASTAWSASSRTSWPSSPRTRSSTRGTPGRTPRRPPRSPTCARGCTVRAAAAGTPGRCRWTRRGGAGM

SEQ ID NO: 19569 - DNA, 1821 bp, Zea mays subsp. mays; identical to SEQ ID NO: 17449
  misc_feature (1)..(1821): Ceres Seq. ID no. 12375293
  misc_feature: MA Experiment ID: 20000534 Result: Down-regulated in Transcription
  misc_feature: MA Experiment 20000534 PARAMETER Experiment Name: Zm_Hybrid_Pollen_P Parameter: Age (day) Value: 8
  misc_feature: MA Experiment 20000534 PARAMETER Experiment Name: Zm_Hybrid_Pollen_P Parameter: Organism Value: Zea mays
  misc_feature: MA Experiment 20000534 PARAMETER Experiment Name: Zm_Hybrid_Pollen_P Parameter: Plant Line Value: 35A19
  misc_feature: MA Experiment 20000534 PARAMETER Experiment Name: Zm_Hybrid_Pollen_P Parameter: Tissue Value: Pollen vs. Aerial

SEQ ID NO: 19570 - protein, 315 aa, Zea mays subsp. mays; identical to SEQ ID NO: 17450
  peptide (1)..(315): Ceres Seq. ID no. 12375294
  misc_feature (5)..(296): Pfam Name: Mlo family Pfam Description: Mlo family
  misc_feature (5)..(296): Pfam Name: Mlo family Pfam Description: Mlo family
  misc_feature (121)..(301): Homolog of NCBI NO: 13784985 NR Description: seven transmembrane protein Mlo6 [Zea mays]
  misc_feature (1)..(299): Homolog of NCBI NO: 13784977 NR Description: seven transmembrane protein Mlo2 [Zea mays]
  misc_feature (84)..(296): Homolog of NCBI NO: 7487333 NR Description: hypothetical protein T22A6.80 - Arabidopsis
  misc_feature (5)..(296): Homolog of NCBI NO: 13784987 NR Description: seven transmembrane protein Mlo7 [Zea mays]
  misc_feature (6)..(296): Homolog of NCBI NO: 13784979 NR Description: seven transmembrane protein Mlo3 [Zea mays]
  misc_feature (3)..(296): Homolog of NCBI NO: 18416311 NR Description: Mlo-like protein
  misc_feature (5)..(299): Homolog of NCBI NO: 15224823 NR Description: similar to Mlo proteins from H. vulgare
  misc_feature (1)..(296): Homolog of NCBI NO: 15235429 NR Description: AtMlo-h1-like protein
  misc_feature (1)..(296): Homolog of NCBI NO: 34907492 NR Description: putative seven transmembrane protein
  misc_feature (1)..(296): Homolog of NCBI NO: 13784989 NR Description: seven transmembrane protein Mlo8 [Zea mays]
  misc_feature (121)..(301): Homolog of NCBI NO: 13784985 NR Description: seven transmembrane protein Mlo6 [Zea mays]
  misc_feature (1)..(299): Homolog of NCBI NO: 13784977 NR Description: seven transmembrane protein Mlo2 [Zea mays]
  misc_feature (84)..(296): Homolog of NCBI NO: 7487333 NR Description: hypothetical protein T22A6.80 - Arabidopsis
  misc_feature (5)..(296): Homolog of NCBI NO: 13784987 NR Description: seven transmembrane protein Mlo7 [Zea mays]
  misc_feature (6)..(296): Homolog of NCBI NO: 13784979 NR Description: seven transmembrane protein Mlo3 [Zea mays]
  misc_feature (3)..(296): Homolog of NCBI NO: 18416311 NR Description: Mlo-like protein
  misc_feature (5)..(299): Homolog of NCBI NO: 15224823 NR Description: similar to Mlo proteins from H. vulgare
  misc_feature (1)..(296): Homolog of NCBI NO: 15235429 NR Description: AtMlo-h1-like protein
  misc_feature (1)..(296): Homolog of NCBI NO: 34907492 NR Description: putative seven transmembrane protein
  misc_feature (1)..(296): Homolog of NCBI NO: 13784989 NR Description: seven transmembrane protein Mlo8 [Zea mays]

SEQ ID NO: 19571 - protein, 253 aa, Zea mays subsp. mays; identical to SEQ ID NO: 17451
  peptide (1)..(253): Ceres Seq. ID no. 12375295
  misc_feature (1)..(234): Pfam Name: Mlo family Pfam Description: Mlo family
  misc_feature (1)..(234): Pfam Name: Mlo family Pfam Description: Mlo family
  misc_feature (59)..(239): Homolog of NCBI NO: 13784985 NR Description: seven transmembrane protein Mlo6 [Zea mays]
  misc_feature (1)..(237): Homolog of NCBI NO: 13784977 NR Description: seven transmembrane protein Mlo2 [Zea mays]
  misc_feature (22)..(234): Homolog of NCBI NO: 7487333 NR Description: hypothetical protein T22A6.80 - Arabidopsis
  misc_feature (1)..(234): Homolog of NCBI NO: 13784987 NR Description: seven transmembrane protein Mlo7 [Zea mays]
  misc_feature (1)..(234): Homolog of NCBI NO: 13784979 NR Description: seven transmembrane protein Mlo3 [Zea mays]
  misc_feature (59)..(239): Homolog of NCBI NO: 13784985 NR Description: seven transmembrane protein Mlo6 [Zea mays]
  misc_feature (22)..(234): Homolog of NCBI NO: 7487333 NR Description: hypothetical protein T22A6.80 - Arabidopsis
  misc_feature (1)..(234): Homolog of NCBI NO: 13784979 NR Description: seven transmembrane protein Mlo3 [Zea mays]
  misc_feature (1)..(234): Homolog of NCBI NO: 13784989 NR Description: seven transmembrane protein Mlo8 [Zea mays]
  misc_feature (1)..(234): Homolog of NCBI NO: 34907492 NR Description: putative seven transmembrane protein
  misc_feature (1)..(234): Homolog of NCBI NO: 15235429 NR Description: AtMlo-h1-like protein
  misc_feature (1)..(237): Homolog of NCBI NO: 15224823 NR Description: similar to Mlo proteins from H. vulgare
  misc_feature (1)..(234): Homolog of NCBI NO: 18416311 NR Description: Mlo-like protein
  misc_feature (1)..(234): Homolog of NCBI NO: 13784987 NR Description: seven transmembrane protein Mlo7 [Zea mays]
  misc_feature (1)..(237): Homolog of NCBI NO: 13784977 NR Description: seven transmembrane protein Mlo2 [Zea mays]
  misc_feature (1)..(234): Homolog of NCBI NO: 18416311 NR Description: Mlo-like protein
  misc_feature (1)..(237): Homolog of NCBI NO: 15224823 NR Description: similar to Mlo proteins from H. vulgare
  misc_feature (1)..(234): Homolog of NCBI NO: 15235429 NR Description: AtMlo-h1-like protein
  misc_feature (1)..(234): Homolog of NCBI NO: 34907492 NR Description: putative seven transmembrane protein
  misc_feature (1)..(234): Homolog of NCBI NO: 13784989 NR Description: seven transmembrane protein Mlo8 [Zea mays]

SEQ ID NO: 19572 - protein, 238 aa, Zea mays subsp. mays; identical to SEQ ID NO: 17452
  peptide (1)..(238): Ceres Seq. ID no. 12375296
  misc_feature (1)..(219): Pfam Name: Mlo family Pfam Description: Mlo family
  misc_feature (1)..(219): Pfam Name: Mlo family Pfam Description: Mlo family
  misc_feature (44)..(224): Homolog of NCBI NO: 13784985 NR Description: seven transmembrane protein Mlo6 [Zea mays]
  misc_feature (1)..(222): Homolog of NCBI NO: 13784977 NR Description: seven transmembrane protein Mlo2 [Zea mays]
  misc_feature (7)..(219): Homolog of NCBI NO: 7487333 NR Description: hypothetical protein T22A6.80 - Arabidopsis
  misc_feature (1)..(219): Homolog of NCBI NO: 13784987 NR Description: seven transmembrane protein Mlo7 [Zea mays]
  misc_feature (1)..(219): Homolog of NCBI NO: 13784979 NR Description: seven transmembrane protein Mlo3 [Zea mays]
  misc_feature (44)..(224): Homolog of NCBI NO: 13784985 NR Description: seven transmembrane protein Mlo6 [Zea mays]
  misc_feature (7)..(219): Homolog of NCBI NO: 7487333 NR Description: hypothetical protein T22A6.80 - Arabidopsis
  misc_feature (1)..(219): Homolog of NCBI NO: 13784979 NR Description: seven transmembrane protein Mlo3 [Zea mays]
  misc_feature (1)..(219): Homolog of NCBI NO: 13784989 NR Description: seven transmembrane protein Mlo8 [Zea mays]
  misc_feature (1)..(219): Homolog of NCBI NO: 34907492 NR Description: putative seven transmembrane protein
  misc_feature (1)..(219): Homolog of NCBI NO: 15235429 NR Description: AtMlo-h1-like protein
  misc_feature (1)..(222): Homolog of NCBI NO: 15224823 NR Description: similar to Mlo proteins from H. vulgare
  misc_feature (1)..(219): Homolog of NCBI NO: 18416311 NR Description: Mlo-like protein
  misc_feature (1)..(219): Homolog of NCBI NO: 13784987 NR Description: seven transmembrane protein Mlo7 [Zea mays]
  misc_feature (1)..(222): Homolog of NCBI NO: 13784977 NR Description: seven transmembrane protein Mlo2 [Zea mays]
  misc_feature (1)..(219): Homolog of NCBI NO: 18416311 NR Description: Mlo-like protein
  misc_feature (1)..(222): Homolog of NCBI NO: 15224823 NR Description: similar to Mlo proteins from H. vulgare
  misc_feature (1)..(219): Homolog of NCBI NO: 15235429 NR Description: AtMlo-h1-like protein
  misc_feature (1)..(219): Homolog of NCBI NO: 34907492 NR Description: putative seven transmembrane protein
  misc_feature (1)..(219): Homolog of NCBI NO: 13784989 NR Description: seven transmembrane protein Mlo8 [Zea mays]

SEQ ID NO: 19573 - DNA, 1486 bp, Zea mays subsp. mays
  misc_feature (1)..(1486): Ceres Seq. ID no. 12435516
  misc_feature: MA Experiment ID: 108536 Result: Up-regulated in Transcription
  misc_feature: MA Experiment 108536 PARAMETER Experiment Name: Zm_Meristem_P Parameter: Age (day) Value: 8
  misc_feature: MA Experiment 108536 PARAMETER Experiment Name: Zm_Meristem_P Parameter: Organism Value: Zea mays
  misc_feature: MA Experiment 108536 PARAMETER Experiment Name: Zm_Meristem_P Parameter: Plant Line Value: 35A19
  misc_feature: MA Experiment 108536 PARAMETER Experiment Name: Zm_Meristem_P Parameter: Tissue Value: Shoot Meristem vs. Above Shoot Meristem
aaacaaaaccctcctcgtcatccgcggccgcttttcccctgacccctgtctcgaccaatcctccctcccacacacatcacacccacaagacaaaaaaaaaaagcgcctttgagcgccgcgcgatctctggtgcttggtgtcgtcgcgacaccagcgttagtttctgtttcagcgcgcacgcgcgtttgtgctgtgggggttgggaagagccgaagagcgaggcggcagcgcgatcgagcggttcggcgggcggcggccgatccgatgggaagggcaccctgctgcgacaagaacaagggcctcaagaaagggccctggacgccggaggaggacaagctcctcgtcgactacatccagaccaacggccatggcagctggcgcctgctccccaagctcgcagggctgaaccggtgcggcaagagctgccgactgcggtggaccaactacctccggccggacatcaagcgcgggcccttcacagccgaggaggagaagtccatcgtccagctccacgccatcgtcggcaacaagtggtccatgatcgcggcacagctcccaggccggacggacaacgagatcaagaactactggaacacgcacctcaagaagcagctgcgtcggatgggcctcgacgagcccccgcccggcccggccgccggctgccccgccgcgcgccacatggcgcagtgggagacggccaggctcgaggccgaggcgcgcctctccctcctcgccgccaccgccgcctcctccggtaccactgcgaccaccaccaccaccacgtctgcagcctcctcgtcctccaccaccgtcgctggcgcggccgacaacaaggcctccaaccccgcggacatcttcctgcgcctgtggagctcggacatcggggactccttccgccgcaagacggacacgccggcggtgcccgcgcttcccggcgcccgtcgtcaagaggaaggacacggcgatcaagcaggagccgcgggcgctgctgctcggcctcggggacgactcctcggcggcgtccaacgacaacgagacggaggtggcggaggcgctggaggcggagtaccagatgttcctcgacttcgcgggcgaagagctgggactattccatggccggcacggcggcttctcgctgttcccgccgctcgacgtgctcgctgaggcgtccctggactcggctttcaagtgaagacgtagccagcaccacgtacgtacacggtactcatacgtacggcaagcggcagtggccaactggccatgcctctacggcttagctatacgcctcgaaatgcgcgcatggatgtatatagatatgcgtgtgactgcactggcatatcggcaattttttgggttaggccagcaagtgcgtggtttagcttgttattatgcagggttggttttggtaggacatcatggtgtatgggggattctctgttcattggagatgctctaatacatcacgagatgttcttcaatcttcggc

SEQ ID NO: 19574 - protein, 424 aa, Zea mays subsp. mays
  peptide (1)..(424): Ceres Seq. ID no. 12435517
  misc_feature (123)..(235): Homolog of NCBI NO: 7489500 NR Description: myb7 protein homolog - rice (fragment)
TKPSSSSAAAFPLTPVSTNPPSHTHHTHKTKKKSAFERRAISGAWCRRDTSVSFCFSAHARLCCGGWEEPKSEAAARSSGSAGGGRSDGKGTLLRQEQGPQERALDAGGGQAPRRLHPDQRPWQLAPAPQARRAEPVRQELPTAVDQLPPAGHQARALHSRGGEVHRPAPRHRRQQVVHDRGTAPRPDGQRDQELLEHAPQEAAASDGPRRAPARPGRRLPRRAPHGAVGDGQARGRGAPLPPRRHRRLLRYHCDHHHHHVCSLLVLHHRRWRGRQQGLQPRGHLPAPVELGHRGLLPPQDGHAGGARASRRPSSRGRTRRSSRSRGRCCSASGTTPRRRPTTTRRRWRRRWRRSTRCSSTSRAKSWDYSMAGTAASRCSRRSTCSLRRPWTRLSSEDVASTTYVHGTHTYGKRQWPTGHASTA

SEQ ID NO: 19575 - protein, 299 aa, Zea mays subsp. mays
  peptide (1)..(299): Ceres Seq. ID no. 12435518
  misc_feature (15)..(62): Pfam Name: Myb-like DNA-binding domain Pfam Description: Myb-like DNA-binding domain
  misc_feature (1)..(153): Homolog of NCBI NO: 4886264 NR Description: Myb-related transcription factor mixta-like 1
  misc_feature (1)..(180): Homolog of NCBI NO: 27125807 NR Description: MYB27 protein [Oryza sativa (japonica
  misc_feature (1)..(153): Homolog of NCBI NO: 282964 NR Description: myb-related protein 1 - garden petunia
  misc_feature (1)..(154): Homolog of NCBI NO: 15232045 NR Description: myb family transcription factor
  misc_feature (1)..(112): Homolog of NCBI NO: 1262382 NR Description: myb7 [Oryza sativa (japonica cultivar-group)]
  misc_feature (1)..(174): Homolog of NCBI NO: 28628947 NR Description: MYB1 [Dendrobium sp. XMW-2002-1]
  misc_feature (1)..(45): Homolog of NCBI NO: 7489500 NR Description: myb7 protein homolog - rice (fragment)
  misc_feature (1)..(211): Homolog of NCBI NO: 15233066 NR Description: myb DNA-binding protein (MYB17); protein id:
  misc_feature (1)..(156): Homolog of NCBI NO: 19072736 NR Description: typical P-type R2R3 Myb protein [Zea mays]
  misc_feature (1)..(198): Homolog of NCBI NO: 19548457 NR Description: P-type R2R3 Myb protein [Zea mays]
MGRAPCCDKNKGLKKGPWTPEEDKLLVDYIQTNGHGSWRLLPKLAGLNRCGKSCRLRWTNYLRPDIKRGPFTAEEEKSIVQLHAIVGNKWSMIAAQLPGRTDNEIKNYWNTHLKKQLRRMGLDEPPPGPAAGCPAARHMAQWETARLEAEARLSLLAATAASSGTTATTTTTTSAASSSSTTVAGAADNKASNPADIFLRLWSSDIGDSFRRKTDTPAVPALPGARRQEEGHGDQAGAAGAAARPRGRLLGGVQRQRDGGGGGAGGGVPDVPRLRGRRAGTIPWPARRLLAVPAARRAR

SEQ ID NO: 19576 - DNA, 1209 bp, Zea mays subsp. mays
  misc_feature (1)..(1209): Ceres Seq. ID no. 12368228
  misc_feature: MA Experiment ID: 108522 Result: Down-regulated in Transcription
  misc_feature: MA Experiment 108522 PARAMETER Experiment Name: Zm_42deg_Heat_P Parameter: Age (day) Value: 8
  misc_feature: MA Experiment 108522 PARAMETER Experiment Name: Zm_42deg_Heat_P Parameter: Organism Value: Zea mays
  misc_feature: MA Experiment 108522 PARAMETER Experiment Name: Zm_42deg_Heat_P Parameter: Plant Line Value: 35A19
  misc_feature: MA Experiment 108522 PARAMETER Experiment Name: Zm_42deg_Heat_P Parameter: Temperature (deg C) Value: 42 vs. 22
  misc_feature: MA Experiment 108522 PARAMETER Experiment Name: Zm_42deg_Heat_P Parameter: Timepoint (hr) Value: 1
  misc_feature: MA Experiment 108522 PARAMETER Experiment Name: Zm_42deg_Heat_P Parameter: Tissue Value: Aerial
  misc_feature: MA Experiment ID: 108528 Result: Down-regulated in Transcription
  misc_feature: MA Experiment 108528 PARAMETER Experiment Name: Zm_Imbibed_Seeds_P Parameter: Age (day) Value: 5 vs. 2
  misc_feature: MA Experiment 108528 PARAMETER Experiment Name: Zm_Imbibed_Seeds_P Parameter: Organism Value: Zea mays
  misc_feature: MA Experiment 108528 PARAMETER Experiment Name: Zm_Imbibed_Seeds_P Parameter: Plant Line Value: 35A19
  misc_feature: MA Experiment 108528 PARAMETER Experiment Name: Zm_Imbibed_Seeds_P Parameter: Tissue Value: Aerial vs. Embryo
  misc_feature: MA Experiment ID: 108529 Result: Up-regulated in Transcription
  misc_feature: MA Experiment 108529 PARAMETER Experiment Name: Zm_Imbibed_Seeds_P Parameter: Age (day) Value: 5 vs. 2
  misc_feature: MA Experiment 108529 PARAMETER Experiment Name: Zm_Imbibed_Seeds_P Parameter: Organism Value: Zea mays
  misc_feature: MA Experiment 108529 PARAMETER Experiment Name: Zm_Imbibed_Seeds_P Parameter: Plant Line Value: 35A19
  misc_feature: MA Experiment 108529 PARAMETER Experiment Name: Zm_Imbibed_Seeds_P Parameter: Tissue Value: Roots vs. Embryo
  misc_feature: MA Experiment ID: 108535 Result: Down-regulated in Transcription
  misc_feature: MA Experiment 108535 PARAMETER Experiment Name: Zm_Meristem_P Parameter: Age (day) Value: 8
  misc_feature: MA Experiment 108535 PARAMETER Experiment Name: Zm_Meristem_P Parameter: Organism Value: Zea mays
  misc_feature: MA Experiment 108535 PARAMETER Experiment Name: Zm_Meristem_P Parameter: Plant Line Value: 35A19
  misc_feature: MA Experiment 108535 PARAMETER Experiment Name: Zm_Meristem_P Parameter: Tissue Value: Root Meristem vs. Above Root Meristem
  misc_feature: MA Experiment ID: 108543 Result: Up-regulated in Transcription
  misc_feature: MA Experiment ID: 108545 Result: Down-regulated in Transcription
  misc_feature: MA Experiment 108545 PARAMETER Experiment Name: Zm_Imbibed_Seeds_P Parameter: Age (day) Value: 3 vs. 2
  misc_feature: MA Experiment 108545 PARAMETER Experiment Name: Zm_Imbibed_Seeds_P Parameter: Organism Value: Zea mays
  misc_feature: MA Experiment 108545 PARAMETER Experiment Name: Zm_Imbibed_Seeds_P Parameter: Plant Line Value: 35A19
  misc_feature: MA Experiment 108545 PARAMETER Experiment Name: Zm_Imbibed_Seeds_P Parameter: Tissue Value: Aerial vs. Embryo
  misc_feature: MA Experiment ID: 108546 Result: Up-regulated in Transcription
  misc_feature: MA Experiment 108546 PARAMETER Experiment Name: Zm_Imbibed_Seeds_P Parameter: Age (day) Value: 3 vs. 2
  misc_feature: MA Experiment 108546 PARAMETER Experiment Name: Zm_Imbibed_Seeds_P Parameter: Organism Value: Zea mays
  misc_feature: MA Experiment 108546 PARAMETER Experiment Name: Zm_Imbibed_Seeds_P Parameter: Plant Line Value: 35A19
  misc_feature: MA Experiment 108546 PARAMETER Experiment Name: Zm_Imbibed_Seeds_P Parameter: Tissue Value: Roots vs. Embryo
  misc_feature: MA Experiment ID: 108556 Result: Down-regulated in Transcription
  misc_feature: MA Experiment 108556 PARAMETER Experiment Name: Zm_Drought_P Parameter: Age (day) Value: 9
  misc_feature: MA Experiment 108556 PARAMETER Experiment Name: Zm_Drought_P Parameter: Organism Value: Zea mays
  misc_feature: MA Experiment 108556 PARAMETER Experiment Name: Zm_Drought_P Parameter: Plant Line Value: 35A19
  misc_feature: MA Experiment 108556 PARAMETER Experiment Name: Zm_Drought_P Parameter: Timepoint (hr) Value: 24
  misc_feature: MA Experiment 108556 PARAMETER Experiment Name: Zm_Drought_P Parameter: Tissue Value: Aerial
  misc_feature: MA Experiment 108556 PARAMETER Experiment Name: Zm_Drought_P Parameter: Treatment Value: Drought vs. No Drought
  misc_feature: MA Experiment ID: 108559 Result: Down-regulated in Transcription
  misc_feature: MA Experiment 108559 PARAMETER Experiment Name: Zm_5mM_NO_P Parameter: Age (day) Value: 8
  misc_feature: MA Experiment 108559 PARAMETER Experiment Name: Zm_5mM_NO_P Parameter: Organism Value: Zea mays
  misc_feature: MA Experiment 108559 PARAMETER Experiment Name: Zm_5mM_NO_P Parameter: Plant Line Value: 35A19
  misc_feature: MA Experiment 108559 PARAMETER Experiment Name: Zm_5mM_NO_P Parameter: Timepoint (hr) Value: 12
  misc_feature: MA Experiment 108559 PARAMETER Experiment Name: Zm_5mM_NO_P Parameter: Tissue Value: Aerial
  misc_feature: MA Experiment 108559 PARAMETER Experiment Name: Zm_5mM_NO_P Parameter: Treatment Value: 5mM NO vs. No Treatment
  misc_feature: MA Experiment ID: 20000488 Result: Down-regulated in Transcription
  misc_feature: MA Experiment 20000488 PARAMETER Experiment Name: Zm_50mM_NH4NO3_L_to_H_P Parameter: Organism Value: Zea mays
  misc_feature: MA Experiment 20000488 PARAMETER Experiment Name: Zm_50mM_NH4NO3_L_to_H_P Parameter: Timepoint (hr) Value: 8
  misc_feature: MA Experiment 20000488 PARAMETER Experiment Name: Zm_50mM_NH4NO3_L_to_H_P Parameter: Tissue Value: Leaves
  misc_feature: MA Experiment 20000488 PARAMETER Experiment Name: Zm_50mM_NH4NO3_L_to_H_P Parameter: Treatment Value: 50mM NH4NO3 vs. 100mM Mannitol
  misc_feature: MA Experiment ID: 20000535 Result: Down-regulated in Transcription
  misc_feature: MA Experiment 20000535 PARAMETER Experiment Name: Zm_Hybrid_Seed_Dev_P Parameter: DAP Value: 30 vs. 12
  misc_feature: MA Experiment 20000535 PARAMETER Experiment Name: Zm_Hybrid_Seed_Dev_P Parameter: Organism Value: Zea mays
  misc_feature: MA Experiment 20000535 PARAMETER Experiment Name: Zm_Hybrid_Seed_Dev_P Parameter: Plant Line Value: 35A19
  misc_feature: MA Experiment 20000535 PARAMETER Experiment Name: Zm_Hybrid_Seed_Dev_P Parameter: Tissue Value: Embryo vs. Unfert Floret
  misc_feature: MA Experiment ID: 20001608 Result: Down-regulated in Transcription
  misc_feature: MA Experiment 20001608 PARAMETER Experiment Name: Zm_50ppm_KNO3_L-to-H_P Parameter: Age (day) Value: 21
  misc_feature: MA Experiment 20001608 PARAMETER Experiment Name: Zm_50ppm_KNO3_L-to-H_P Parameter: Organism Value: Zea mays
  misc_feature: MA Experiment 20001608 PARAMETER Experiment Name: Zm_50ppm_KNO3_L-to-H_P Parameter: Plant Line Value: 35A19
  misc_feature: MA Experiment 20001608 PARAMETER Experiment Name: Zm_50ppm_KNO3_L-to-H_P Parameter: Timepoint (hr) Value: 48
  misc_feature: MA Experiment 20001608 PARAMETER Experiment Name: Zm_50ppm_KNO3_L-to-H_P Parameter: Tissue Value: Shoots
  misc_feature: MA Experiment 20001608 PARAMETER Experiment Name: Zm_50ppm_KNO3_L-to-H_P Parameter: Treatment Value: 50ppm KNO3 vs. 50ppm KCl
gcacgagaccattacctagaacatcctaatcgaaaaagtagtttagttttgctcgcttccacaccgcaccgccgttcccttttttatatcccgcggatgcgcctggcctctgcctcggggtcggggcagctggtgacatcggattcggatcaggccgagatcgaactgctccgatccggcgcttaatttctctctctctctctcgggctagctgcccgggcaaatggacgccgagtggagcggcgacgagagcaagactggcgctgcgggcggagtttcgtcggctgattgcccaggttcgccaccgccggtgtcgccggcgccaccgtcgacgtcgccagctgctaccggtgccgggaggaggcggtcggcgaacaagcgggtggtcaccgtgccgctggcggacgtcagtggcccacggcccaagggcgtcggcgagggcaacacgccgacggacgcgtgggcgtggcgcaagtacggccagaagcccatcaagggctcgccttttccgagggcttactacaggtgcagcagctccaaggggtgcccggccaggaagcaggtggagcggagccgggcggagccggacaaggtgatcgtcacgtactcgttcgagcacagccactcggaggccatggcggcggcgagggcgcagaaccgccaggccccgaagccaaagccggcccagccacagccagtcccgccggagtcctcgtcatccggcagccacgacgtcgctgccgctgccacggtcgtctgcgccggcggcgcgcctattgcggccgagaccgaggccggcgcggaggccgtcgaggtgcacgacgagttcaggtggctctacgacggcgtgtccgtcacctcctcggcgtccccaccggacgtcgaggcggcggacgagatgctgtacggggcgatgttcttcggcgacccgcccgcgcccctccccgacgagttcggcgacgtcggcggcctgttcgacggagaagggggcgaggaggacgccatgttcgcgggtctcggcgagctgcccgagtgcgccatggtgttccggcggcacgccggcgacgggatttcggtggcaggccgggtgaagtgaagtgaatcctgaattgaaggtcctgacatgtgggccggggcaggccggactccaataaaaaccagataaactcatgtagagctccttgatctatctacttttggcttttcttc

SEQ ID NO: 19577 - protein, 290 aa, Zea mays subsp. mays
  peptide (1)..(290): Ceres Seq. ID no. 12368229
  misc_feature (76)..(135): Pfam Name: WRKY DNA -binding domain Pfam Description: WRKY DNA -binding domain
  misc_feature (37)..(170): Homolog of NCBI NO: 25518142 NR Description: T5I8.10 protein - Arabidopsis thaliana
  misc_feature (37)..(170): Homolog of NCBI NO: 18397606 NR Description: WRKY family transcription factor
  misc_feature (37)..(170): Homolog of NCBI NO: 21553615 NR Description: putative DNA-binding protein [Arabidopsis
  misc_feature (47)..(250): Homolog of NCBI NO: 22329838 NR Description: WRKY family transcription factor
  misc_feature (255)..(277): Homolog of NCBI NO: 30694863 NR Description: WRKY family transcription factor [Arabidopsis
  misc_feature (29)..(252): Homolog of NCBI NO: 30694863 NR Description: WRKY family transcription factor [Arabidopsis
  misc_feature (255)..(277): Homolog of NCBI NO: 22331854 NR Description: WRKY family transcription factor
  misc_feature (29)..(252): Homolog of NCBI NO: 22331854 NR Description: WRKY family transcription factor
  misc_feature (1)..(284): Homolog of NCBI NO: 34909540 NR Description: P0481E12.40 [Oryza sativa (japonica
  misc_feature (6)..(290): Homolog of NCBI NO: 34910854 NR Description: P0435H01.23 [Oryza sativa (japonica
MDAEWSGDESKTGAAGGVSSADCPGSPPPVSPAPPSTSPAATGAGRRRSANKRVVTVPLADVSGPRPKGVGEGNTPTDAWAWRKYGQKPIKGSPFPRAYYRCSSSKGCPARKQVERSRAEPDKVIVTYSFEHSHSEAMAAARAQNRQAPKPKPAQPQPVPPESSSSGSHDVAAAATVVCAGGAPIAAETEAGAEAVEVHDEFRWLYDGVSVTSSASPPDVEAADEMLYGAMFFGDPPAPLPDEFGDVGGLFDGEGGEEDAMFAGLGELPECAMVFRRHAGDGISVAGRVK

SEQ ID NO: 19578 - protein, 153 aa, Zea mays subsp. mays
  peptide (1)..(153): Ceres Seq. ID no. 12368230
  misc_feature (1)..(33): Homolog of NCBI NO: 25518142 NR Description: T5I8.10 protein - Arabidopsis thaliana
  misc_feature (1)..(33): Homolog of NCBI NO: 18397606 NR Description: WRKY family transcription factor
  misc_feature (1)..(33): Homolog of NCBI NO: 21553615 NR Description: putative DNA-binding protein [Arabidopsis
  misc_feature (1)..(113): Homolog of NCBI NO: 22329838 NR Description: WRKY family transcription factor
  misc_feature (118)..(140): Homolog of NCBI NO: 30694863 NR Description: WRKY family transcription factor [Arabidopsis
  misc_feature (1)..(115): Homolog of NCBI NO: 30694863 NR Description: WRKY family transcription factor [Arabidopsis
  misc_feature (118)..(140): Homolog of NCBI NO: 22331854 NR Description: WRKY family transcription factor
  misc_feature (1)..(115): Homolog of NCBI NO: 22331854 NR Description: WRKY family transcription factor
  misc_feature (1)..(147): Homolog of NCBI NO: 34909540 NR Description: P0481E12.40 [Oryza sativa (japonica
  misc_feature (1)..(153): Homolog of NCBI NO: 34910854 NR Description: P0435H01.23 [Oryza sativa (japonica
MAAARAQNRQAPKPKPAQPQPVPPESSSSGSHDVAAAATVVCAGGAPIAAETEAGAEAVEVHDEFRWLYDGVSVTSSASPPDVEAADEMLYGAMFFGDPPAPLPDEFGDVGGLFDGEGGEEDAMFAGLGELPECAMVFRRHAGDGISVAGRVK

SEQ ID NO: 19579 - DNA, 1971 bp, Zea mays subsp. mays; identical to SEQ ID NO: 15947
  misc_feature (1)..(1971): Ceres Seq. ID no. 13501211
  misc_feature: MA Experiment ID: 20001610 Result: Down-regulated in Transcription
  misc_feature: MA Experiment 20001610 PARAMETER Experiment Name: Zm_50ppm_KNO3_L-to-H_P Parameter: Age (day) Value: 19
  misc_feature: MA Experiment 20001610 PARAMETER Experiment Name: Zm_50ppm_KNO3_L-to-H_P Parameter: Organism Value: Zea mays
  misc_feature: MA Experiment 20001610 PARAMETER Experiment Name: Zm_50ppm_KNO3_L-to-H_P Parameter: Plant Line Value: 35A19
  misc_feature: MA Experiment 20001610 PARAMETER Experiment Name: Zm_50ppm_KNO3_L-to-H_P Parameter: Timepoint (hr) Value: 2
  misc_feature: MA Experiment 20001610 PARAMETER Experiment Name: Zm_50ppm_KNO3_L-to-H_P Parameter: Tissue Value: Roots
  misc_feature: MA Experiment 20001610 PARAMETER Experiment Name: Zm_50ppm_KNO3_L-to-H_P Parameter: Treatment Value: 50ppm KNO3 vs. 50ppm KCl

SEQ ID NO: 19580 - protein, 511 aa, Zea mays subsp. mays; identical to SEQ ID NO: 15948
  peptide (1)..(511): Ceres Seq. ID no. 13501212
  misc_feature (1)..(510): Homolog of NCBI NO: 20530127 NR Description: mitochondrial aldehyde dehydrogenase [Secale
  misc_feature (28)..(510): Homolog of NCBI NO: 14276718 NR Description: T-cytoplasm male sterility restorer factor 2 [Zea
  misc_feature (27)..(510): Homolog of NCBI NO: 20530131 NR Description: mitochondrial aldehyde dehydrogenase [Sorghum
  misc_feature (28)..(510): Homolog of NCBI NO: 7431451 NR Description: rf2 nuclear restorer protein - maize
  misc_feature (15)..(510): Homolog of NCBI NO: 18404212 NR Description: aldehyde dehydrogenase (ALDH1a) [Arabidopsis
  misc_feature (13)..(510): Homolog of NCBI NO: 19850243 NR Description: cytosolic aldehyde dehydrogenase RF2C [Zea mays]
  misc_feature (13)..(510): Homolog of NCBI NO: 19850241 NR Description: cytosolic aldehyde dehydrogenase RF2C [Zea mays]
  misc_feature (8)..(511): Homolog of NCBI NO: 34912252 NR Description: putative cytosolic aldehyde dehydrogenase
  misc_feature (46)..(511): Homolog of NCBI NO: 19850245 NR Description: cytosolic aldehyde dehydrogenase RF2D [Zea mays]
  misc_feature (1)..(511): Homolog of NCBI NO: 19850247 NR Description: cytosolic aldehyde dehydrogenase RF2D [Zea mays]
  misc_feature (1)..(510): Homolog of NCBI NO: 20530127 NR Description: mitochondrial aldehyde dehydrogenase [Secale
  misc_feature (28)..(510): Homolog of NCBI NO: 14276718 NR Description: T-cytoplasm male sterility restorer factor 2 [Zea
  misc_feature (27)..(510): Homolog of NCBI NO: 20530131 NR Description: mitochondrial aldehyde dehydrogenase [Sorghum
  misc_feature (28)..(510): Homolog of NCBI NO: 7431451 NR Description: rf2 nuclear restorer protein - maize
  misc_feature (15)..(510): Homolog of NCBI NO: 18404212 NR Description: aldehyde dehydrogenase (ALDH1a) [Arabidopsis
  misc_feature (13)..(510): Homolog of NCBI NO: 19850243 NR Description: cytosolic aldehyde dehydrogenase RF2C [Zea mays]
  misc_feature (13)..(510): Homolog of NCBI NO: 19850241 NR Description: cytosolic aldehyde dehydrogenase RF2C [Zea mays]
  misc_feature (8)..(511): Homolog of NCBI NO: 34912252 NR Description: putative cytosolic aldehyde dehydrogenase
  misc_feature (46)..(511): Homolog of NCBI NO: 19850245 NR Description: cytosolic aldehyde dehydrogenase RF2D [Zea mays]
  misc_feature (1)..(511): Homolog of NCBI NO: 19850247 NR Description: cytosolic aldehyde dehydrogenase RF2D [Zea mays]

SEQ ID NO: 19581 - protein, 423 aa, Zea mays subsp. mays; identical to SEQ ID NO: 15949
  peptide (1)..(423): Ceres Seq. ID no. 13501213
  misc_feature (1)..(422): Homolog of NCBI NO: 20530127 NR Description: mitochondrial aldehyde dehydrogenase [Secale
  misc_feature (1)..(422): Homolog of NCBI NO: 14276718 NR Description: T-cytoplasm male sterility restorer factor 2 [Zea
  misc_feature (1)..(422): Homolog of NCBI NO: 20530131 NR Description: mitochondrial aldehyde dehydrogenase [Sorghum
  misc_feature (1)..(422): Homolog of NCBI NO: 7431451 NR Description: rf2 nuclear restorer protein - maize
  misc_feature (1)..(422): Homolog of NCBI NO: 18404212 NR Description: aldehyde dehydrogenase (ALDH1a) [Arabidopsis
  misc_feature (1)..(422): Homolog of NCBI NO: 19850243 NR Description: cytosolic aldehyde dehydrogenase RF2C [Zea mays]
  misc_feature (1)..(422): Homolog of NCBI NO: 19850241 NR Description: cytosolic aldehyde dehydrogenase RF2C [Zea mays]
  misc_feature (1)..(423): Homolog of NCBI NO: 34912252 NR Description: putative cytosolic aldehyde dehydrogenase
  misc_feature (1)..(423): Homolog of NCBI NO: 19850245 NR Description: cytosolic aldehyde dehydrogenase RF2D [Zea mays]
  misc_feature (1)..(423): Homolog of NCBI NO: 19850247 NR Description: cytosolic aldehyde dehydrogenase RF2D [Zea mays]
  misc_feature (1)..(422): Homolog of NCBI NO: 20530131 NR Description: mitochondrial aldehyde dehydrogenase [Sorghum
  misc_feature (1)..(422): Homolog of NCBI NO: 7431451 NR Description: rf2 nuclear restorer protein - maize
  misc_feature (1)..(422): Homolog of NCBI NO: 18404212 NR Description: aldehyde dehydrogenase (ALDH1a) [Arabidopsis
  misc_feature (1)..(422): Homolog of NCBI NO: 19850243 NR Description: cytosolic aldehyde dehydrogenase RF2C [Zea mays]
  misc_feature (1)..(422): Homolog of NCBI NO: 19850241 NR Description: cytosolic aldehyde dehydrogenase RF2C [Zea mays]
  misc_feature (1)..(423): Homolog of NCBI NO: 34912252 NR Description: putative cytosolic aldehyde dehydrogenase
  misc_feature (1)..(423): Homolog of NCBI NO: 19850245 NR Description: cytosolic aldehyde dehydrogenase RF2D [Zea mays]
  misc_feature (1)..(423): Homolog of NCBI NO: 19850247 NR Description: cytosolic aldehyde dehydrogenase RF2D [Zea mays]
  misc_feature (1)..(422): Homolog of NCBI NO: 20530127 NR Description: mitochondrial aldehyde dehydrogenase [Secale
  misc_feature (1)..(422): Homolog of NCBI NO: 14276718 NR Description: T-cytoplasm male sterility restorer factor 2 [Zea

SEQ ID NO: 19582 - protein, 414 aa, Zea mays subsp. mays; identical to SEQ ID NO: 15950
  peptide (1)..(414): Ceres Seq. ID no. 13501214
  misc_feature (1)..(413): Homolog of NCBI NO: 20530127 NR Description: mitochondrial aldehyde dehydrogenase [Secale
  misc_feature (1)..(413): Homolog of NCBI NO: 14276718 NR Description: T-cytoplasm male sterility restorer factor 2 [Zea
  misc_feature (1)..(413): Homolog of NCBI NO: 20530131 NR Description: mitochondrial aldehyde dehydrogenase [Sorghum
  misc_feature (1)..(413): Homolog of NCBI NO: 7431451 NR Description: rf2 nuclear restorer protein - maize
  misc_feature (1)..(413): Homolog of NCBI NO: 18404212 NR Description: aldehyde dehydrogenase (ALDH1a) [Arabidopsis
  misc_feature (1)..(413): Homolog of NCBI NO: 19850243 NR Description: cytosolic aldehyde dehydrogenase RF2C [Zea mays]
  misc_feature (1)..(413): Homolog of NCBI NO: 19850241 NR Description: cytosolic aldehyde dehydrogenase RF2C [Zea mays]
  misc_feature (1)..(414): Homolog of NCBI NO: 34912252 NR Description: putative cytosolic aldehyde dehydrogenase
  misc_feature (1)..(414): Homolog of NCBI NO: 19850245 NR Description: cytosolic aldehyde dehydrogenase RF2D [Zea mays]
  misc_feature (1)..(414): Homolog of NCBI NO: 19850247 NR Description: cytosolic aldehyde dehydrogenase RF2D [Zea mays]
  misc_feature (1)..(413): Homolog of NCBI NO: 20530127 NR Description: mitochondrial aldehyde dehydrogenase [Secale
  misc_feature (1)..(413): Homolog of NCBI NO: 14276718 NR Description: T-cytoplasm male sterility restorer factor 2 [Zea
  misc_feature (1)..(413): Homolog of NCBI NO: 20530131 NR Description: mitochondrial aldehyde dehydrogenase [Sorghum
  misc_feature (1)..(413): Homolog of NCBI NO: 7431451 NR Description: rf2 nuclear restorer protein - maize
  misc_feature (1)..(413): Homolog of NCBI NO: 18404212 NR Description: aldehyde dehydrogenase (ALDH1a) [Arabidopsis
  misc_feature (1)..(413): Homolog of NCBI NO: 19850243 NR Description: cytosolic aldehyde dehydrogenase RF2C [Zea mays]
  misc_feature (1)..(413): Homolog of NCBI NO: 19850241 NR Description: cytosolic aldehyde dehydrogenase RF2C [Zea mays]
  misc_feature (1)..(414): Homolog of NCBI NO: 34912252 NR Description: putative cytosolic aldehyde dehydrogenase
  misc_feature (1)..(414): Homolog of NCBI NO: 19850245 NR Description: cytosolic aldehyde dehydrogenase RF2D [Zea mays]
  misc_feature (1)..(414): Homolog of NCBI NO: 19850247 NR Description: cytosolic aldehyde dehydrogenase RF2D [Zea mays]

SEQ ID NO: 19583 - DNA, 1487 bp, Zea mays subsp. mays
  misc_feature (1)..(1487): Ceres Seq. ID no. 12367964
  misc_feature: MA Experiment ID: 108527 Result: Up-regulated in Transcription
  misc_feature: MA Experiment 108527 PARAMETER Experiment Name: Zm_5mM_NO_P Parameter: Age (day) Value: 8
  misc_feature: MA Experiment 108527 PARAMETER Experiment Name: Zm_5mM_NO_P Parameter: Organism Value: Zea mays
  misc_feature: MA Experiment 108527 PARAMETER Experiment Name: Zm_5mM_NO_P Parameter: Plant Line Value: 35A19
  misc_feature: MA Experiment 108527 PARAMETER Experiment Name: Zm_5mM_NO_P Parameter: Timepoint (hr) Value: 6
  misc_feature: MA Experiment 108527 PARAMETER Experiment Name: Zm_5mM_NO_P Parameter: Tissue Value: Aerial
  misc_feature: MA Experiment 108527 PARAMETER Experiment Name: Zm_5mM_NO_P Parameter: Treatment Value: 5mM NO vs. No Treatment
  misc_feature: MA Experiment ID: 108528 Result: Up-regulated in Transcription
  misc_feature: MA Experiment 108528 PARAMETER Experiment Name: Zm_Imbibed_Seeds_P Parameter: Age (day) Value: 5 vs. 2
  misc_feature: MA Experiment 108528 PARAMETER Experiment Name: Zm_Imbibed_Seeds_P Parameter: Organism Value: Zea mays
  misc_feature: MA Experiment 108528 PARAMETER Experiment Name: Zm_Imbibed_Seeds_P Parameter: Plant Line Value: 35A19
  misc_feature: MA Experiment 108528 PARAMETER Experiment Name: Zm_Imbibed_Seeds_P Parameter: Tissue Value: Aerial vs. Embryo
  misc_feature: MA Experiment ID: 108530 Result: Up-regulated in Transcription
  misc_feature: MA Experiment 108530 PARAMETER Experiment Name: Zm_Imbibed_Seeds_P Parameter: Age (day) Value: 6 vs. 2
  misc_feature: MA Experiment 108530 PARAMETER Experiment Name: Zm_Imbibed_Seeds_P Parameter: Organism Value: Zea mays
  misc_feature: MA Experiment 108530 PARAMETER Experiment Name: Zm_Imbibed_Seeds_P Parameter: Plant Line Value: 35A19
  misc_feature: MA Experiment 108530 PARAMETER Experiment Name: Zm_Imbibed_Seeds_P Parameter: Tissue Value: Aerial vs. Embryo
  misc_feature: MA Experiment ID: 108542 Result: Up-regulated in Transcription
  misc_feature: MA Experiment 108542 PARAMETER Experiment Name: Zm_150mM_NaCl_P Parameter: Age (day) Value: 8
  misc_feature: MA Experiment 108542 PARAMETER Experiment Name: Zm_150mM_NaCl_P Parameter: Organism Value: Zea mays
  misc_feature: MA Experiment 108542 PARAMETER Experiment Name: Zm_150mM_NaCl_P Parameter: Plant Line Value: 35A19
  misc_feature: MA Experiment 108542 PARAMETER Experiment Name: Zm_150mM_NaCl_P Parameter: Timepoint (hr) Value: 6
  misc_feature: MA Experiment 108542 PARAMETER Experiment Name: Zm_150mM_NaCl_P Parameter: Tissue Value: Aerial
  misc_feature: MA Experiment 108542 PARAMETER Experiment Name: Zm_150mM_NaCl_P Parameter: Treatment Value: 150mM NaCl vs. No Treatment
  misc_feature: MA Experiment ID: 108544 Result: Up-regulated in Transcription
  misc_feature: MA Experiment ID: 108546 Result: Down-regulated in Transcription
  misc_feature: MA Experiment 108546 PARAMETER Experiment Name: Zm_Imbibed_Seeds_P Parameter: Age (day) Value: 3 vs. 2
  misc_feature: MA Experiment 108546 PARAMETER Experiment Name: Zm_Imbibed_Seeds_P Parameter: Organism Value: Zea mays
  misc_feature: MA Experiment 108546 PARAMETER Experiment Name: Zm_Imbibed_Seeds_P Parameter: Plant Line Value: 35A19
  misc_feature: MA Experiment 108546 PARAMETER Experiment Name: Zm_Imbibed_Seeds_P Parameter: Tissue Value: Roots vs. Embryo
  misc_feature: MA Experiment ID: 20000533 Result: Up-regulated in Transcription
  misc_feature: MA Experiment 20000533 PARAMETER Experiment Name: Zm_0.001percent_MeJA_P Parameter: Age (day) Value: 11
  misc_feature: MA Experiment 20000533 PARAMETER Experiment Name: Zm_0.001percent_MeJA_P Parameter: Organism Value: Zea mays
  misc_feature: MA Experiment 20000533 PARAMETER Experiment Name: Zm_0.001percent_MeJA_P Parameter: Plant Line Value: 35A19
  misc_feature: MA Experiment 20000533 PARAMETER Experiment Name: Zm_0.001percent_MeJA_P Parameter: Timepoint (hr) Value: 72
  misc_feature: MA Experiment 20000533 PARAMETER Experiment Name: Zm_0.001percent_MeJA_P Parameter: Tissue Value: Aerial
  misc_feature: MA Experiment 20000533 PARAMETER Experiment Name: Zm_0.001percent_MeJA_P Parameter: Treatment Value: 0.001percent MeJA vs. No Treatment
  misc_feature: MA Experiment ID: 20000630 Result: Up-regulated in Transcription
  misc_feature: MA Experiment 20000630 PARAMETER Experiment Name: Zm_Herbicide-Treatments_P Parameter: Timepoint (hr) Value: 4
  misc_feature: MA Experiment 20000630 PARAMETER Experiment Name: Zm_Herbicide-Treatments_P Parameter: Tissue Value: Aerial
  misc_feature: MA Experiment 20000630 PARAMETER Experiment Name: Zm_Herbicide-Treatments_P Parameter: Treatment Value: Roundup vs. No Treatment
gcacgagaccattacctagaacatcctaatcgaaaaatcacacaaagccgccaagagtcccagcatcgatcgaacagctagctagctagctatatagcgagagggctccatccatatccatccatctgctactgctagcagctgctggctgttgctgcttgcattgagatgtggatgatcagcgcagggcgcatggagcagtgggcgccgacggcggcaatggtggccaccaacgtcgtgatcgccgtcatgacggcgctgatcaagcaggcactgagcctgggcatgaacaggctggtcctcatcactttccgccagatggtggccaccctgttccttggacccatcgcctacttcaaggaaaggaggatgagaccgaagttcacttccgagatcttcgtgtacatgtttctcagtggaattcttgggccggtgctgcttcagttacacactgtttgtcggattggattacacgacggcaacgttcgctgcaacgttcggaaatatgcttccagtggttactttcctgatatcacttgctttcaggttcgaagcactggaggtgaagagcaagtcggggagcgccaagatctcagggacgctcatctccctcggcggcgcaatgatgctcaccttctacaagggttcagcactgacacaaaccaccaccgccgccacgtcgtctccagcatccagcggcggcggccacatcaggcaacaagccggagagcacggcacggtccggtgggtgctgggctccgtctccatgctggccaacgtcgtcggcttcgcgctgtggctgctcctgcagcggaagttcacccgcaagtacccggccgtgtactcggccacggcgttcatgtcgctattcagcttcgtccaggccggggcgctggccctgtcgatccagaggaccagccttgccgttgggccctcagggggaccgtggagatcgccacggtggtgtactgtggtgtagtggcgtctggcattgggtacctgctgctcacctactgcgtggagaagagaggccccgtgttcactgccgccttcagcccgctcgcccagatcttcgtcgccggcatcgatctcttcatcctccacgagcctctctacctcggaagcgtgctgggatcagtgctggttattcttgggctctaccttgtactgtggggcaagagagaggaagctgctgctgctgctgcttcggcaaagccagtgcaggccgaggtagaacagcaagagaaagtgtgattttttccctttattgttcatcacagtacagcgtgccagagcagagggacgaacataattaactagaagcggaagcctgtgtgagtatgtgacagagagtgcatatgatcttcgagccctaaatctatgtatactactgaccaatataacgcaagaaaatgtatgctgatcgatcgatcgatcgaaatgctgtgaaattctctctcaagtacgtgctgagaaagaggttgggc

SEQ ID NO: 19584 - protein, 361 aa, Zea mays subsp. mays
  peptide (1)..(361): Ceres Seq. ID no. 12367965
  misc_feature (254)..(335): Pfam Name: Integral membrane protein DUF6 Pfam Description: Integral membrane protein DUF6
  misc_feature (254)..(360): Homolog of NCBI NO: 15234185 NR Description: unknown protein; protein id: At4g01450.1
  misc_feature (254)..(360): Homolog of NCBI NO: 6815050 NR Description: ESTs AU030746(E60179) correspond to a region of the predicted
  misc_feature (12)..(92): Homolog of NCBI NO: 30689857 NR Description: nodulin N21 family protein [Arabidopsis thaliana]
  misc_feature (254)..(356): Homolog of NCBI NO: 30689857 NR Description: nodulin N21 family protein [Arabidopsis thaliana]
  misc_feature (35)..(66): Homolog of NCBI NO: 32489301 NR Description: OSJNBa0028I23.24 [Oryza sativa (japonica
  misc_feature (254)..(355): Homolog of NCBI NO: 32489301 NR Description: OSJNBa0028I23.24 [Oryza sativa (japonica
  misc_feature (1)..(92): Homolog of NCBI NO: 34897814 NR Description: P0514G12.27 [Oryza sativa (japonica
  misc_feature (254)..(360): Homolog of NCBI NO: 34897814 NR Description: P0514G12.27 [Oryza sativa (japonica
  misc_feature (9)..(101): Homolog of NCBI NO: 34897816 NR Description: P0514G12.28 [Oryza sativa (japonica
  misc_feature (254)..(361): Homolog of NCBI NO: 34897816 NR Description: P0514G12.28 [Oryza sativa (japonica
MWMISAGRMEQWAPTAAMVATNVVIAVMTALIKQALSLGMNRLVLITFRQMVATLFLGPIAYFKERRMRPKFTSEIFVYMFLSGILGPVLLQLHTVCRIGLHDGNVRCNVRKYASSGYFPDITCFQVRSTGGEEQVGERQDLRDAHLPRRRNDAHLLQGFSTDTNHHRRHVVSSIQRRRPHQATSRRARHGPVGAGLRLHAGQRRRLRAVAAPAAEVHPQVPGRVLGHGVHVAIQLRPGRGAGPVDPEDQPCRWALRGTVEIATVVYCGVVASGIGYLLLTYCVEKRGPVFTAAFSPLAQIFVAGIDLFILHEPLYLGSVLGSVLVILGLYLVLWGKREEAAAAAASAKPVQAEVEQQEKV

SEQ ID NO: 19585 - protein, 359 aa, Zea mays subsp. mays
  peptide (1)..(359): Ceres Seq. ID no. 12367966
  misc_feature (252)..(333): Pfam Name: Integral membrane protein DUF6 Pfam Description: Integral membrane protein DUF6
  misc_feature (252)..(358): Homolog of NCBI NO: 15234185 NR Description: unknown protein; protein id: At4g01450.1
  misc_feature (252)..(358): Homolog of NCBI NO: 6815050 NR Description: ESTs AU030746(E60179) correspond to a region of the predicted
  misc_feature (10)..(90): Homolog of NCBI NO: 30689857 NR Description: nodulin N21 family protein [Arabidopsis thaliana]
  misc_feature (252)..(354): Homolog of NCBI NO: 30689857 NR Description: nodulin N21 family protein [Arabidopsis thaliana]
  misc_feature (33)..(64): Homolog of NCBI NO: 32489301 NR Description: OSJNBa0028I23.24 [Oryza sativa (japonica
  misc_feature (252)..(353): Homolog of NCBI NO: 32489301 NR Description: OSJNBa0028I23.24 [Oryza sativa (japonica
  misc_feature (1)..(90): Homolog of NCBI NO: 34897814 NR Description: P0514G12.27 [Oryza sativa (japonica
  misc_feature (252)..(358): Homolog of NCBI NO: 34897814 NR Description: P0514G12.27 [Oryza sativa (japonica
  misc_feature (7)..(99): Homolog of NCBI NO: 34897816 NR Description: P0514G12.28 [Oryza sativa (japonica
  misc_feature (252)..(359): Homolog of NCBI NO: 34897816 NR Description: P0514G12.28 [Oryza sativa (japonica
MISAGRMEQWAPTAAMVATNVVIAVMTALIKQALSLGMNRLVLITFRQMVATLFLGPIAYFKERRMRPKFTSEIFVYMFLSGILGPVLLQLHTVCRIGLHDGNVRCNVRKYASSGYFPDITCFQVRSTGGEEQVGERQDLRDAHLPRRRNDAHLLQGFSTDTNHHRRHVVSSIQRRRPHQATSRRARHGPVGAGLRLHAGQRRRLRAVAAPAAEVHPQVPGRVLGHGVHVAIQLRPGRGAGPVDPEDQPCRWALRGTVEIATVVYCGVVASGIGYLLLTYCVEKRGPVFTAAFSPLAQIFVAGIDLFILHEPLYLGSVLGSVLVILGLYLVLWGKREEAAAAAASAKPVQAEVEQQEKV

SEQ ID NO: 19586 - protein, 353 aa, Zea mays subsp. mays
  peptide (1)..(353): Ceres Seq. ID no. 12367967
  misc_feature (246)..(327): Pfam Name: Integral membrane protein DUF6 Pfam Description: Integral membrane protein DUF6
  misc_feature (246)..(352): Homolog of NCBI NO: 15234185 NR Description: unknown protein; protein id: At4g01450.1
  misc_feature (246)..(352): Homolog of NCBI NO: 6815050 NR Description: ESTs AU030746(E60179) correspond to a region of the predicted
  misc_feature (4)..(84): Homolog of NCBI NO: 30689857 NR Description: nodulin N21 family protein [Arabidopsis thaliana]
  misc_feature (246)..(348): Homolog of NCBI NO: 30689857 NR Description: nodulin N21 family protein [Arabidopsis thaliana]
  misc_feature (27)..(58): Homolog of NCBI NO: 32489301 NR Description: OSJNBa0028I23.24 [Oryza sativa (japonica
  misc_feature (246)..(347): Homolog of NCBI NO: 32489301 NR Description: OSJNBa0028I23.24 [Oryza sativa (japonica
  misc_feature (1)..(84): Homolog of NCBI NO: 34897814 NR Description: P0514G12.27 [Oryza sativa (japonica
  misc_feature (246)..(352): Homolog of NCBI NO: 34897814 NR Description: P0514G12.27 [Oryza sativa (japonica
  misc_feature (1)..(93): Homolog of NCBI NO: 34897816 NR Description: P0514G12.28 [Oryza sativa (japonica
  misc_feature (246)..(353): Homolog of NCBI NO: 34897816 NR Description: P0514G12.28 [Oryza sativa (japonica
MEQWAPTAAMVATNVVIAVMTALIKQALSLGMNRLVLITFRQMVATLFLGPIAYFKERRMRPKFTSEIFVYMFLSGILGPVLLQLHTVCRIGLHDGNVRCNVRKYASSGYFPDITCFQVRSTGGEEQVGERQDLRDAHLPRRRNDAHLLQGFSTDTNHHRRHVVSSIQRRRPHQATSRRARHGPVGAGLRLHAGQRRRLRAVAAPAAEVHPQVPGRVLGHGVHVAIQLRPGRGAGPVDPEDQPCRWALRGTVEIATVVYCGVVASGIGYLLLTYCVEKRGPVFTAAFSPLAQIFVAGIDLFILHEPLYLGSVLGSVLVILGLYLVLWGKREEAAAAAASAKPVQAEVEQQEKV

SEQ ID NO: 19587 - DNA, 1521 bp, Zea mays subsp. mays
  misc_feature (1)..(1521): Ceres Seq. ID no. 12367968
  misc_feature: MA Experiment ID: 108529 Result: Up-regulated in Transcription
  misc_feature: MA Experiment 108529 PARAMETER Experiment Name: Zm_Imbibed_Seeds_P Parameter: Age (day) Value: 5 vs. 2
  misc_feature: MA Experiment 108529 PARAMETER Experiment Name: Zm_Imbibed_Seeds_P Parameter: Organism Value: Zea mays
  misc_feature: MA Experiment 108529 PARAMETER Experiment Name: Zm_Imbibed_Seeds_P Parameter: Plant Line Value: 35A19
  misc_feature: MA Experiment 108529 PARAMETER Experiment Name: Zm_Imbibed_Seeds_P Parameter: Tissue Value: Roots vs. Embryo
  misc_feature: MA Experiment ID: 108530 Result: Down-regulated in Transcription
  misc_feature: MA Experiment 108530 PARAMETER Experiment Name: Zm_Imbibed_Seeds_P Parameter: Age (day) Value: 6 vs. 2
  misc_feature: MA Experiment 108530 PARAMETER Experiment Name: Zm_Imbibed_Seeds_P Parameter: Organism Value: Zea mays
  misc_feature: MA Experiment 108530 PARAMETER Experiment Name: Zm_Imbibed_Seeds_P Parameter: Plant Line Value: 35A19
  misc_feature: MA Experiment 108530 PARAMETER Experiment Name: Zm_Imbibed_Seeds_P Parameter: Tissue Value: Aerial vs. Embryo
  misc_feature: MA Experiment ID: 108532 Result: Down-regulated in Transcription
  misc_feature: MA Experiment 108532 PARAMETER Experiment Name: Zm_20uM_KNO3_H-to-L_P Parameter: Age (day) Value: 11
  misc_feature: MA Experiment 108532 PARAMETER Experiment Name: Zm_20uM_KNO3_H-to-L_P Parameter: Organism Value: Zea mays
  misc_feature: MA Experiment 108532 PARAMETER Experiment Name: Zm_20uM_KNO3_H-to-L_P Parameter: Plant Line Value: 35A19
  misc_feature: MA Experiment 108532 PARAMETER Experiment Name: Zm_20uM_KNO3_H-to-L_P Parameter: Timepoint (hr) Value: 16
  misc_feature: MA Experiment 108532 PARAMETER Experiment Name: Zm_20uM_KNO3_H-to-L_P Parameter: Tissue Value: Roots
  misc_feature: MA Experiment 108532 PARAMETER Experiment Name: Zm_20uM_KNO3_H-to-L_P Parameter: Treatment Value: 20uM KNO3 vs. 60mM KNO3
  misc_feature: MA Experiment ID: 108535 Result: Down-regulated in Transcription
  misc_feature: MA Experiment 108535 PARAMETER Experiment Name: Zm_Meristem_P Parameter: Age (day) Value: 8
  misc_feature: MA Experiment 108535 PARAMETER Experiment Name: Zm_Meristem_P Parameter: Organism Value: Zea mays
  misc_feature: MA Experiment 108535 PARAMETER Experiment Name: Zm_Meristem_P Parameter: Plant Line Value: 35A19
  misc_feature: MA Experiment 108535 PARAMETER Experiment Name: Zm_Meristem_P Parameter: Tissue Value: Root Meristem vs. Above Root Meristem
  misc_feature: MA Experiment ID: 108543 Result: Up-regulated in Transcription
  misc_feature: MA Experiment ID: 108545 Result: Down-regulated in Transcription
  misc_feature: MA Experiment 108545 PARAMETER Experiment Name: Zm_Imbibed_Seeds_P Parameter: Age (day) Value: 3 vs. 2
  misc_feature: MA Experiment 108545 PARAMETER Experiment Name: Zm_Imbibed_Seeds_P Parameter: Organism Value: Zea mays
  misc_feature: MA Experiment 108545 PARAMETER Experiment Name: Zm_Imbibed_Seeds_P Parameter: Plant Line Value: 35A19
  misc_feature: MA Experiment 108545 PARAMETER Experiment Name: Zm_Imbibed_Seeds_P Parameter: Tissue Value: Aerial vs. Embryo
  misc_feature: MA Experiment ID: 108546 Result: Up-regulated in Transcription
  misc_feature: MA Experiment 108546 PARAMETER Experiment Name: Zm_Imbibed_Seeds_P Parameter: Age (day) Value: 3 vs. 2
  misc_feature: MA Experiment 108546 PARAMETER Experiment Name: Zm_Imbibed_Seeds_P Parameter: Organism Value: Zea mays
  misc_feature: MA Experiment 108546 PARAMETER Experiment Name: Zm_Imbibed_Seeds_P Parameter: Plant Line Value: 35A19
  misc_feature: MA Experiment 108546 PARAMETER Experiment Name: Zm_Imbibed_Seeds_P Parameter: Tissue Value: Roots vs. Embryo
gcacgagaccattacctagaacatcctaatcgaaaaagtagtcagaccatagctaagctgagagcaaagatgtcttggcggcgaaaccagctacgtgcgtttctcgttctcgccgtcatcctcctcatcaccgcagctacctaccgagccaatgcgcagccggcgcctccagcagacccaacgccagccgctgacacctgcgccgaccccagcgtggaaggggcgtgccgcaacgtcccgaaggcgctgcgcctgaagctgatcgccatcccgacgatcctcgtctccagcgtgatcggcgtgtgcctgccgctcttgtcccgctctgtgcccgcgctccgccccgaccgcaacctcttcgtcatcgtcaaggccttcgcctcaggcgtcatcctcgcgacgggctacatgcacgtgctcccggactccttcagcaacctcacctcgccgtgcctgccgcggaagccgtgggccgatttctccttcaccaccttcgtcgccatgctcgccgccctgttcacgctcatggtggactcgctcatgctcagcttctacaaccggaggaagggtggcaacacctccggccgacgcactagcggcgcggtcgccgaccacgagagcccggcgcatgagcaccactggcacagccacggccatggacatggacatggacatgctgggggcatcgtggtggctgacaagcccgaggacgatgaggccagccaggtgcagctccgccggaaccgcgttgtcgttcaggtcctggagatgggcatcgtcgtgcactcggtggtgatcgggctgggcatgggagcgtcgcagaacgtgtgcaccatccggccgctggtgacggcgatgtgcttccaccagctcttcgagggcatgggactcggcggctgcatcctgcaggcggagtacggcgcgaagatgaaggcggggctggtgttcttcttctccacgacgacgccgttcgggatcgcgctggggctggcgctcaccaaggtgtacagggagaacagccccacggcgctcatcgtggtgggcctgctcaacgcggcctcggcggggctgctccactacatggcgctcgtggagctcctggccgccgacttcatggggcccaagctgcagagcagcgtcaggctccagctcctctgcttcctcgccgtcctcctcggcgccggcggcatgtccatcatggccaagtgggcgtgatcgtattcgtatctgagacgacatgacacagtactgttacaccaacactgcctgcagtctagctatctgcaagactgcatcgctgcatgcatgttcctcctatagctggctgttgtatcatttcgcgtgcttcgttgctccgtgcgcttccgtgtcgccatcaggaagctaggtatatattagacgcagatagcgttgttgtcatgactattcaacgtccacggtacaatacaaaagtagtactctatctatgtattaactatgttcttaaatatttgtcgtggtaaataaaaaaacaatataaat

SEQ ID NO: 19588 - protein, 404 aa, Zea mays subsp. mays
  peptide (1)..(404): Ceres Seq. ID no. 12367969
  misc_feature (83)..(401): Pfam Name: ZIP Zinc transporter Pfam Description: ZIP Zinc transporter
  misc_feature (217)..(404): Homolog of NCBI NO: 22328811 NR Description: Fe(II) transport protein
  misc_feature (73)..(404): Homolog of NCBI NO: 4836771 NR Description: iron-regulated transporter 1 [Lycopersicon
  misc_feature (57)..(188): Homolog of NCBI NO: 16304676 NR Description: putative Fe(II) transporter [Thlaspi caerulescens]
  misc_feature (217)..(404): Homolog of NCBI NO: 16304676 NR Description: putative Fe(II) transporter [Thlaspi caerulescens]
  misc_feature (73)..(404): Homolog of NCBI NO: 4836773 NR Description: iron-regulated transporter 2 [Lycopersicon
  misc_feature (56)..(404): Homolog of NCBI NO: 27549575 NR Description: root iron transporter protein IRT1 [Malus
  misc_feature (36)..(404): Homolog of NCBI NO: 40538928 NR Description: putative metal transporter (with alternative
  misc_feature (39)..(404): Homolog of NCBI NO: 40888850 NR Description: TPA: iron regulated transporter-like protein
  misc_feature (36)..(404): Homolog of NCBI NO: 32966055 NR Description: iron transporter Fe3 [Oryza sativa (japonica
  misc_feature (36)..(404): Homolog of NCBI NO: 18700309 NR Description: iron regulated metal transporter [Oryza sativa]
ARDHYLEHPNRKSSQTIAKLRAKMSWRRNQLRAFLVLAVILLITAATYRANAQPAPPADPTPAADTCADPSVEGACRNVPKALRLKLIAIPTILVSSVIGVCLPLLSRSVPALRPDRNLFVIVKAFASGVILATGYMHVLPDSFSNLTSPCLPRKPWADFSFTTFVAMLAALFTLMVDSLMLSFYNRRKGGNTSGRRTSGAVADHESPAHEHHWHSHGHGHGHGHAGGIVVADKPEDDEASQVQLRRNRVVVQVLEMGIVVHSVVIGLGMGASQNVCTIRPLVTAMCFHQLFEGMGLGGCILQAEYGAKMKAGLVFFFSTTTPFGIALGLALTKVYRENSPTALIVVGLLNAASAGLLHYMALVELLAADFMGPKLQSSVRLQLLCFLAVLLGAGGMSIMAKWA

SEQ ID NO: 19589 - protein, 381 aa, Zea mays subsp. mays
  peptide (1)..(381): Ceres Seq. ID no. 12367970
  misc_feature (60)..(378): Pfam Name: ZIP Zinc transporter Pfam Description: ZIP Zinc transporter
  misc_feature (194)..(381): Homolog of NCBI NO: 22328811 NR Description: Fe(II) transport protein
  misc_feature (50)..(381): Homolog of NCBI NO: 4836771 NR Description: iron-regulated transporter 1 [Lycopersicon
  misc_feature (34)..(165): Homolog of NCBI NO: 16304676 NR Description: putative Fe(II) transporter [Thlaspi caerulescens]
  misc_feature (194)..(381): Homolog of NCBI NO: 16304676 NR Description: putative Fe(II) transporter [Thlaspi caerulescens]
  misc_feature (50)..(381): Homolog of NCBI NO: 4836773 NR Description: iron-regulated transporter 2 [Lycopersicon
  misc_feature (33)..(381): Homolog of NCBI NO: 27549575 NR Description: root iron transporter protein IRT1 [Malus
  misc_feature (13)..(381): Homolog of NCBI NO: 40538928 NR Description: putative metal transporter (with alternative
  misc_feature (16)..(381): Homolog of NCBI NO: 40888850 NR Description: TPA: iron regulated transporter-like protein
  misc_feature (13)..(381): Homolog of NCBI NO: 32966055 NR Description: iron transporter Fe3 [Oryza sativa (japonica
  misc_feature (13)..(381): Homolog of NCBI NO: 18700309 NR Description: iron regulated metal transporter [Oryza sativa]
MSWRRNQLRAFLVLAVILLITAATYRANAQPAPPADPTPAADTCADPSVEGACRNVPKALRLKLIAIPTILVSSVIGVCLPLLSRSVPALRPDRNLFVIVKAFASGVILATGYMHVLPDSFSNLTSPCLPRKPWADFSFTTFVAMLAALFTLMVDSLMLSFYNRRKGGNTSGRRTSGAVADHESPAHEHHWHSHGHGHGHGHAGGIVVADKPEDDEASQVQLRRNRVVVQVLEMGIVVHSVVIGLGMGASQNVCTIRPLVTAMCFHQLFEGMGLGGCILQAEYGAKMKAGLVFFFSTTTPFGIALGLALTKVYRENSPTALIVVGLLNAASAGLLHYMALVELLAADFMGPKLQSSVRLQLLCFLAVLLGAGGMSIMAKWA

SEQ ID NO: 19590 - protein, 268 aa, Zea mays subsp. mays
  peptide (1)..(268): Ceres Seq. ID no. 12367971
  misc_feature (1)..(265): Pfam Name: ZIP Zinc transporter Pfam Description: ZIP Zinc transporter
  misc_feature (81)..(268): Homolog of NCBI NO: 22328811 NR Description: Fe(II) transport protein
  misc_feature (1)..(268): Homolog of NCBI NO: 4836771 NR Description: iron-regulated transporter 1 [Lycopersicon
  misc_feature (1)..(52): Homolog of NCBI NO: 16304676 NR Description: putative Fe(II) transporter [Thlaspi caerulescens]
  misc_feature (81)..(268): Homolog of NCBI NO: 16304676 NR Description: putative Fe(II) transporter [Thlaspi caerulescens]
  misc_feature (1)..(268): Homolog of NCBI NO: 4836773 NR Description: iron-regulated transporter 2 [Lycopersicon
  misc_feature (1)..(268): Homolog of NCBI NO: 27549575 NR Description: root iron transporter protein IRT1 [Malus
  misc_feature (1)..(268): Homolog of NCBI NO: 40538928 NR Description: putative metal transporter (with alternative
  misc_feature (1)..(268): Homolog of NCBI NO: 40888850 NR Description: TPA: iron regulated transporter-like protein
  misc_feature (1)..(268): Homolog of NCBI NO: 32966055 NR Description: iron transporter Fe3 [Oryza sativa (japonica
  misc_feature (1)..(268): Homolog of NCBI NO: 18700309 NR Description: iron regulated metal transporter [Oryza sativa]
MHVLPDSFSNLTSPCLPRKPWADFSFTTFVAMLAALFTLMVDSLMLSFYNRRKGGNTSGRRTSGAVADHESPAHEHHWHSHGHGHGHGHAGGIVVADKPEDDEASQVQLRRNRVVVQVLEMGIVVHSVVIGLGMGASQNVCTIRPLVTAMCFHQLFEGMGLGGCILQAEYGAKMKAGLVFFFSTTTPFGIALGLALTKVYRENSPTALIVVGLLNAASAGLLHYMALVELLAADFMGPKLQSSVRLQLLCFLAVLLGAGGMSIMAKWA

SEQ ID NO: 19591 - DNA, 1584 bp, Zea mays subsp. mays
  misc_feature (1)..(1584): Ceres Seq. ID no. 12375563
  misc_feature: MA Experiment ID: 108523 Result: Up-regulated in Transcription
  misc_feature: MA Experiment 108523 PARAMETER Experiment Name: Zm_42deg_Heat_P Parameter: Age (day) Value: 8
  misc_feature: MA Experiment 108523 PARAMETER Experiment Name: Zm_42deg_Heat_P Parameter: Organism Value: Zea mays
  misc_feature: MA Experiment 108523 PARAMETER Experiment Name: Zm_42deg_Heat_P Parameter: Plant Line Value: 35A19
  misc_feature: MA Experiment 108523 PARAMETER Experiment Name: Zm_42deg_Heat_P Parameter: Temperature (deg C) Value: 42 vs. 22
  misc_feature: MA Experiment 108523 PARAMETER Experiment Name: Zm_42deg_Heat_P Parameter: Timepoint (hr) Value: 6
  misc_feature: MA Experiment 108523 PARAMETER Experiment Name: Zm_42deg_Heat_P Parameter: Tissue Value: Aerial
  misc_feature: MA Experiment ID: 108689 Result: Down-regulated in Transcription
  misc_feature: MA Experiment 108689 PARAMETER Experiment Name: Zm_Drought_Roots_P Parameter: Age (day) Value: 9
  misc_feature: MA Experiment 108689 PARAMETER Experiment Name: Zm_Drought_Roots_P Parameter: Organism Value: Zea mays
  misc_feature: MA Experiment 108689 PARAMETER Experiment Name: Zm_Drought_Roots_P Parameter: Plant Line Value: 35A19
  misc_feature: MA Experiment 108689 PARAMETER Experiment Name: Zm_Drought_Roots_P Parameter: Timepoint (hr) Value: 24
  misc_feature: MA Experiment 108689 PARAMETER Experiment Name: Zm_Drought_Roots_P Parameter: Tissue Value: Roots
  misc_feature: MA Experiment 108689 PARAMETER Experiment Name: Zm_Drought_Roots_P Parameter: Treatment Value: Drought vs. No Drought
gcacgagaccattacctagaacatcctaatcgaaaaatcgcaccccgcaccccgctcctccctcctcctgctccggctcccttcctccacagctcgaataaagtcccctcctcttccagtcttcctcctccgcgctccaatcttcccagcggcacggtttcggttcttgcagagtagcacggaggttccttcgttgggggttcttggtctgccttgagcgatttggtgcgccgcggattgttgtgtggttgtgagttgtgactgcagagacaagggccgtgtggagagtcgagccatcgaggtcgaggaggagggaagggaaaaggggggcgcatgggcggccagtggctgggggaggggatgccgtcgtccaacctgcagtgcttcttggactgcaccacccccaccgtcgagacgcacattctccccaagacgaatggacgattgccgaccgacgcctggcaccacgctgagatggacagcgtcgagtacttcaatcttgccgacctctgggaacagtactatgaatggagcgcgtacggcgccggagctacggtgcagctcccaggaggggacagagtagttcagtactatgttccatacctgtcagggatgcagctatacaccaacaaggtcctgactgcatccagaagttttggtgaagataatggcatggatttatggagtgatgatgaggacaacgagaagatgtcgagatcctggagttccacctctgatgaatcattgttcaactgtgatgtgttatggtccaacaggaagcgtccagggcacctgtactttgagttctttgaagtaggttcaccttatggaagggttcctctcattgacaaggtttatgaactatcccagggctttcctggattgacatcactgaagagtgctgagctttcgcctgttagctggatgtcagttgcctggtaccctatataccacattccttaccagcgcagcgtgaaggacttatctgcatgcttcctaacttaccataccatttcctcctcgtttcaagatcacgggcttgagaccatgaccactgattgttgccatccagttgcaaacggcaaacaaaatggccacatggataagaagagcaacaccgtatcactgcctccatttggcctcgcagcacacaagatacaaggttccctctggaccaaccccatgacaggagaccgcagaaagatggacttcctcttcagtgcggcagactcctggctgaagcagcttggagtccagcatcatgacttcaacttcttcatcactcaccccatgtgaactgctgatccggagtggcttgcaaagaaccacatgggtacagtttgaagctagttatattacctacaccaccaccaacggggtagcaaaacgtttacagtacaatgcactggtgaaacgagtctaacaatcgcaggatagatttatacttgagtttactgctgcagcgaataccaaacatgtcggcactcaaaaaggttttctgtttcttgtttcttggcagaaaatgtaactgatctgtacagaagttttgcaactaatttggtatccaatgtgggggttggatcc

SEQ ID NO: 19592 - protein, 320 aa, Zea mays subsp. mays
  peptide (1)..(320): Ceres Seq. ID no. 12375564
  misc_feature (13)..(315): Pfam Name: Protein of unknown function (DUF789) Pfam Description: Protein of unknown function (DUF789)
  misc_feature (245)..(317): Homolog of NCBI NO: 18417136 NR Description: putative protein
  misc_feature (13)..(233): Homolog of NCBI NO: 18417136 NR Description: putative protein
  misc_feature (245)..(319): Homolog of NCBI NO: 21594686 NR Description: unknown [Arabidopsis thaliana]
  misc_feature (13)..(233): Homolog of NCBI NO: 21594686 NR Description: unknown [Arabidopsis thaliana]
  misc_feature (13)..(320): Homolog of NCBI NO: 18958013 NR Description: At1g03610/F21B7_13 [Arabidopsis thaliana]
  misc_feature (13)..(320): Homolog of NCBI NO: 18379117 NR Description: expressed protein
  misc_feature (13)..(320): Homolog of NCBI NO: 9280648 NR Description: F21B7.22 [Arabidopsis thaliana]
  misc_feature (13)..(315): Homolog of NCBI NO: 25373431 NR Description: hypothetical protein AT4g03420 [imported] -
  misc_feature (13)..(315): Homolog of NCBI NO: 22328289 NR Description: hypothetical protein
  misc_feature (1)..(320): Homolog of NCBI NO: 37535654 NR Description: unknown protein [Oryza sativa (japonica
MGGQWLGEGMPSSNLQCFLDCTTPTVETHILPKTNGRLPTDAWHHAEMDSVEYFNLADLWEQYYEWSAYGAGATVQLPGGDRVVQYYVPYLSGMQLYTNKVLTASRSFGEDNGMDLWSDDEDNEKMSRSWSSTSDESLFNCDVLWSNRKRPGHLYFEFFEVGSPYGRVPLIDKVYELSQGFPGLTSLKSAELSPVSWMSVAWYPIYHIPYQRSVKDLSACFLTYHTISSSFQDHGLETMTTDCCHPVANGKQNGHMDKKSNTVSLPPFGLAAHKIQGSLWTNPMTGDRRKMDFLFSAADSWLKQLGVQHHDFNFFITHPM

SEQ ID NO: 19593 - protein, 311 aa, Zea mays subsp. mays
  peptide (1)..(311): Ceres Seq. ID no. 12375565
  misc_feature (4)..(306): Pfam Name: Protein of unknown function (DUF789) Pfam Description: Protein of unknown function (DUF789)
  misc_feature (236)..(308): Homolog of NCBI NO: 18417136 NR Description: putative protein
  misc_feature (4)..(224): Homolog of NCBI NO: 18417136 NR Description: putative protein
  misc_feature (236)..(310): Homolog of NCBI NO: 21594686 NR Description: unknown [Arabidopsis thaliana]
  misc_feature (4)..(224): Homolog of NCBI NO: 21594686 NR Description: unknown [Arabidopsis thaliana]
  misc_feature (4)..(311): Homolog of NCBI NO: 18958013 NR Description: At1g03610/F21B7_13 [Arabidopsis thaliana]
  misc_feature (4)..(311): Homolog of NCBI NO: 18379117 NR Description: expressed protein
  misc_feature (4)..(311): Homolog of NCBI NO: 9280648 NR Description: F21B7.22 [Arabidopsis thaliana]
  misc_feature (4)..(306): Homolog of NCBI NO: 25373431 NR Description: hypothetical protein AT4g03420 [imported] -
  misc_feature (4)..(306): Homolog of NCBI NO: 22328289 NR Description: hypothetical protein
  misc_feature (1)..(311): Homolog of NCBI NO: 37535654 NR Description: unknown protein [Oryza sativa (japonica
MPSSNLQCFLDCTTPTVETHILPKTNGRLPTDAWHHAEMDSVEYFNLADLWEQYYEWSAYGAGATVQLPGGDRVVQYYVPYLSGMQLYTNKVLTASRSFGEDNGMDLWSDDEDNEKMSRSWSSTSDESLFNCDVLWSNRKRPGHLYFEFFEVGSPYGRVPLIDKVYELSQGFPGLTSLKSAELSPVSWMSVAWYPIYHIPYQRSVKDLSACFLTYHTISSSFQDHGLETMTTDCCHPVANGKQNGHMDKKSNTVSLPPFGLAAHKIQGSLWTNPMTGDRRKMDFLFSAADSWLKQLGVQHHDFNFFITHPM

SEQ ID NO: 19594 - protein, 273 aa, Zea mays subsp. mays
  peptide (1)..(273): Ceres Seq. ID no. 12375566
  misc_feature (1)..(268): Pfam Name: Protein of unknown function (DUF789) Pfam Description: Protein of unknown function (DUF789)
  misc_feature (198)..(270): Homolog of NCBI NO: 18417136 NR Description: putative protein
  misc_feature (1)..(186): Homolog of NCBI NO: 18417136 NR Description: putative protein
  misc_feature (198)..(272): Homolog of NCBI NO: 21594686 NR Description: unknown [Arabidopsis thaliana]
  misc_feature (1)..(186): Homolog of NCBI NO: 21594686 NR Description: unknown [Arabidopsis thaliana]
  misc_feature (1)..(273): Homolog of NCBI NO: 18958013 NR Description: At1g03610/F21B7_13 [Arabidopsis thaliana]
  misc_feature (1)..(273): Homolog of NCBI NO: 18379117 NR Description: expressed protein
  misc_feature (1)..(273): Homolog of NCBI NO: 9280648 NR Description: F21B7.22 [Arabidopsis thaliana]
  misc_feature (1)..(268): Homolog of NCBI NO: 25373431 NR Description: hypothetical protein AT4g03420 [imported] -
  misc_feature (1)..(268): Homolog of NCBI NO: 22328289 NR Description: hypothetical protein
  misc_feature (1)..(273): Homolog of NCBI NO: 37535654 NR Description: unknown protein [Oryza sativa (japonica
MDSVEYFNLADLWEQYYEWSAYGAGATVQLPGGDRVVQYYVPYLSGMQLYTNKVLTASRSFGEDNGMDLWSDDEDNEKMSRSWSSTSDESLFNCDVLWSNRKRPGHLYFEFFEVGSPYGRVPLIDKVYELSQGFPGLTSLKSAELSPVSWMSVAWYPIYHIPYQRSVKDLSACFLTYHTISSSFQDHGLETMTTDCCHPVANGKQNGHMDKKSNTVSLPPFGLAAHKIQGSLWTNPMTGDRRKMDFLFSAADSWLKQLGVQHHDFNFFITHPM

SEQ ID NO: 19595 - DNA, 433 bp, Zea mays subsp. mays
  misc_feature (1)..(433): Ceres Seq. ID no. 2789525
  misc_feature: MA Experiment ID: 108689 Result: Up-regulated in Transcription
  misc_feature: MA Experiment 108689 PARAMETER Experiment Name: Zm_Drought_Roots_P Parameter: Age (day) Value: 9
  misc_feature: MA Experiment 108689 PARAMETER Experiment Name: Zm_Drought_Roots_P Parameter: Organism Value: Zea mays
  misc_feature: MA Experiment 108689 PARAMETER Experiment Name: Zm_Drought_Roots_P Parameter: Plant Line Value: 35A19
  misc_feature: MA Experiment 108689 PARAMETER Experiment Name: Zm_Drought_Roots_P Parameter: Timepoint (hr) Value: 24
  misc_feature: MA Experiment 108689 PARAMETER Experiment Name: Zm_Drought_Roots_P Parameter: Tissue Value: Roots
  misc_feature: MA Experiment 108689 PARAMETER Experiment Name: Zm_Drought_Roots_P Parameter: Treatment Value: Drought vs. No Drought
  misc_feature: MA Experiment ID: 20000487 Result: Up-regulated in Transcription
  misc_feature: MA Experiment 20000487 PARAMETER Experiment Name: Zm_50mM_NH4NO3_L_to_H_P Parameter: Organism Value: Zea mays
  misc_feature: MA Experiment 20000487 PARAMETER Experiment Name: Zm_50mM_NH4NO3_L_to_H_P Parameter: Timepoint (hr) Value: 4
  misc_feature: MA Experiment 20000487 PARAMETER Experiment Name: Zm_50mM_NH4NO3_L_to_H_P Parameter: Tissue Value: Leaves
  misc_feature: MA Experiment 20000487 PARAMETER Experiment Name: Zm_50mM_NH4NO3_L_to_H_P Parameter: Treatment Value: 50mM NH4NO3 vs. 100mM Mannitol
catgttcgttggtctgcaaggttctggtaaaactactacttgtacaaaatatgcttattatcatcagaagaaaggattcaaaccagcactggtttgtgctgatacatttagggctggtgcttttgatcagttaaagcaaaatgcaacgaaggccaagattcccttttatggaagctacatggaatctgatccagtgaaaattgctgttgagggtgtggagaggttcaagaaagaaaactgtgatctcatcattgtggacacaagtggaaggcacaaacaagaagcggcactctttgaagaaatgcggcaagtttcggaagcaacaaaaccagacctggtgatttttgtgatggacagtagtattggtcaggctgcatttgatcaagcacaggcatttaaacaaagtgtttctgttggtgcctgtgawtattac

SEQ ID NO: 19596 - protein, 144 aa, Zea mays subsp. mays
  peptide (1)..(144): Ceres Seq. ID no. 2789526
  misc_feature (1)..(140): Homolog of NCBI NO: 1711510 NR Description: Signal recognition particle 54 kDa protein 2
  misc_feature (1)..(140): Homolog of NCBI NO: 1711509 NR Description: SIGNAL RECOGNITION PARTICLE 54 KD PROTEIN 1
  misc_feature (1)..(140): Homolog of NCBI NO: 33235565 NR Description: signal recognition particle 54kDa subunit
  misc_feature (1)..(140): Homolog of NCBI NO: 2119055 NR Description: signal recognition particle 54K protein - tomato
  misc_feature (1)..(140): Homolog of NCBI NO: 1711511 NR Description: SIGNAL RECOGNITION PARTICLE 54 KD PROTEIN 2
  misc_feature (1)..(140): Homolog of NCBI NO: 1711508 NR Description: SIGNAL RECOGNITION PARTICLE 54 KD PROTEIN 1
  misc_feature (1)..(140): Homolog of NCBI NO: 18402407 NR Description: signal recognition particle 54 kDa protein 2
  misc_feature (1)..(140): Homolog of NCBI NO: 515681 NR Description: signal recognition particle 54 kDa subunit
  misc_feature (1)..(140): Homolog of NCBI NO: 1711512 NR Description: SIGNAL RECOGNITION PARTICLE 54 KD PROTEIN 2
  misc_feature (1)..(140): Homolog of NCBI NO: 34909956 NR Description: putative signal recognition particle 54K protein
  misc_feature (142)..(142): Xaa is any aa, unknown or other
MFVGLQGSGKTTTCTKYAYYHQKKGFKPALVCADTFRAGAFDQLKQNATKAKIPFYGSYMESDPVKIAVEGVERFKKENCDLIIVDTSGRHKQEAALFEEMRQVSEATKPDLVIFVMDSSIGQAAFDQAQAFKQSVSVGACXYY

SEQ ID NO: 19597 - protein, 85 aa, Zea mays subsp. mays
  peptide (1)..(85): Ceres Seq. ID no. 2789527
  misc_feature (1)..(81): Homolog of NCBI NO: 1711510 NR Description: Signal recognition particle 54 kDa protein 2
  misc_feature (1)..(81): Homolog of NCBI NO: 1711509 NR Description: SIGNAL RECOGNITION PARTICLE 54 KD PROTEIN 1
  misc_feature (1)..(81): Homolog of NCBI NO: 33235565 NR Description: signal recognition particle 54kDa subunit
  misc_feature (1)..(81): Homolog of NCBI NO: 2119055 NR Description: signal recognition particle 54K protein - tomato
  misc_feature (1)..(81): Homolog of NCBI NO: 1711511 NR Description: SIGNAL RECOGNITION PARTICLE 54 KD PROTEIN 2
  misc_feature (1)..(81): Homolog of NCBI NO: 1711508 NR Description: SIGNAL RECOGNITION PARTICLE 54 KD PROTEIN 1
  misc_feature (1)..(81): Homolog of NCBI NO: 18402407 NR Description: signal recognition particle 54 kDa protein 2
  misc_feature (1)..(81): Homolog of NCBI NO: 515681 NR Description: signal recognition particle 54 kDa subunit
  misc_feature (1)..(81): Homolog of NCBI NO: 1711512 NR Description: SIGNAL RECOGNITION PARTICLE 54 KD PROTEIN 2
  misc_feature (1)..(81): Homolog of NCBI NO: 34909956 NR Description: putative signal recognition particle 54K protein
  misc_feature (83)..(83): Xaa is any aa, unknown or other
MESDPVKIAVEGVERFKKENCDLIIVDTSGRHKQEAALFEEMRQVSEATKPDLVIFVMDSSIGQAAFDQAQAFKQSVSVGACXYY

SEQ ID NO: 19598 - DNA, 675 bp, Zea mays subsp. mays
  misc_feature (1)..(675): Ceres Seq. ID no. 12375559
  misc_feature: MA Experiment ID: 108543 Result: Up-regulated in Transcription
gcacgagaccattacctagaacatcctaatcgaaaaatgttcgtacccaccgccatcactacgcatgccggtccgttaagcttcctccccagcttaccgcgtgctgaaaccctagccgccgaggagccgacgatgtcggacccttacaacccgtactaccgtggagccttcccaggcggcgacggtgcgccgccgccgctgccgccttactcggactttgatgtcgacctcgtcgcgacccgttacaccggcaccccacggtctcatccatcctctgccgacgtcggcgccttcgaatcgcatctcggcgcgagacgattcgcggaagttctctatcagtaccaccaatcttgtatgggaagtcatagtactgttggccagagtgagactttatattcatcaattactatggctaagcgccctaggcttgaaagcagccttcctatatatccacaacgaccggggcaaaaggactgtgccttctatatgagcactggaacctgtaagtatggagagacttgcaaatttgaccatccacaatgggttccagagggtggggttccaaactggaaagaggtcctgaatgatgaggattattatcctgagcgaccaggggaaccagattgtccttatttattgagtagtagatgtaagtttaaatctaaatgcaagttc

SEQ ID NO: 19599 - protein, 225 aa, Zea mays subsp. mays
  peptide (1)..(225): Ceres Seq. ID no. 12375560
  misc_feature (154)..(180): Pfam Name: Zinc finger C-x8-C-x5-C-x3-H type (and similar) Pfam Description: Zinc finger C-x8-C-x5-C-x3-H type (and similar)
  misc_feature (154)..(180): Pfam Name: Zinc finger C-x8-C-x5-C-x3-H type (and similar) Pfam Description: Zinc finger C-x8-C-x5-C-x3-H type (and similar)
  misc_feature (150)..(224): Homolog of NCBI NO: 12321969 NR Description: zinc finger protein, putative, 5' partial;
  misc_feature (150)..(224): Homolog of NCBI NO: 11994409 NR Description: zinc finger protein-like [Arabidopsis thaliana]
  misc_feature (151)..(224): Homolog of NCBI NO: 34902926 NR Description: putative zinc finger protein
  misc_feature (113)..(224): Homolog of NCBI NO: 18390466 NR Description: zinc finger protein 2, putative
  misc_feature (150)..(224): Homolog of NCBI NO: 34902926 NR Description: putative zinc finger protein
  misc_feature (150)..(224): Homolog of NCBI NO: 12321969 NR Description: zinc finger protein, putative, 5' partial;
  misc_feature (151)..(224): Homolog of NCBI NO: 34902926 NR Description: putative zinc finger protein
  misc_feature (150)..(224): Homolog of NCBI NO: 34902926 NR Description: putative zinc finger protein
  misc_feature (33)..(194): Homolog of NCBI NO: 34912676 NR Description: P0686E09.7 [Oryza sativa (japonica
  misc_feature (103)..(224): Homolog of NCBI NO: 22331028 NR Description: hypothetical protein
  misc_feature (70)..(224): Homolog of NCBI NO: 22507458 NR Description: Unknown (protein for MGC:30371) [Mus musculus]
  misc_feature (163)..(224): Homolog of NCBI NO: 11994409 NR Description: zinc finger protein-like [Arabidopsis thaliana]
  misc_feature (176)..(224): Homolog of NCBI NO: 12321969 NR Description: zinc finger protein, putative, 5' partial;
  misc_feature (113)..(224): Homolog of NCBI NO: 18390466 NR Description: zinc finger protein 2, putative
  misc_feature (150)..(224): Homolog of NCBI NO: 11994409 NR Description: zinc finger protein-like [Arabidopsis thaliana]
  misc_feature (176)..(224): Homolog of NCBI NO: 12321969 NR Description: zinc finger protein, putative, 5' partial;
  misc_feature (163)..(224): Homolog of NCBI NO: 11994409 NR Description: zinc finger protein-like [Arabidopsis thaliana]
  misc_feature (70)..(224): Homolog of NCBI NO: 22507458 NR Description: Unknown (protein for MGC:30371) [Mus musculus]
  misc_feature (103)..(224): Homolog of NCBI NO: 22331028 NR Description: hypothetical protein
  misc_feature (33)..(194): Homolog of NCBI NO: 34912676 NR Description: P0686E09.7 [Oryza sativa (japonica
ARDHYLEHPNRKMFVPTAITTHAGPLSFLPSLPRAETLAAEEPTMSDPYNPYYRGAFPGGDGAPPPLPPYSDFDVDLVATRYTGTPRSHPSSADVGAFESHLGARRFAEVLYQYHQSCMGSHSTVGQSETLYSSITMAKRPRLESSLPIYPQRPGQKDCAFYMSTGTCKYGETCKFDHPQWVPEGGVPNWKEVLNDEDYYPERPGEPDCPYLLSSRCKFKSKCKF

SEQ ID NO: 19600 - protein, 213 aa, Zea mays subsp. mays
  peptide (1)..(213): Ceres Seq. ID no. 12375561
  misc_feature (142)..(168): Pfam Name: Zinc finger C-x8-C-x5-C-x3-H type (and similar) Pfam Description: Zinc finger C-x8-C-x5-C-x3-H type (and similar)
  misc_feature (142)..(168): Pfam Name: Zinc finger C-x8-C-x5-C-x3-H type (and similar) Pfam Description: Zinc finger C-x8-C-x5-C-x3-H type (and similar)
  misc_feature (138)..(212): Homolog of NCBI NO: 12321969 NR Description: zinc finger protein, putative, 5' partial;
  misc_feature (138)..(212): Homolog of NCBI NO: 11994409 NR Description: zinc finger protein-like [Arabidopsis thaliana]
  misc_feature (139)..(212): Homolog of NCBI NO: 34902926 NR Description: putative zinc finger protein
  misc_feature (101)..(212): Homolog of NCBI NO: 18390466 NR Description: zinc finger protein 2, putative
  misc_feature (138)..(212): Homolog of NCBI NO: 34902926 NR Description: putative zinc finger protein
  misc_feature (138)..(212): Homolog of NCBI NO: 12321969 NR Description: zinc finger protein, putative, 5' partial;
  misc_feature (139)..(212): Homolog of NCBI NO: 34902926 NR Description: putative zinc finger protein
  misc_feature (138)..(212): Homolog of NCBI NO: 34902926 NR Description: putative zinc finger protein
  misc_feature (21)..(182): Homolog of NCBI NO: 34912676 NR Description: P0686E09.7 [Oryza sativa (japonica
  misc_feature (91)..(212): Homolog of NCBI NO: 22331028 NR Description: hypothetical protein
  misc_feature (58)..(212): Homolog of NCBI NO: 22507458 NR Description: Unknown (protein for MGC:30371) [Mus musculus]
  misc_feature (151)..(212): Homolog of NCBI NO: 11994409 NR Description: zinc finger protein-like [Arabidopsis thaliana]
  misc_feature (164)..(212): Homolog of NCBI NO: 12321969 NR Description: zinc finger protein, putative, 5' partial;
  misc_feature (101)..(212): Homolog of NCBI NO: 18390466 NR Description: zinc finger protein 2, putative
  misc_feature (138)..(212): Homolog of NCBI NO: 11994409 NR Description: zinc finger protein-like [Arabidopsis thaliana]
  misc_feature (164)..(212): Homolog of NCBI NO: 12321969 NR Description: zinc finger protein, putative, 5' partial;
  misc_feature (151)..(212): Homolog of NCBI NO: 11994409 NR Description: zinc finger protein-like [Arabidopsis thaliana]
  misc_feature (58)..(212): Homolog of NCBI NO: 22507458 NR Description: Unknown (protein for MGC:30371) [Mus musculus]
  misc_feature (91)..(212): Homolog of NCBI NO: 22331028 NR Description: hypothetical protein
  misc_feature (21)..(182): Homolog of NCBI NO: 34912676 NR Description: P0686E09.7 [Oryza sativa (japonica
MFVPTAITTHAGPLSFLPSLPRAETLAAEEPTMSDPYNPYYRGAFPGGDGAPPPLPPYSDFDVDLVATRYTGTPRSHPSSADVGAFESHLGARRFAEVLYQYHQSCMGSHSTVGQSETLYSSITMAKRPRLESSLPIYPQRPGQKDCAFYMSTGTCKYGETCKFDHPQWVPEGGVPNWKEVLNDEDYYPERPGEPDCPYLLSSRCKFKSKCKF

SEQ ID NO: 19601 - protein, 181 aa, Zea mays subsp. mays
  peptide (1)..(181): Ceres Seq. ID no. 12375562
  misc_feature (110)..(136): Pfam Name: Zinc finger C-x8-C-x5-C-x3-H type (and similar) Pfam Description: Zinc finger C-x8-C-x5-C-x3-H type (and similar)
  misc_feature (110)..(136): Pfam Name: Zinc finger C-x8-C-x5-C-x3-H type (and similar) Pfam Description: Zinc finger C-x8-C-x5-C-x3-H type (and similar)
  misc_feature (106)..(180): Homolog of NCBI NO: 12321969 NR Description: zinc finger protein, putative, 5' partial;
  misc_feature (106)..(180): Homolog of NCBI NO: 11994409 NR Description: zinc finger protein-like [Arabidopsis thaliana]
  misc_feature (107)..(180): Homolog of NCBI NO: 34902926 NR Description: putative zinc finger protein
  misc_feature (69)..(180): Homolog of NCBI NO: 18390466 NR Description: zinc finger protein 2, putative
  misc_feature (106)..(180): Homolog of NCBI NO: 34902926 NR Description: putative zinc finger protein
  misc_feature (106)..(180): Homolog of NCBI NO: 12321969 NR Description: zinc finger protein, putative, 5' partial;
  misc_feature (107)..(180): Homolog of NCBI NO: 34902926 NR Description: putative zinc finger protein
  misc_feature (106)..(180): Homolog of NCBI NO: 34902926 NR Description: putative zinc finger protein
  misc_feature (1)..(150): Homolog of NCBI NO: 34912676 NR Description: P0686E09.7 [Oryza sativa (japonica
  misc_feature (59)..(180): Homolog of NCBI NO: 22331028 NR Description: hypothetical protein
  misc_feature (26)..(180): Homolog of NCBI NO: 22507458 NR Description: Unknown (protein for MGC:30371) [Mus musculus]
  misc_feature (119)..(180): Homolog of NCBI NO: 11994409 NR Description: zinc finger protein-like [Arabidopsis thaliana]
  misc_feature (132)..(180): Homolog of NCBI NO: 12321969 NR Description: zinc finger protein, putative, 5' partial;
  misc_feature (69)..(180): Homolog of NCBI NO: 18390466 NR Description: zinc finger protein 2, putative
  misc_feature (106)..(180): Homolog of NCBI NO: 11994409 NR Description: zinc finger protein-like [Arabidopsis thaliana]
  misc_feature (132)..(180): Homolog of NCBI NO: 12321969 NR Description: zinc finger protein, putative, 5' partial;
  misc_feature (119)..(180): Homolog of NCBI NO: 11994409 NR Description: zinc finger protein-like [Arabidopsis thaliana]
  misc_feature (26)..(180): Homolog of NCBI NO: 22507458 NR Description: Unknown (protein for MGC:30371) [Mus musculus]
  misc_feature (59)..(180): Homolog of NCBI NO: 22331028 NR Description: hypothetical protein
  misc_feature (1)..(150): Homolog of NCBI NO: 34912676 NR Description: P0686E09.7 [Oryza sativa (japonica
MSDPYNPYYRGAFPGGDGAPPPLPPYSDFDVDLVATRYTGTPRSHPSSADVGAFESHLGARRFAEVLYQYHQSCMGSHSTVGQSETLYSSITMAKRPRLESSLPIYPQRPGQKDCAFYMSTGTCKYGETCKFDHPQWVPEGGVPNWKEVLNDEDYYPERPGEPDCPYLLSSRCKFKSKCKF

SEQ ID NO: 19602 - DNA, 1787 bp, Zea mays subsp. mays
  misc_feature (1)..(1787): Ceres Seq. ID no. 12418176
  misc_feature: MA Experiment ID: 108543 Result: Up-regulated in Transcription
  misc_feature: MA Experiment ID: 108545 Result: Up-regulated in Transcription
  misc_feature: MA Experiment 108545 PARAMETER Experiment Name: Zm_Imbibed_Seeds_P Parameter: Age (day) Value: 3 vs. 2
  misc_feature: MA Experiment 108545 PARAMETER Experiment Name: Zm_Imbibed_Seeds_P Parameter: Organism Value: Zea mays
  misc_feature: MA Experiment 108545 PARAMETER Experiment Name: Zm_Imbibed_Seeds_P Parameter: Plant Line Value: 35A19
  misc_feature: MA Experiment 108545 PARAMETER Experiment Name: Zm_Imbibed_Seeds_P Parameter: Tissue Value: Aerial vs. Embryo
  misc_feature: MA Experiment ID: 108556 Result: Down-regulated in Transcription
  misc_feature: MA Experiment 108556 PARAMETER Experiment Name: Zm_Drought_P Parameter: Age (day) Value: 9
  misc_feature: MA Experiment 108556 PARAMETER Experiment Name: Zm_Drought_P Parameter: Organism Value: Zea mays
  misc_feature: MA Experiment 108556 PARAMETER Experiment Name: Zm_Drought_P Parameter: Plant Line Value: 35A19
  misc_feature: MA Experiment 108556 PARAMETER Experiment Name: Zm_Drought_P Parameter: Timepoint (hr) Value: 24
  misc_feature: MA Experiment 108556 PARAMETER Experiment Name: Zm_Drought_P Parameter: Tissue Value: Aerial
  misc_feature: MA Experiment 108556 PARAMETER Experiment Name: Zm_Drought_P Parameter: Treatment Value: Drought vs. No Drought
  misc_feature: MA Experiment ID: 108687 Result: Down-regulated in Transcription
  misc_feature: MA Experiment 108687 PARAMETER Experiment Name: Zm_Embryos-Flowers__P Parameter: Tissue Value: Embryo vs. Aerial+
  misc_feature: MA Experiment ID: 20000477 Result: Down-regulated in Transcription
  misc_feature: MA Experiment 20000477 PARAMETER Experiment Name: Zm_5mM_SA_P Parameter: Age (day) Value: 10
  misc_feature: MA Experiment 20000477 PARAMETER Experiment Name: Zm_5mM_SA_P Parameter: Organism Value: Zea mays
  misc_feature: MA Experiment 20000477 PARAMETER Experiment Name: Zm_5mM_SA_P Parameter: Plant Line Value: 35A19
  misc_feature: MA Experiment 20000477 PARAMETER Experiment Name: Zm_5mM_SA_P Parameter: Timepoint (hr) Value: 48
  misc_feature: MA Experiment 20000477 PARAMETER Experiment Name: Zm_5mM_SA_P Parameter: Tissue Value: Aerial
  misc_feature: MA Experiment 20000477 PARAMETER Experiment Name: Zm_5mM_SA_P Parameter: Treatment Value: 5mM SA vs. No Treatment
  misc_feature: MA Experiment ID: 20000478 Result: Down-regulated in Transcription
  misc_feature: MA Experiment 20000478 PARAMETER Experiment Name: Zm_5mM_SA_P Parameter: Age (day) Value: 11
  misc_feature: MA Experiment 20000478 PARAMETER Experiment Name: Zm_5mM_SA_P Parameter: Organism Value: Zea mays
  misc_feature: MA Experiment 20000478 PARAMETER Experiment Name: Zm_5mM_SA_P Parameter: Plant Line Value: 35A19
  misc_feature: MA Experiment 20000478 PARAMETER Experiment Name: Zm_5mM_SA_P Parameter: Timepoint (hr) Value: 72
  misc_feature: MA Experiment 20000478 PARAMETER Experiment Name: Zm_5mM_SA_P Parameter: Tissue Value: Aerial
  misc_feature: MA Experiment 20000478 PARAMETER Experiment Name: Zm_5mM_SA_P Parameter: Treatment Value: 5mM SA vs. No Treatment
  misc_feature: MA Experiment ID: 20000632 Result: Down-regulated in Transcription
  misc_feature: MA Experiment 20000632 PARAMETER Experiment Name: Zm_Herbicide-Treatments_P Parameter: Timepoint (hr) Value: 4
  misc_feature: MA Experiment 20000632 PARAMETER Experiment Name: Zm_Herbicide-Treatments_P Parameter: Tissue Value: Aerial
  misc_feature: MA Experiment 20000632 PARAMETER Experiment Name: Zm_Herbicide-Treatments_P Parameter: Treatment Value: Glean vs. No Treatment
gcacgagaccattacctagaacatcctaatcgaaaaactttccctccttgccacttcggattctcctcctctgcctttcgcttcgtcactcgccacgccacgccaaagaccaagaaaaaaaaggacgattttttcctagctgcaacttccctcacgccatggaggaggagatgccgctgcagctgctctccgcttcctccgccgccgtcgctgtctgagctcccccttcgctcgatctctccatcgggccgggcctacctctcctagcagtgaatcaaaccatggcagctttcgccgcgctgttcgaccccctgtactgcccggaggagcacctcgatctgtaccgcgacgaacccggcgagggtgcggacgagcagtggccgggccagcacggacagcaggagccggctgtcctcgacgacgagctgccggcactgttcgaggcacaccgggccaaggagggggtggtgctggcggaggatggcgggtacggcggcgcagctgggcgtgaggccgcggtcggctgggtttcacgcgccgcggcgcggctaggcttctccgcgctcaccgccgcgctcgccgccgcctacctcgaccgctgcttcctccccgggggcgcgctccggctcggcgaccagccctggatggcgcgcctagccgccgtcacctgcttcgcgctcgccgccaaggtcgaggagacgcgcgtgccgccgctcctcgacctccagctctacgccgccgctgacgccgcggatccgtacgtattcgaggccaagacggtgcgccggatggagctgctcgtgctctccgcgcttgggtggcggatgcaccctgtcacgcccttctcctacctccagcccgtcctcgccgacgctgcgacgcgcctgcgtagctgcgagggcgtcctgctcgcggtcatggccgactggaggtggcctcggcaccggccttcggcgtgggccgccgccgcgttgctgatcacagccgccgccggcgacggcgacacggagctcctggcgctcatcaatgcccccgaggacaagaccgccgagtgtgccaagatcatctccgaggtgacgggcatgagcttcctcgcctgcgatgtcggcgtgagcgccggaaataagcgtaagcacgcggcggcgcagttgtactcgccgccgccgagcccgagcggcgtgatcggcgcgctgtcctgcttcagctgcgagagctcgacgtccgccaccgctatggctgcggcggtcggcccgtgggcgccgtcggcgtccgtgtccgtgtcgtcctctccagagccaccaggtcgggcccccaagcgcgcagcggcggcgtcggcgtcggcgtcggcgtcagccggggtcgcgccaccggtccaggtcccgcatcagctaccccccgacgaggagagccgcggcgcctggccgtccacctgcgccgcgtgacgcaccgtgccggaaacggtgcctatggcgagaccgccgttcggtggcggtggagaatggagaacaaggagcatcattggctcgcgtcggtgagcaggagaacgaactattttgcccattgccgtgacagatggggggcaagagagataagaaaagatgtccttgtttgcatgcttatggcgggagtaatgtttgcatgcttgtggcagcacattttgcaatgatggttctcagagaacttagctggaggtggaagatgattagcggataatttgccgtcgagatcgatggcgatttagtatttgttgcaactgtagtgatgctagttcttgccgtgttcttgtt

SEQ ID NO: 19603 - protein, 386 aa, Zea mays subsp. mays
  peptide (1)..(386): Ceres Seq. ID no. 12418177
  misc_feature (47)..(183): Pfam Name: Cyclin, N-terminal domain Pfam Description: Cyclin, N-terminal domain
  misc_feature (7)..(337): Homolog of NCBI NO: 33517434 NR Description: cyclin D3-1 [Euphorbia esula]
  misc_feature (1)..(315): Homolog of NCBI NO: 6434199 NR Description: CycD3;2 [Lycopersicon esculentum]
  misc_feature (9)..(339): Homolog of NCBI NO: 21745138 NR Description: cyclin D3.1 protein [Lagenaria siceraria]
  misc_feature (74)..(315): Homolog of NCBI NO: 4160300 NR Description: cyclin D3.1 protein [Nicotiana tabacum]
  misc_feature (7)..(337): Homolog of NCBI NO: 15235254 NR Description: Cyclin D3;1; protein id: At4g34160.1 [Arabidopsis
  misc_feature (7)..(337): Homolog of NCBI NO: 3915637 NR Description: Cyclin delta-3
  misc_feature (1)..(339): Homolog of NCBI NO: 5679622 NR Description: cyclin D3.1 [Lycopersicon esculentum]
  misc_feature (7)..(357): Homolog of NCBI NO: 27435851 NR Description: cyclin D [Populus tremula x Populus tremuloides]
  misc_feature (47)..(338): Homolog of NCBI NO: 6448482 NR Description: cyclin D3a [Antirrhinum majus]
  misc_feature (7)..(339): Homolog of NCBI NO: 4160302 NR Description: cyclin D3.2 protein [Nicotiana tabacum]
MAAFAALFDPLYCPEEHLDLYRDEPGEGADEQWPGQHGQQEPAVLDDELPALFEAHRAKEGVVLAEDGGYGGAAGREAAVGWVSRAAARLGFSALTAALAAAYLDRCFLPGGALRLGDQPWMARLAAVTCFALAAKVEETRVPPLLDLQLYAAADAADPYVFEAKTVRRMELLVLSALGWRMHPVTPFSYLQPVLADAATRLRSCEGVLLAVMADWRWPRHRPSAWAAAALLITAAAGDGDTELLALINAPEDKTAECAKIISEVTGMSFLACDVGVSAGNKRKHAAAQLYSPPPSPSGVIGALSCFSCESSTSATAMAAAVGPWAPSASVSVSSSPEPPGRAPKRAAAASASASASAGVAPPVQVPHQLPPDEESRGAWPSTCAA

SEQ ID NO: 19604 - protein, 265 aa, Zea mays subsp. mays
  peptide (1)..(265): Ceres Seq. ID no. 12418178
  misc_feature (1)..(62): Pfam Name: Cyclin, N-terminal domain Pfam Description: Cyclin, N-terminal domain
  misc_feature (1)..(194): Homolog of NCBI NO: 6434199 NR Description: CycD3;2 [Lycopersicon esculentum]
  misc_feature (1)..(218): Homolog of NCBI NO: 21745138 NR Description: cyclin D3.1 protein [Lagenaria siceraria]
  misc_feature (1)..(194): Homolog of NCBI NO: 4160300 NR Description: cyclin D3.1 protein [Nicotiana tabacum]
  misc_feature (1)..(216): Homolog of NCBI NO: 15235254 NR Description: Cyclin D3;1; protein id: At4g34160.1 [Arabidopsis
  misc_feature (1)..(216): Homolog of NCBI NO: 3915637 NR Description: Cyclin delta-3
  misc_feature (1)..(216): Homolog of NCBI NO: 33517434 NR Description: cyclin D3-1 [Euphorbia esula]
  misc_feature (1)..(218): Homolog of NCBI NO: 5679622 NR Description: cyclin D3.1 [Lycopersicon esculentum]
  misc_feature (1)..(236): Homolog of NCBI NO: 27435851 NR Description: cyclin D [Populus tremula x Populus tremuloides]
  misc_feature (1)..(217): Homolog of NCBI NO: 6448482 NR Description: cyclin D3a [Antirrhinum majus]
  misc_feature (1)..(218): Homolog of NCBI NO: 4160302 NR Description: cyclin D3.2 protein [Nicotiana tabacum]
MARLAAVTCFALAAKVEETRVPPLLDLQLYAAADAADPYVFEAKTVRRMELLVLSALGWRMHPVTPFSYLQPVLADAATRLRSCEGVLLAVMADWRWPRHRPSAWAAAALLITAAAGDGDTELLALINAPEDKTAECAKIISEVTGMSFLACDVGVSAGNKRKHAAAQLYSPPPSPSGVIGALSCFSCESSTSATAMAAAVGPWAPSASVSVSSSPEPPGRAPKRAAAASASASASAGVAPPVQVPHQLPPDEESRGAWPSTCAA

SEQ ID NO: 19605 - protein, 217 aa, Zea mays subsp. mays
  peptide (1)..(217): Ceres Seq. ID no. 12418179
  misc_feature (16)..(143): Pfam Name: Cyclin, C-terminal domain Pfam Description: Cyclin, C-terminal domain
  misc_feature (1)..(168): Homolog of NCBI NO: 33517434 NR Description: cyclin D3-1 [Euphorbia esula]
  misc_feature (1)..(146): Homolog of NCBI NO: 6434199 NR Description: CycD3;2 [Lycopersicon esculentum]
  misc_feature (1)..(170): Homolog of NCBI NO: 21745138 NR Description: cyclin D3.1 protein [Lagenaria siceraria]
  misc_feature (1)..(146): Homolog of NCBI NO: 4160300 NR Description: cyclin D3.1 protein [Nicotiana tabacum]
  misc_feature (1)..(168): Homolog of NCBI NO: 15235254 NR Description: Cyclin D3;1; protein id: At4g34160.1 [Arabidopsis
  misc_feature (1)..(168): Homolog of NCBI NO: 3915637 NR Description: Cyclin delta-3
  misc_feature (1)..(170): Homolog of NCBI NO: 5679622 NR Description: cyclin D3.1 [Lycopersicon esculentum]
  misc_feature (1)..(188): Homolog of NCBI NO: 27435851 NR Description: cyclin D [Populus tremula x Populus tremuloides]
  misc_feature (1)..(169): Homolog of NCBI NO: 6448482 NR Description: cyclin D3a [Antirrhinum majus]
  misc_feature (1)..(170): Homolog of NCBI NO: 4160302 NR Description: cyclin D3.2 protein [Nicotiana tabacum]
MELLVLSALGWRMHPVTPFSYLQPVLADAATRLRSCEGVLLAVMADWRWPRHRPSAWAAAALLITAAAGDGDTELLALINAPEDKTAECAKIISEVTGMSFLACDVGVSAGNKRKHAAAQLYSPPPSPSGVIGALSCFSCESSTSATAMAAAVGPWAPSASVSVSSSPEPPGRAPKRAAAASASASASAGVAPPVQVPHQLPPDEESRGAWPSTCAA

SEQ ID NO: 19606 - DNA, 1973 bp, Zea mays subsp. mays
  misc_feature (1)..(1973): Ceres Seq. ID no. 15179312
  misc_feature: MA Experiment ID: 108527 Result: Up-regulated in Transcription
  misc_feature: MA Experiment 108527 PARAMETER Experiment Name: Zm_5mM_NO_P Parameter: Age (day) Value: 8
  misc_feature: MA Experiment 108527 PARAMETER Experiment Name: Zm_5mM_NO_P Parameter: Organism Value: Zea mays
  misc_feature: MA Experiment 108527 PARAMETER Experiment Name: Zm_5mM_NO_P Parameter: Plant Line Value: 35A19
  misc_feature: MA Experiment 108527 PARAMETER Experiment Name: Zm_5mM_NO_P Parameter: Timepoint (hr) Value: 6
  misc_feature: MA Experiment 108527 PARAMETER Experiment Name: Zm_5mM_NO_P Parameter: Tissue Value: Aerial
  misc_feature: MA Experiment 108527 PARAMETER Experiment Name: Zm_5mM_NO_P Parameter: Treatment Value: 5mM NO vs. No Treatment
  misc_feature: MA Experiment ID: 108534 Result: Up-regulated in Transcription
  misc_feature: MA Experiment 108534 PARAMETER Experiment Name: Zm_4deg_Cold_P Parameter: Age (hr) Value: 8
  misc_feature: MA Experiment 108534 PARAMETER Experiment Name: Zm_4deg_Cold_P Parameter: Organism Value: Zea mays
  misc_feature: MA Experiment 108534 PARAMETER Experiment Name: Zm_4deg_Cold_P Parameter: Plant Line Value: 35A19
  misc_feature: MA Experiment 108534 PARAMETER Experiment Name: Zm_4deg_Cold_P Parameter: Temperature (deg C) Value: 4 vs. 22
  misc_feature: MA Experiment 108534 PARAMETER Experiment Name: Zm_4deg_Cold_P Parameter: Timepoint (hr) Value: 6
  misc_feature: MA Experiment 108534 PARAMETER Experiment Name: Zm_4deg_Cold_P Parameter: Tissue Value: Aerial
  misc_feature: MA Experiment ID: 20000626 Result: Down-regulated in Transcription
  misc_feature: MA Experiment 20000626 PARAMETER Experiment Name: Zm_Herbicide-Treatments_P Parameter: Timepoint (hr) Value: 12
  misc_feature: MA Experiment 20000626 PARAMETER Experiment Name: Zm_Herbicide-Treatments_P Parameter: Tissue Value: Aerial
  misc_feature: MA Experiment 20000626 PARAMETER Experiment Name: Zm_Herbicide-Treatments_P Parameter: Treatment Value: Roundup vs. No Treatment
  misc_feature: MA Experiment ID: 20000629 Result: Down-regulated in Transcription
  misc_feature: MA Experiment 20000629 PARAMETER Experiment Name: Zm_Herbicide-Treatments_P Parameter: Timepoint (hr) Value: 12
  misc_feature: MA Experiment 20000629 PARAMETER Experiment Name: Zm_Herbicide-Treatments_P Parameter: Tissue Value: Aerial
  misc_feature: MA Experiment 20000629 PARAMETER Experiment Name: Zm_Herbicide-Treatments_P Parameter: Treatment Value: Trimec vs. No Treatment
agcatcgattaccatttccatgtcttgtgcatcttcggattctacccttcccatgctgtgtgtggcctccattcaaatcttttttcaaattggcaaaaaaaaaacactatttatgttgaaacgccttccaaattattaagggcaggcagaccttacttgttttatggctagaaataatgagggtcatctccagctgccagagatggatcatattcaacccaagaacaccccgcacaatgaaccactgcctctaggccagaagcttatgctgcatcatggaagtgatgcaccccttagaattggtcattcaagtcatgagaatatgagacttagatcaaatgatcttccacctttaagtcacactgtgcaaactcaaggttatagagttgggaacccaggagcctcgcatactccttttgttcattgtcatgctggaagttccagtagtcatttaccagaacctgctgtgaattatccacataggtcggaggaaggctttgctccagtgggttcccatatggacaacagaagggctgcaacgaagcgaaaagatcctattgtgcaccctgctgggatcagtgctactggttattatgttggaagttcttccaatactcagctatctaactctgtacagccaaatactgctccactttctgagcccttacttcgtcaaatacctttaagcattgaccgaagtggttgggatggcctacacttaattcatcaagaaggatttcagaggaatgtgagagcatgccagcgccacagtcataatatttcattacagcccagatcagcttcaacctacccactaaacagtgttcatgtgccgtcatttggttcaactacaagtgcttccttaagtatgtcagtggaaaggaaccaagcatctgtttctgtgcaaacaagaaatgtaccatcaggtgcaccaggtatcactagcaggtccctgacaaggagggcttactatcctgtggttggaagtagcaactcaagcgttgatgccgttccaactatccgtggatcatctggcgcagcaatatttgctaatggtggctatgctcttaatgctgatgctggaactgtttctatctaccctaatccagctcctgctacttcatctggctctataaccatgcccatgcccatgctccatcagatggtcattcagagccatccacctgctacctctgcagcaacctctacatccatgtggatcgctcaaccactacctgccagaactgctgcggcttctagacatgcaagacgcgtatcagcagggcttgccaacaatggaaggtacagaagggctaggagctcttactacagccttcatccactgatgatggtagaggcagaggcggttcatgatggaccagttggtcttttacgaatcaagagcagcagccgctgacccccacagggacatgagactggacatcgacaacatgagctacgaggacctgttggctttgggagaatctatgggcaatgtcaacacaggcttggccgatgagaaaatttcgaagtgcgtgaaagaagtggtctgctgcagttccgaccagacgcaaaccgatcaagatgaccaggatgacggaagctgcgtcatctgcctggagggttacagagacaaggatatgctggggatactgaaatgcaggcacgacttccacgccggctgcatcaagaagtggctgcagacgaagaactcgtgcccggtgtgcaaagccgccgccgcctaggacgacaccagaggagcgagcaactattttgtgctcctcctcgatctattcatttttttaggctcaggtcgaattatatatgtcgttccattcttttgattccagccagtcgtgtaaataaatgccgtgtgttggttattttagttatcacttgggttacattagcccaaattctcctgttgcattgtaaacaatccagtggtgaaggcaattgatcaagtgcgttgc

SEQ ID NO: 19607 - protein, 417 aa, Zea mays subsp. mays
  peptide (1)..(417): Ceres Seq. ID no. 15179313
  misc_feature (228)..(400): Homolog of NCBI NO: 34896014 NR Description: ESTs C25947(C11252) correspond to a region of the predicted
  misc_feature (17)..(327): Homolog of NCBI NO: 34896014 NR Description: ESTs C25947(C11252) correspond to a region of the predicted
MARNNEGHLQLPEMDHIQPKNTPHNEPLPLGQKLMLHHGSDAPLRIGHSSHENMRLRSNDLPPLSHTVQTQGYRVGNPGASHTPFVHCHAGSSSSHLPEPAVNYPHRSEEGFAPVGSHMDNRRAATKRKDPIVHPAGISATGYYVGSSSNTQLSNSVQPNTAPLSEPLLRQIPLSIDRSGWDGLHLIHQEGFQRNVRACQRHSHNISLQPRSASTYPLNSVHVPSFGSTTSASLSMSVERNQASVSVQTRNVPSGAPGITSRSLTRRAYYPVVGSSNSSVDAVPTIRGSSGAAIFANGGYALNADAGTVSIYPNPAPATSSGSITMPMPMLHQMVIQSHPPATSAATSTSMWIAQPLPARTAAASRHARRVSAGLANNGRYRRARSSYYSLHPLMMVEAEAVHDGPVGLLRIKSSSR

SEQ ID NO: 19608 - protein, 404 aa, Zea mays subsp. mays
  peptide (1)..(404): Ceres Seq. ID no. 15179314
  misc_feature (215)..(387): Homolog of NCBI NO: 34896014 NR Description: ESTs C25947(C11252) correspond to a region of the predicted
  misc_feature (4)..(314): Homolog of NCBI NO: 34896014 NR Description: ESTs C25947(C11252) correspond to a region of the predicted
MDHIQPKNTPHNEPLPLGQKLMLHHGSDAPLRIGHSSHENMRLRSNDLPPLSHTVQTQGYRVGNPGASHTPFVHCHAGSSSSHLPEPAVNYPHRSEEGFAPVGSHMDNRRAATKRKDPIVHPAGISATGYYVGSSSNTQLSNSVQPNTAPLSEPLLRQIPLSIDRSGWDGLHLIHQEGFQRNVRACQRHSHNISLQPRSASTYPLNSVHVPSFGSTTSASLSMSVERNQASVSVQTRNVPSGAPGITSRSLTRRAYYPVVGSSNSSVDAVPTIRGSSGAAIFANGGYALNADAGTVSIYPNPAPATSSGSITMPMPMLHQMVIQSHPPATSAATSTSMWIAQPLPARTAAASRHARRVSAGLANNGRYRRARSSYYSLHPLMMVEAEAVHDGPVGLLRIKSSSR

SEQ ID NO: 19609 - protein, 383 aa, Zea mays subsp. mays
  peptide (1)..(383): Ceres Seq. ID no. 15179315
  misc_feature (194)..(366): Homolog of NCBI NO: 34896014 NR Description: ESTs C25947(C11252) correspond to a region of the predicted
  misc_feature (1)..(293): Homolog of NCBI NO: 34896014 NR Description: ESTs C25947(C11252) correspond to a region of the predicted
MLHHGSDAPLRIGHSSHENMRLRSNDLPPLSHTVQTQGYRVGNPGASHTPFVHCHAGSSSSHLPEPAVNYPHRSEEGFAPVGSHMDNRRAATKRKDPIVHPAGISATGYYVGSSSNTQLSNSVQPNTAPLSEPLLRQIPLSIDRSGWDGLHLIHQEGFQRNVRACQRHSHNISLQPRSASTYPLNSVHVPSFGSTTSASLSMSVERNQASVSVQTRNVPSGAPGITSRSLTRRAYYPVVGSSNSSVDAVPTIRGSSGAAIFANGGYALNADAGTVSIYPNPAPATSSGSITMPMPMLHQMVIQSHPPATSAATSTSMWIAQPLPARTAAASRHARRVSAGLANNGRYRRARSSYYSLHPLMMVEAEAVHDGPVGLLRIKSSSR

SEQ ID NO: 19610 - DNA, 1485 bp, Zea mays subsp. mays
  misc_feature (1)..(1485): Ceres Seq. ID no. 13496204
  misc_feature: MA Experiment ID: 108535 Result: Up-regulated in Transcription
  misc_feature: MA Experiment 108535 PARAMETER Experiment Name: Zm_Meristem_P Parameter: Age (day) Value: 8
  misc_feature: MA Experiment 108535 PARAMETER Experiment Name: Zm_Meristem_P Parameter: Organism Value: Zea mays
  misc_feature: MA Experiment 108535 PARAMETER Experiment Name: Zm_Meristem_P Parameter: Plant Line Value: 35A19
  misc_feature: MA Experiment 108535 PARAMETER Experiment Name: Zm_Meristem_P Parameter: Tissue Value: Root Meristem vs. Above Root Meristem
  misc_feature: MA Experiment ID: 20000108 Result: Up-regulated in Transcription
  misc_feature: MA Experiment 20000108 PARAMETER Experiment Name: Zm_Root-Tips_P Parameter: Age (day) Value: 12
  misc_feature: MA Experiment 20000108 PARAMETER Experiment Name: Zm_Root-Tips_P Parameter: Organism Value: Zea mays
  misc_feature: MA Experiment 20000108 PARAMETER Experiment Name: Zm_Root-Tips_P Parameter: Tissue Value: Root tips vs. Root mid region    35
  misc_feature: MA Experiment 20000108 PARAMETER Experiment Name: Zm_Root-Tips_P Parameter: Tissue Value: Root tips vs. Root mid region   Sequence Listing-Misc Features (4)
  misc_feature: MA Experiment ID: 20000488 Result: Up-regulated in Transcription
  misc_feature: MA Experiment 20000488 PARAMETER Experiment Name: Zm_50mM_NH4NO3_L_to_H_P Parameter: Organism Value: Zea mays
  misc_feature: MA Experiment 20000488 PARAMETER Experiment Name: Zm_50mM_NH4NO3_L_to_H_P Parameter: Timepoint (hr) Value: 8
  misc_feature: MA Experiment 20000488 PARAMETER Experiment Name: Zm_50mM_NH4NO3_L_to_H_P Parameter: Tissue Value: Leaves
  misc_feature: MA Experiment 20000488 PARAMETER Experiment Name: Zm_50mM_NH4NO3_L_to_H_P Parameter: Treatment Value: 50mM NH4NO3 vs. 100mM Mannitol
tagaacatcctaatcaaaaaaaaagctatcgcttatcatgctaggctaggcagctttgttgagaaggagcacgggggaagcccggcaagatcactacacgtggcatgtatgtccaaaactccaaatgccgagtagacagtggcggcggtagagagcgctgttaccttgcggggtgacgggggcaccttcttcggcgcggctgcagctgcagcatccgccgccgcgccggacgcggaggccgtgctggcgtaccgctcgggcgccgcgccgcgccgcggaaagccgcgaaggagggcgttgcggagggtgcgtcgccacgcgagtgcggtggaagatgacatcgggaacgcgaggggagaccaggcgcgggaagggcgggaggactgtgaagagcgcgaggagggcagcggcggcggcggcggcgctgatgctgatgctggtgcaggggctgatgagccggattcccgttcggcgtggccgcgtggggagcaagcagaagtgcagaactgcacaaggagagggcccacataaccatttctatgatattgcgcgtgtctcagtgtctcggcccagtttttcatgggctgacccggttatgtggccttgttagttttcgcctaatttcaaataacagcaatttcttagtggcccgtacactctgcagcagtgcggtgcgggcgtgcggcctccctttttttctccagttcctccggcggcggcgtgcttggcggtgcgccaggtgcccagatctccaccatcttagtcgccggcgacgagcatcaccaggttcccgatgaccatggcgcagcgcacgatgtgcctgcttcggcggtccattgggtttacagcgccgcaggcacagagagccctgagtaccactgccgcaccagcggcggagggtgcggccgtggctgaagctacggcgaaggaggcgaagaggaggaggaagaatctgtttgacgtagtgcagttcctgccagagtggggcattggatacaaggttgccaagaccacctggcgtgacgtctcctatcagatcaccaagatcaacctgtacaaggatggtcggcatggaaaggcgtgggagcttcggtacaaggcaggtgtgcaagctgcagacaccccaactaggatcagcggtgttaacaaacgtgggtggaagtacataaaagaatcacagaagaaactacaagaagcccccaaagtagacgtagctgttgctgctgcctagttcgtagttacatgcatgtttgttgtaagatgattcggtaaatctttagatggctgttgccagggtgagaacagggaaccacttttttttggatcgactctatacttttttgtcgatgacgactgaacctctctgcaacatgtccagtttcttttcttttccttatggaacgaacctttaccgtaatgtactgatgcagaagaactgcgttgattgtggcgatctagttttcattcaaacgcaagccttgtttc

SEQ ID NO: 19611 - protein, 145 aa, Zea mays subsp. mays
  peptide (1)..(145): Ceres Seq. ID no. 13496205
  misc_feature (8)..(143): Homolog of NCBI NO: 18423383 NR Description: expressed protein [Arabidopsis thaliana]
  misc_feature (8)..(143): Homolog of NCBI NO: 15237795 NR Description: expressed protein [Arabidopsis thaliana]
MTMAQRTMCLLRRSIGFTAPQAQRALSTTAAPAAEGAAVAEATAKEAKRRRKNLFDVVQFLPEWGIGYKVAKTTWRDVSYQITKINLYKDGRHGKAWELRYKAGVQAADTPTRISGVNKRGWKYIKESQKKLQEAPKVDVAVAAA

SEQ ID NO: 19612 - protein, 143 aa, Zea mays subsp. mays
  peptide (1)..(143): Ceres Seq. ID no. 13496206
  misc_feature (6)..(141): Homolog of NCBI NO: 18423383 NR Description: expressed protein [Arabidopsis thaliana]
  misc_feature (6)..(141): Homolog of NCBI NO: 15237795 NR Description: expressed protein [Arabidopsis thaliana]
MAQRTMCLLRRSIGFTAPQAQRALSTTAAPAAEGAAVAEATAKEAKRRRKNLFDVVQFLPEWGIGYKVAKTTWRDVSYQITKINLYKDGRHGKAWELRYKAGVQAADTPTRISGVNKRGWKYIKESQKKLQEAPKVDVAVAAA

SEQ ID NO: 19613 - protein, 138 aa, Zea mays subsp. mays
  peptide (1)..(138): Ceres Seq. ID no. 13496207
  misc_feature (1)..(136): Homolog of NCBI NO: 18423383 NR Description: expressed protein [Arabidopsis thaliana]
  misc_feature (1)..(136): Homolog of NCBI NO: 15237795 NR Description: expressed protein [Arabidopsis thaliana]
MCLLRRSIGFTAPQAQRALSTTAAPAAEGAAVAEATAKEAKRRRKNLFDVVQFLPEWGIGYKVAKTTWRDVSYQITKINLYKDGRHGKAWELRYKAGVQAADTPTRISGVNKRGWKYIKESQKKLQEAPKVDVAVAAA

SEQ ID NO: 19614 - DNA, 1617 bp, Zea mays subsp. mays
  misc_feature (1)..(1617): Ceres Seq. ID no. 12375523
  misc_feature: MA Experiment ID: 108529 Result: Up-regulated in Transcription
  misc_feature: MA Experiment 108529 PARAMETER Experiment Name: Zm_Imbibed_Seeds_P Parameter: Age (day) Value: 5 vs. 2
  misc_feature: MA Experiment 108529 PARAMETER Experiment Name: Zm_Imbibed_Seeds_P Parameter: Organism Value: Zea mays
  misc_feature: MA Experiment 108529 PARAMETER Experiment Name: Zm_Imbibed_Seeds_P Parameter: Plant Line Value: 35A19
  misc_feature: MA Experiment 108529 PARAMETER Experiment Name: Zm_Imbibed_Seeds_P Parameter: Tissue Value: Roots vs. Embryo
  misc_feature: MA Experiment ID: 108535 Result: Down-regulated in Transcription
  misc_feature: MA Experiment 108535 PARAMETER Experiment Name: Zm_Meristem_P Parameter: Age (day) Value: 8
  misc_feature: MA Experiment 108535 PARAMETER Experiment Name: Zm_Meristem_P Parameter: Organism Value: Zea mays
  misc_feature: MA Experiment 108535 PARAMETER Experiment Name: Zm_Meristem_P Parameter: Plant Line Value: 35A19
  misc_feature: MA Experiment 108535 PARAMETER Experiment Name: Zm_Meristem_P Parameter: Tissue Value: Root Meristem vs. Above Root Meristem
  misc_feature: MA Experiment ID: 108543 Result: Up-regulated in Transcription
  misc_feature: MA Experiment ID: 108687 Result: Down-regulated in Transcription
  misc_feature: MA Experiment 108687 PARAMETER Experiment Name: Zm_Embryos-Flowers__P Parameter: Tissue Value: Embryo vs. Aerial+
  misc_feature: MA Experiment ID: 108689 Result: Up-regulated in Transcription
  misc_feature: MA Experiment 108689 PARAMETER Experiment Name: Zm_Drought_Roots_P Parameter: Age (day) Value: 9
  misc_feature: MA Experiment 108689 PARAMETER Experiment Name: Zm_Drought_Roots_P Parameter: Organism Value: Zea mays
  misc_feature: MA Experiment 108689 PARAMETER Experiment Name: Zm_Drought_Roots_P Parameter: Plant Line Value: 35A19
  misc_feature: MA Experiment 108689 PARAMETER Experiment Name: Zm_Drought_Roots_P Parameter: Timepoint (hr) Value: 24
  misc_feature: MA Experiment 108689 PARAMETER Experiment Name: Zm_Drought_Roots_P Parameter: Tissue Value: Roots
  misc_feature: MA Experiment 108689 PARAMETER Experiment Name: Zm_Drought_Roots_P Parameter: Treatment Value: Drought vs. No Drought
  misc_feature: MA Experiment ID: 20000535 Result: Down-regulated in Transcription
  misc_feature: MA Experiment 20000535 PARAMETER Experiment Name: Zm_Hybrid_Seed_Dev_P Parameter: DAP Value: 30 vs. 12
  misc_feature: MA Experiment 20000535 PARAMETER Experiment Name: Zm_Hybrid_Seed_Dev_P Parameter: Organism Value: Zea mays
  misc_feature: MA Experiment 20000535 PARAMETER Experiment Name: Zm_Hybrid_Seed_Dev_P Parameter: Plant Line Value: 35A19
  misc_feature: MA Experiment 20000535 PARAMETER Experiment Name: Zm_Hybrid_Seed_Dev_P Parameter: Tissue Value: Embryo vs. Unfert Floret
gcacgagaccattacctagaacatcctaatcgaaaaatggatggtggagcatgaataatttgctgaggcccccctttgagcagcagcaccacgcttctcttttcatgccgtccacaaccaccagcagcagcaccgccgccgccgcgccctcttcttcttcgtcgtcgtcgccgcctctccaatccttctcctctctgctgctctcgaaccactacccgctgcctaccaccaccagcacgtcgccgtggcagcacgacaccagcatcacaagtagccatggccagccggattcttggagccagctcatacacaaggaaagccagcagatggcgtttccaactacgatttgttcggaatccggaggcggcggcagcagctacgtcgtctacggtgccgcagcggctagccatgggagcagcacaagtgatgtcgagatccagttgccatggggaagcagcagcgtactccagcagcagcagaaagcgtcctctcctaggtcttcttccagaaccacagcgacgacgacctctcccggaagcaacatgctggagttctccaacaacagtagcagttcaccacgtgagtgcatcagtacagtatctggatcagctttcaagaaggctaggacccaagaaccctccccggctcaatctactgtgaaggtgaggaaggagaagctaggggatcgaataactgctctccaccagcttgtctccccgtttggaaagactgacacagcgtctgtactccttgaagccattgggtacatcagattcctccatagtcaaattgaggctctgagctccccgtacgtgggcggcagcaatggaggtgggggcggctccaagcagaatcagcagctccacgaggctagtgcgcagagagaaagcaggcacagcatatttccagaagaccctggccagctcctgcatgacagcagcgcaataaagaaacgggccggactgcagcctgatggtgagcaggatgaagaaagctgtgatgaagagaagaagaaggatctgagaagcaggggtctgtgcctcgtcccggtgagctgcacgctggacgtgggtgtggacgtggtcgctggccccgcagactactgggcggcagctgcgccggctttcggcatggggttcggtgcgtagatgatgctggccaggacgtacgatcgatgctgtgaggaacacttgtgtgtgtctgtgtgcgccatatgcatgtatgggctgcacctgcatgcatagcatcaggagcagccatcctggtggaagctggagaatgctcaagaaggctggctcctcttgatgctatatatgcgtatggtatatggtgcacacaccgacaatgcatgcatgggcatatattatatagctacagagacgctgagagtatatgacttgcgtttctgtgtttgtgtgtacgtgatgagatcttgtctagctagctagagcgagatcaaacaatttgggtgccatggagaggggcgctatagctgcagatatttaattgttaaggctaggagtactgcgcgcggatctgtaagcaatgcaactcttttaagtcttcgtcattgaggcgtcactgtgtgctatatatatatgcatggccgaaatgtgc

SEQ ID NO: 19615 - protein, 365 aa, Zea mays subsp. mays
  peptide (1)..(365): Ceres Seq. ID no. 12375524
  misc_feature (204)..(244): Pfam Name: Helix-loop-helix DNA-binding domain Pfam Description: Helix-loop-helix DNA-binding domain
  misc_feature (104)..(281): Homolog of NCBI NO: 22093671 NR Description: similar to bHLH (Basic-helix-loop-helix)
  misc_feature (320)..(355): Homolog of NCBI NO: 21536756 NR Description: unknown [Arabidopsis thaliana]
  misc_feature (320)..(355): Homolog of NCBI NO: 18402256 NR Description: expressed protein
  misc_feature (189)..(262): Homolog of NCBI NO: 21536756 NR Description: unknown [Arabidopsis thaliana]
  misc_feature (189)..(262): Homolog of NCBI NO: 18402256 NR Description: expressed protein
  misc_feature (311)..(362): Homolog of NCBI NO: 15217667 NR Description: hypothetical protein; protein id: At1g27660.1
  misc_feature (158)..(281): Homolog of NCBI NO: 15217667 NR Description: hypothetical protein; protein id: At1g27660.1
  misc_feature (162)..(353): Homolog of NCBI NO: 11045087 NR Description: putative protein [Brassica napus]
  misc_feature (146)..(355): Homolog of NCBI NO: 33111977 NR Description: putative bHLH133 transcription factor
  misc_feature (2)..(360): Homolog of NCBI NO: 15233452 NR Description: putative protein
MNNLLRPPFEQQHHASLFMPSTTTSSSTAAAAPSSSSSSSPPLQSFSSLLLSNHYPLPTTTSTSPWQHDTSITSSHGQPDSWSQLIHKESQQMAFPTTICSESGGGGSSYVVYGAAAASHGSSTSDVEIQLPWGSSSVLQQQQKASSPRSSSRTTATTTSPGSNMLEFSNNSSSSPRECISTVSGSAFKKARTQEPSPAQSTVKVRKEKLGDRITALHQLVSPFGKTDTASVLLEAIGYIRFLHSQIEALSSPYVGGSNGGGGGSKQNQQLHEASAQRESRHSIFPEDPGQLLHDSSAIKKRAGLQPDGEQDEESCDEEKKKDLRSRGLCLVPVSCTLDVGVDVVAGPADYWAAAAPAFGMGFGA

SEQ ID NO: 19616 - protein, 347 aa, Zea mays subsp. mays
  peptide (1)..(347): Ceres Seq. ID no. 12375525
  misc_feature (186)..(226): Pfam Name: Helix-loop-helix DNA-binding domain Pfam Description: Helix-loop-helix DNA-binding domain
  misc_feature (86)..(263): Homolog of NCBI NO: 22093671 NR Description: similar to bHLH (Basic-helix-loop-helix)
  misc_feature (302)..(337): Homolog of NCBI NO: 21536756 NR Description: unknown [Arabidopsis thaliana]
  misc_feature (302)..(337): Homolog of NCBI NO: 18402256 NR Description: expressed protein
  misc_feature (171)..(244): Homolog of NCBI NO: 21536756 NR Description: unknown [Arabidopsis thaliana]
  misc_feature (171)..(244): Homolog of NCBI NO: 18402256 NR Description: expressed protein
  misc_feature (293)..(344): Homolog of NCBI NO: 15217667 NR Description: hypothetical protein; protein id: At1g27660.1
  misc_feature (140)..(263): Homolog of NCBI NO: 15217667 NR Description: hypothetical protein; protein id: At1g27660.1
  misc_feature (144)..(335): Homolog of NCBI NO: 11045087 NR Description: putative protein [Brassica napus]
  misc_feature (128)..(337): Homolog of NCBI NO: 33111977 NR Description: putative bHLH133 transcription factor
  misc_feature (1)..(342): Homolog of NCBI NO: 15233452 NR Description: putative protein
MPSTTTSSSTAAAAPSSSSSSSPPLQSFSSLLLSNHYPLPTTTSTSPWQHDTSITSSHGQPDSWSQLIHKESQQMAFPTTICSESGGGGSSYVVYGAAAASHGSSTSDVEIQLPWGSSSVLQQQQKASSPRSSSRTTATTTSPGSNMLEFSNNSSSSPRECISTVSGSAFKKARTQEPSPAQSTVKVRKEKLGDRITALHQLVSPFGKTDTASVLLEAIGYIRFLHSQIEALSSPYVGGSNGGGGGSKQNQQLHEASAQRESRHSIFPEDPGQLLHDSSAIKKRAGLQPDGEQDEESCDEEKKKDLRSRGLCLVPVSCTLDVGVDVVAGPADYWAAAAPAFGMGFGA

SEQ ID NO: 19617 - protein, 273 aa, Zea mays subsp. mays
  peptide (1)..(273): Ceres Seq. ID no. 12375526
  misc_feature (112)..(152): Pfam Name: Helix-loop-helix DNA-binding domain Pfam Description: Helix-loop-helix DNA-binding domain
  misc_feature (12)..(189): Homolog of NCBI NO: 22093671 NR Description: similar to bHLH (Basic-helix-loop-helix)
  misc_feature (228)..(263): Homolog of NCBI NO: 21536756 NR Description: unknown [Arabidopsis thaliana]
  misc_feature (228)..(263): Homolog of NCBI NO: 18402256 NR Description: expressed protein
  misc_feature (97)..(170): Homolog of NCBI NO: 21536756 NR Description: unknown [Arabidopsis thaliana]
  misc_feature (97)..(170): Homolog of NCBI NO: 18402256 NR Description: expressed protein
  misc_feature (219)..(270): Homolog of NCBI NO: 15217667 NR Description: hypothetical protein; protein id: At1g27660.1
  misc_feature (66)..(189): Homolog of NCBI NO: 15217667 NR Description: hypothetical protein; protein id: At1g27660.1
  misc_feature (70)..(261): Homolog of NCBI NO: 11045087 NR Description: putative protein [Brassica napus]
  misc_feature (54)..(263): Homolog of NCBI NO: 33111977 NR Description: putative bHLH133 transcription factor
  misc_feature (1)..(268): Homolog of NCBI NO: 15233452 NR Description: putative protein
MAFPTTICSESGGGGSSYVVYGAAAASHGSSTSDVEIQLPWGSSSVLQQQQKASSPRSSSRTTATTTSPGSNMLEFSNNSSSSPRECISTVSGSAFKKARTQEPSPAQSTVKVRKEKLGDRITALHQLVSPFGKTDTASVLLEAIGYIRFLHSQIEALSSPYVGGSNGGGGGSKQNQQLHEASAQRESRHSIFPEDPGQLLHDSSAIKKRAGLQPDGEQDEESCDEEKKKDLRSRGLCLVPVSCTLDVGVDVVAGPADYWAAAAPAFGMGFGA

SEQ ID NO: 19618 - DNA, 1480 bp, Zea mays subsp. mays
  misc_feature (1)..(1480): Ceres Seq. ID no. 12364480
  misc_feature: MA Experiment ID: 20000534 Result: Down-regulated in Transcription
  misc_feature: MA Experiment 20000534 PARAMETER Experiment Name: Zm_Hybrid_Pollen_P Parameter: Age (day) Value: 8
  misc_feature: MA Experiment 20000534 PARAMETER Experiment Name: Zm_Hybrid_Pollen_P Parameter: Organism Value: Zea mays
  misc_feature: MA Experiment 20000534 PARAMETER Experiment Name: Zm_Hybrid_Pollen_P Parameter: Plant Line Value: 35A19
  misc_feature: MA Experiment 20000534 PARAMETER Experiment Name: Zm_Hybrid_Pollen_P Parameter: Tissue Value: Pollen vs. Aerial
gcacgagaccattacctagaacatcctaatcgaaaagccaaattgcattgacagagaacgagagaaaaaaaaatcctaatccaccctcgccgcgagatcgccggtcgctcccatgtcgactccagccgccgctgcgaagcaatacttttgctaccaatgcaaccgcaccgtcctcatcgcggcctccgccgtcgccgccggggagctctcgtgccccgagtgccacggcaacttcctcgaggaggtcaccatccctgccccaaccttcatccagctccctttcccttttgcttccaccacgatccctaccgccagtaccgccccgcgccccgccccagcagccggcaccggcaggcccccttccttctcgtcctcctccgctgcgacctctcggtccgagccccgctacatctcctccatcctcaactccttcgtcggacccggcgaacaacccaacaggatcagcggctccagcatacgtttcgcccctggcacggccacccacaggaacgagcccgagcccttcgacccggtaatgttcttccagaattacatccaaagcctcgtggagggaggcgccaacatccaggtcctcttcgacgatgccagcgcgagcctcggctccggacccggcctagggcgcctcggcggggcaagcttcggggattacttcgtcggcccaggcttggaacaactcatcgagcagctcgccgagaacgaccccaaccgctatggcacgccgccggctgccaagtcggccctctcctcgctccccgacgtcgtcgtgactcacaccatggtcgcagctgcggagggcgctgagtgcgccgtctgcaaggaggatttctctcctggagaggtggccaagcagatgccctgtaaccacatctaccacaccgactgcatcatgccgtggcttgagcttcacaactcgtgccccatctgtcgctttgagcttcccactgacgatcctgattatgaggtgcggaagggctctaattctcagcaggctgttggtattgctgctgctgcatcagggagctctactgctgctgagggacaaatggagaggcaggagaatccaagggtggttgagaggaggttcaatgtgtcgctgccatggccattcagtggattgggagggcaaacatcgcagcaggacgggaacagtggaggcagtggtagcaactcacaaggcagtggctcgcaggatggtggcccacccagcagcaagaattgataaaaaatcagctggaggttcaccttttggcgatctgttaagaagtctgcagtatatacgtgtcaccatgactatacacctacaggaatttacagtctctgtttgttacgaaacaatcgtttgtttttcatgtagacacggcgcaaaaactgccactgcagcagaatttgcgcgctgagagagttgggacttcatgtgtagatttgttgattgatcctggtccatgaaatggtaaacccc

SEQ ID NO: 19619 - protein, 375 aa, Zea mays subsp. mays
  peptide (1)..(375): Ceres Seq. ID no. 12364481
  misc_feature (238)..(278): Pfam Name: Zinc finger, C3HC4 type (RING finger) Pfam Description: Zinc finger, C3HC4 type (RING finger)
  misc_feature (135)..(363): Homolog of NCBI NO: 18405518 NR Description: expressed protein
  misc_feature (149)..(353): Homolog of NCBI NO: 18405411 NR Description: expressed protein
  misc_feature (1)..(83): Homolog of NCBI NO: 14719329 NR Description: putative RING-H2 finger protein [Oryza sativa]
  misc_feature (129)..(303): Homolog of NCBI NO: 14719329 NR Description: putative RING-H2 finger protein [Oryza sativa]
  misc_feature (182)..(369): Homolog of NCBI NO: 15241188 NR Description: putative protein
  misc_feature (1)..(45): Homolog of NCBI NO: 34903272 NR Description: unnamed protein product [Oryza sativa (japonica
  misc_feature (143)..(361): Homolog of NCBI NO: 34903272 NR Description: unnamed protein product [Oryza sativa (japonica
  misc_feature (129)..(356): Homolog of NCBI NO: 15231003 NR Description: unknown protein
  misc_feature (129)..(356): Homolog of NCBI NO: 11994207 NR Description: gene_id:MPN9.20~unknown protein [Arabidopsis
  misc_feature (1)..(374): Homolog of NCBI NO: 37535546 NR Description: putative zinc finger protein
MSTPAAAAKQYFCYQCNRTVLIAASAVAAGELSCPECHGNFLEEVTIPAPTFIQLPFPFASTTIPTASTAPRPAPAAGTGRPPSFSSSSAATSRSEPRYISSILNSFVGPGEQPNRISGSSIRFAPGTATHRNEPEPFDPVMFFQNYIQSLVEGGANIQVLFDDASASLGSGPGLGRLGGASFGDYFVGPGLEQLIEQLAENDPNRYGTPPAAKSALSSLPDVVVTHTMVAAAEGAECAVCKEDFSPGEVAKQMPCNHIYHTDCIMPWLELHNSCPICRFELPTDDPDYEVRKGSNSQQAVGIAAAASGSSTAAEGQMERQENPRVVERRFNVSLPWPFSGLGGQTSQQDGNSGGSGSNSQGSGSQDGGPPSSKN

SEQ ID NO: 19620 - protein, 234 aa, Zea mays subsp. mays
  peptide (1)..(234): Ceres Seq. ID no. 12364482
  misc_feature (97)..(137): Pfam Name: Zinc finger, C3HC4 type (RING finger) Pfam Description: Zinc finger, C3HC4 type (RING finger)
  misc_feature (40)..(219): Homolog of NCBI NO: 7486783 NR Description: hypothetical protein M3E9.170 - Arabidopsis
  misc_feature (29)..(162): Homolog of NCBI NO: 15232595 NR Description: putative protein
  misc_feature (1)..(222): Homolog of NCBI NO: 18405518 NR Description: expressed protein
  misc_feature (8)..(212): Homolog of NCBI NO: 18405411 NR Description: expressed protein
  misc_feature (1)..(162): Homolog of NCBI NO: 14719329 NR Description: putative RING-H2 finger protein [Oryza sativa]
  misc_feature (41)..(228): Homolog of NCBI NO: 15241188 NR Description: putative protein
  misc_feature (2)..(220): Homolog of NCBI NO: 34903272 NR Description: unnamed protein product [Oryza sativa (japonica
  misc_feature (1)..(215): Homolog of NCBI NO: 15231003 NR Description: unknown protein
  misc_feature (1)..(215): Homolog of NCBI NO: 11994207 NR Description: gene_id:MPN9.20~unknown protein [Arabidopsis
  misc_feature (1)..(233): Homolog of NCBI NO: 37535546 NR Description: putative zinc finger protein
MFFQNYIQSLVEGGANIQVLFDDASASLGSGPGLGRLGGASFGDYFVGPGLEQLIEQLAENDPNRYGTPPAAKSALSSLPDVVVTHTMVAAAEGAECAVCKEDFSPGEVAKQMPCNHIYHTDCIMPWLELHNSCPICRFELPTDDPDYEVRKGSNSQQAVGIAAAASGSSTAAEGQMERQENPRVVERRFNVSLPWPFSGLGGQTSQQDGNSGGSGSNSQGSGSQDGGPPSSKN

SEQ ID NO: 19621 - protein, 221 aa, Zea mays subsp. mays
  peptide (1)..(221): Ceres Seq. ID no. 12364483
MQPHRPHRGLRRRRRGALVPRVPRQLPRGGHHPCPNLHPAPFPFCFHHDPYRQYRPAPRPSSRHRQAPFLLVLLRCDLSVRAPLHLLHPQLLRRTRRTTQQDQRLQHTFRPWHGHPQERARALRPGNVLPELHPKPRGGRRQHPGPLRRCQREPRLRTRPRAPRRGKLRGLLRRPRLGTTHRAARRERPQPLWHAAGCQVGPLLAPRRRRDSHHGRSCGGR

SEQ ID NO: 19622 - DNA, 1617 bp, Zea mays subsp. mays; identical to SEQ ID NO: 12275
  misc_feature (1)..(1617): Ceres Seq. ID no. 13494824
  misc_feature: MA Experiment ID: 108522 Result: Up-regulated in Transcription
  misc_feature: MA Experiment 108522 PARAMETER Experiment Name: Zm_42deg_Heat_P Parameter: Age (day) Value: 8
  misc_feature: MA Experiment 108522 PARAMETER Experiment Name: Zm_42deg_Heat_P Parameter: Organism Value: Zea mays
  misc_feature: MA Experiment 108522 PARAMETER Experiment Name: Zm_42deg_Heat_P Parameter: Plant Line Value: 35A19
  misc_feature: MA Experiment 108522 PARAMETER Experiment Name: Zm_42deg_Heat_P Parameter: Temperature (deg C) Value: 42 vs. 22
  misc_feature: MA Experiment 108522 PARAMETER Experiment Name: Zm_42deg_Heat_P Parameter: Timepoint (hr) Value: 1
  misc_feature: MA Experiment 108522 PARAMETER Experiment Name: Zm_42deg_Heat_P Parameter: Tissue Value: Aerial
  misc_feature: MA Experiment ID: 108523 Result: Up-regulated in Transcription
  misc_feature: MA Experiment 108523 PARAMETER Experiment Name: Zm_42deg_Heat_P Parameter: Age (day) Value: 8
  misc_feature: MA Experiment 108523 PARAMETER Experiment Name: Zm_42deg_Heat_P Parameter: Organism Value: Zea mays
  misc_feature: MA Experiment 108523 PARAMETER Experiment Name: Zm_42deg_Heat_P Parameter: Plant Line Value: 35A19
  misc_feature: MA Experiment 108523 PARAMETER Experiment Name: Zm_42deg_Heat_P Parameter: Temperature (deg C) Value: 42 vs. 22
  misc_feature: MA Experiment 108523 PARAMETER Experiment Name: Zm_42deg_Heat_P Parameter: Timepoint (hr) Value: 6
  misc_feature: MA Experiment 108523 PARAMETER Experiment Name: Zm_42deg_Heat_P Parameter: Tissue Value: Aerial
  misc_feature: MA Experiment ID: 108527 Result: Up-regulated in Transcription
  misc_feature: MA Experiment 108527 PARAMETER Experiment Name: Zm_5mM_NO_P Parameter: Age (day) Value: 8
  misc_feature: MA Experiment 108527 PARAMETER Experiment Name: Zm_5mM_NO_P Parameter: Organism Value: Zea mays
  misc_feature: MA Experiment 108527 PARAMETER Experiment Name: Zm_5mM_NO_P Parameter: Plant Line Value: 35A19
  misc_feature: MA Experiment 108527 PARAMETER Experiment Name: Zm_5mM_NO_P Parameter: Timepoint (hr) Value: 6
  misc_feature: MA Experiment 108527 PARAMETER Experiment Name: Zm_5mM_NO_P Parameter: Tissue Value: Aerial
  misc_feature: MA Experiment 108527 PARAMETER Experiment Name: Zm_5mM_NO_P Parameter: Treatment Value: 5mM NO vs. No Treatment

SEQ ID NO: 19623 - protein, 477 aa, Zea mays subsp. mays; identical to SEQ ID NO: 12276
  peptide (1)..(477): Ceres Seq. ID no. 13494825
  misc_feature (109)..(286): Pfam Name: HSF-type DNA-binding Pfam Description: HSF-type DNA-binding
  misc_feature (61)..(461): Homolog of NCBI NO: 34902282 NR Description: Putative heat shock factor 3 [Oryza sativa
  misc_feature (81)..(350): Homolog of NCBI NO: 29126355 NR Description: putative heat shock transcription factor [Oryza
  misc_feature (71)..(364): Homolog of NCBI NO: 729775 NR Description: HEAT SHOCK FACTOR PROTEIN HSF8 (HEAT SHOCK FACTOR 8) (HSTF 8) (HEAT STRESS TRANSCRIPTION FACTOR)
  misc_feature (90)..(367): Homolog of NCBI NO: 25296101 NR Description: heat shock transcription factor HSF3 [imported] - thaliana (fragment) >gi|3256068|emb|CAA74397.1| Heat Shock Factor
  misc_feature (90)..(367): Homolog of NCBI NO: 27261140 NR Description: HSF3 DNA-binding domain/VP16 activation domain
  misc_feature (90)..(367): Homolog of NCBI NO: 30686034 NR Description: heat shock transcription factor 3 (HSF3) thaliana] >gi|30686038|ref|NP_850832.1| heat shock transcription
  misc_feature (80)..(344): Homolog of NCBI NO: 15236631 NR Description: heat shock transcription factor 1 (HSF1) thaliana] >gi|12644262|sp|P41151|HSF1_ARATH Heat shock factor
  misc_feature (80)..(344): Homolog of NCBI NO: 429155 NR Description: heat shock factor [Arabidopsis thaliana]
  misc_feature (71)..(364): Homolog of NCBI NO: 11386827 NR Description: Heat shock factor protein HSF8 (Heat shock factor 8) (HSTF 8) (Heat stress transcription factor)
  misc_feature (93)..(348): Homolog of NCBI NO: 15223168 NR Description: heat shock transcription factor family

SEQ ID NO: 19624 - protein, 417 aa, Zea mays subsp. mays; identical to SEQ ID NO: 12277
  peptide (1)..(417): Ceres Seq. ID no. 13494826
  misc_feature (49)..(226): Pfam Name: HSF-type DNA-binding Pfam Description: HSF-type DNA-binding
  misc_feature (1)..(401): Homolog of NCBI NO: 34902282 NR Description: Putative heat shock factor 3 [Oryza sativa
  misc_feature (21)..(290): Homolog of NCBI NO: 29126355 NR Description: putative heat shock transcription factor [Oryza
  misc_feature (11)..(304): Homolog of NCBI NO: 729775 NR Description: HEAT SHOCK FACTOR PROTEIN HSF8 (HEAT SHOCK FACTOR 8) (HSTF 8) (HEAT STRESS TRANSCRIPTION FACTOR)
  misc_feature (30)..(307): Homolog of NCBI NO: 25296101 NR Description: heat shock transcription factor HSF3 [imported] - thaliana (fragment) >gi|3256068|emb|CAA74397.1| Heat Shock Factor
  misc_feature (30)..(307): Homolog of NCBI NO: 30686034 NR Description: heat shock transcription factor 3 (HSF3) thaliana] >gi|30686038|ref|NP_850832.1| heat shock transcription
  misc_feature (30)..(307): Homolog of NCBI NO: 27261140 NR Description: HSF3 DNA-binding domain/VP16 activation domain
  misc_feature (20)..(284): Homolog of NCBI NO: 15236631 NR Description: heat shock transcription factor 1 (HSF1) thaliana] >gi|12644262|sp|P41151|HSF1_ARATH Heat shock factor
  misc_feature (20)..(284): Homolog of NCBI NO: 429155 NR Description: heat shock factor [Arabidopsis thaliana]
  misc_feature (11)..(304): Homolog of NCBI NO: 11386827 NR Description: Heat shock factor protein HSF8 (Heat shock factor 8) (HSTF 8) (Heat stress transcription factor)
  misc_feature (33)..(288): Homolog of NCBI NO: 15223168 NR Description: heat shock transcription factor family

SEQ ID NO: 19625 - protein, 360 aa, Zea mays subsp. mays; identical to SEQ ID NO: 12278
  peptide (1)..(360): Ceres Seq. ID no. 13494827
  misc_feature (1)..(169): Pfam Name: HSF-type DNA-binding Pfam Description: HSF-type DNA-binding
  misc_feature (1)..(344): Homolog of NCBI NO: 34902282 NR Description: Putative heat shock factor 3 [Oryza sativa
  misc_feature (1)..(233): Homolog of NCBI NO: 29126355 NR Description: putative heat shock transcription factor [Oryza
  misc_feature (1)..(247): Homolog of NCBI NO: 729775 NR Description: HEAT SHOCK FACTOR PROTEIN HSF8 (HEAT SHOCK FACTOR 8) (HSTF 8) (HEAT STRESS TRANSCRIPTION FACTOR)
  misc_feature (1)..(250): Homolog of NCBI NO: 25296101 NR Description: heat shock transcription factor HSF3 [imported] - thaliana (fragment) >gi|3256068|emb|CAA74397.1| Heat Shock Factor
  misc_feature (1)..(250): Homolog of NCBI NO: 27261140 NR Description: HSF3 DNA-binding domain/VP16 activation domain
  misc_feature (1)..(250): Homolog of NCBI NO: 30686034 NR Description: heat shock transcription factor 3 (HSF3) thaliana] >gi|30686038|ref|NP_850832.1| heat shock transcription
  misc_feature (1)..(227): Homolog of NCBI NO: 15236631 NR Description: heat shock transcription factor 1 (HSF1) thaliana] >gi|12644262|sp|P41151|HSF1_ARATH Heat shock factor
  misc_feature (1)..(227): Homolog of NCBI NO: 429155 NR Description: heat shock factor [Arabidopsis thaliana]
  misc_feature (1)..(247): Homolog of NCBI NO: 11386827 NR Description: Heat shock factor protein HSF8 (Heat shock factor 8) (HSTF 8) (Heat stress transcription factor)
  misc_feature (1)..(231): Homolog of NCBI NO: 15223168 NR Description: heat shock transcription factor family

SEQ ID NO: 19626 - DNA, 1617 bp, Zea mays subsp. mays
  misc_feature (1)..(1617): Ceres Seq. ID no. 12383525
  misc_feature: MA Experiment ID: 108527 Result: Down-regulated in Transcription
  misc_feature: MA Experiment 108527 PARAMETER Experiment Name: Zm_5mM_NO_P Parameter: Age (day) Value: 8
  misc_feature: MA Experiment 108527 PARAMETER Experiment Name: Zm_5mM_NO_P Parameter: Organism Value: Zea mays
  misc_feature: MA Experiment 108527 PARAMETER Experiment Name: Zm_5mM_NO_P Parameter: Plant Line Value: 35A19
  misc_feature: MA Experiment 108527 PARAMETER Experiment Name: Zm_5mM_NO_P Parameter: Timepoint (hr) Value: 6
  misc_feature: MA Experiment 108527 PARAMETER Experiment Name: Zm_5mM_NO_P Parameter: Tissue Value: Aerial
  misc_feature: MA Experiment 108527 PARAMETER Experiment Name: Zm_5mM_NO_P Parameter: Treatment Value: 5mM NO vs. No Treatment
  misc_feature: MA Experiment ID: 108528 Result: Up-regulated in Transcription
  misc_feature: MA Experiment 108528 PARAMETER Experiment Name: Zm_Imbibed_Seeds_P Parameter: Age (day) Value: 5 vs. 2
  misc_feature: MA Experiment 108528 PARAMETER Experiment Name: Zm_Imbibed_Seeds_P Parameter: Organism Value: Zea mays
  misc_feature: MA Experiment 108528 PARAMETER Experiment Name: Zm_Imbibed_Seeds_P Parameter: Plant Line Value: 35A19
  misc_feature: MA Experiment 108528 PARAMETER Experiment Name: Zm_Imbibed_Seeds_P Parameter: Tissue Value: Aerial vs. Embryo
  misc_feature: MA Experiment ID: 108530 Result: Up-regulated in Transcription
  misc_feature: MA Experiment 108530 PARAMETER Experiment Name: Zm_Imbibed_Seeds_P Parameter: Age (day) Value: 6 vs. 2
  misc_feature: MA Experiment 108530 PARAMETER Experiment Name: Zm_Imbibed_Seeds_P Parameter: Organism Value: Zea mays
  misc_feature: MA Experiment 108530 PARAMETER Experiment Name: Zm_Imbibed_Seeds_P Parameter: Plant Line Value: 35A19
  misc_feature: MA Experiment 108530 PARAMETER Experiment Name: Zm_Imbibed_Seeds_P Parameter: Tissue Value: Aerial vs. Embryo
  misc_feature: MA Experiment ID: 108547 Result: Up-regulated in Transcription
  misc_feature: MA Experiment 108547 PARAMETER Experiment Name: Zm_Imbibed_Seeds_P Parameter: Age (day) Value: 4 vs. 2
  misc_feature: MA Experiment 108547 PARAMETER Experiment Name: Zm_Imbibed_Seeds_P Parameter: Organism Value: Zea mays
  misc_feature: MA Experiment 108547 PARAMETER Experiment Name: Zm_Imbibed_Seeds_P Parameter: Plant Line Value: 35A19
  misc_feature: MA Experiment 108547 PARAMETER Experiment Name: Zm_Imbibed_Seeds_P Parameter: Tissue Value: Aerial vs. Embryo
  misc_feature: MA Experiment ID: 20000480 Result: Down-regulated in Transcription
  misc_feature: MA Experiment 20000480 PARAMETER Experiment Name: Zm_Drought_P Parameter: Age (day) Value: 11
  misc_feature: MA Experiment 20000480 PARAMETER Experiment Name: Zm_Drought_P Parameter: Organism Value: Zea mays
  misc_feature: MA Experiment 20000480 PARAMETER Experiment Name: Zm_Drought_P Parameter: Plant Line Value: 35A19
  misc_feature: MA Experiment 20000480 PARAMETER Experiment Name: Zm_Drought_P Parameter: Timepoint (hr) Value: 72
  misc_feature: MA Experiment 20000480 PARAMETER Experiment Name: Zm_Drought_P Parameter: Tissue Value: Aerial
  misc_feature: MA Experiment 20000480 PARAMETER Experiment Name: Zm_Drought_P Parameter: Treatment Value: Drought vs. No Drought
  misc_feature: MA Experiment ID: 20000492 Result: Up-regulated in Transcription
  misc_feature: MA Experiment 20000492 PARAMETER Experiment Name: Zm_Hybrid_Seed_Dev_P Parameter: DAP Value: 12
  misc_feature: MA Experiment 20000492 PARAMETER Experiment Name: Zm_Hybrid_Seed_Dev_P Parameter: Organism Value: Zea mays
  misc_feature: MA Experiment 20000492 PARAMETER Experiment Name: Zm_Hybrid_Seed_Dev_P Parameter: Plant Line Value: 35A19
  misc_feature: MA Experiment 20000492 PARAMETER Experiment Name: Zm_Hybrid_Seed_Dev_P Parameter: Tissue Value: Fert Kernel vs. Unfert Floret
gcacgagaccattacctagaacatcctaatcgaaaaatcgaaaagccgcacccgcacgccagaaacagctctcgcgttgcttccgcacgccgcccatggcgagcctgtcgtcgccgagtctcctctcttccttcctcggcgaccgcctcgcactctccactaggcctctccttctccgctccgctgtcccaggcagcaggcggctggcgtatcaagcaacgagaacgctatgcaacttggtggatatcctatttaacaggagaaatcaggatgatgcaccagaaaacaaccctagacgcctgcgtcctgggaaagtatctccacgccttagtgttcccaatcatatacaacggcctccatatgtcaattctcgtcaacaacgacctggtatgaataatggacctgaaatacatgatgagaacgggatcgagtgcatgagagcttctggaaagcttgctgcacaggttttgaaatttgctgggactcttgtaaaggcataacgactgatgaaattgataaagcagtgcaccaaatgataattgataatggagcatatccttcacctcttggttattgtggatacccaaagagtgtctgcacttcagtgaatgaatgcatctgtcatgggattccggattctcgtccccttgaggatggagatatcatcaatattgatgttactgtctacctcaatggctaccatggtgatacatctgctacatttctttgcggtgatgttgatgacgaagctaagaaattagttaaggtgacaagagaatgtctcgacaaggctatatcgatttgttcacctggggtggagatcaaacaaattggtagaactatacagtatgtaatttctgagtaaccaagcttttaaacagatgcacatatttttttattatctttatcttaaaaaacaacattcagtttatcgataagctgtattgtcttaatttgtatgcgtaacagatctggtaatcaaaacgaactcttgttccaactactatacttacgacatttaatctttgaagggatcatgcagacaagtttaagtttggtgtagttagacagtttgttggccatggggttggcaaagtttttcatgctgagcctgttgtgcttcatttcagtgagttccccactttaacgaaaacatctttttattaattgctgtcttgcctcccggctatctcaaggttctggttgcactctgcaccatattaggatgtgatatctgtgccaatgacttcgaaatttgcaggaaacaatgaatggggacgtatgatgttgaatcaaacatttactatagagcccatgctaaccatagggagcatcaaccctgtcatgtggtccgatgactggaccgcagtgacagaagacggcagcttgtcagcacagtttgagcacacgatactcattaccgaagatggccctgaaatactgacacagtgttaatggaaggccaaataacaaagaacaatcgttagtcagctggcaagatcctgcatttctttttggggactaattggtccaacctaaactctgatgcaaaatggcaaactcacattgtaatctcggttcatcggtacaacgatatatgtatagaaattgtantag

SEQ ID NO: 19627 - protein, 134 aa, Zea mays subsp. mays
  peptide (1)..(134): Ceres Seq. ID no. 12383526
  misc_feature (72)..(131): Homolog of NCBI NO: 24583427 NR Description: CG5188-PA [Drosophila melanogaster]
  misc_feature (72)..(133): Homolog of NCBI NO: 15230872 NR Description: methionine aminopeptidase, putative
  misc_feature (72)..(133): Homolog of NCBI NO: 11320958 NR Description: methionine aminopeptidase-like protein
  misc_feature (72)..(133): Homolog of NCBI NO: 7939560 NR Description: methionine aminopeptidase-like protein
  misc_feature (1)..(133): Homolog of NCBI NO: 34394646 NR Description: putative methionine aminopeptidase I (MAP1)
  misc_feature (2)..(133): Homolog of NCBI NO: 15222218 NR Description: methionine aminopeptidase I (MAP1), putative
  misc_feature (2)..(133): Homolog of NCBI NO: 11320956 NR Description: methionine aminopeptidase-like protein
  misc_feature (72)..(133): Homolog of NCBI NO: 38345794 NR Description: OSJNBa0085I10.11 [Oryza sativa (japonica
  misc_feature (59)..(133): Homolog of NCBI NO: 25289731 NR Description: methionyl aminopeptidase-like protein
  misc_feature (1)..(133): Homolog of NCBI NO: 18419957 NR Description: methionyl aminopeptidase-like protein; protein
MASLSSPSLLSSFLGDRLALSTRPLLLRSAVPGSRRLAYQATRTLCNLVDILFNRRNQDDAPENNPRRLRPGKVSPRLSVPNHIQRPPYVNSRQQRPGMNNGPEIHDENGIECMRASGKLAAQVLKFAGTLVKA

SEQ ID NO: 19628 - protein, 130 aa, Zea mays subsp. mays
  peptide (1)..(130): Ceres Seq. ID no. 12383527
ARDHYLEHPNRKIEKPHPHARNSSRVASARRPWRACRRRVSSLPSSATASHSPLGLSFSAPLSQAAGGWRIKQRERYATWWISYLTGEIRMMHQKTTLDACVLGKYLHALVFPIIYNGLHMSILVNNDLV

SEQ ID NO: 19629 - protein, 110 aa, Zea mays subsp. mays
  peptide (1)..(110): Ceres Seq. ID no. 12383528
  misc_feature (1)..(110): Homolog of NCBI NO: 24583427 NR Description: CG5188-PA [Drosophila melanogaster]
  misc_feature (1)..(104): Homolog of NCBI NO: 15230872 NR Description: methionine aminopeptidase, putative
  misc_feature (1)..(104): Homolog of NCBI NO: 11320958 NR Description: methionine aminopeptidase-like protein
  misc_feature (1)..(104): Homolog of NCBI NO: 7939560 NR Description: methionine aminopeptidase-like protein
  misc_feature (1)..(104): Homolog of NCBI NO: 34394646 NR Description: putative methionine aminopeptidase I (MAP1)
  misc_feature (1)..(104): Homolog of NCBI NO: 15222218 NR Description: methionine aminopeptidase I (MAP1), putative
  misc_feature (1)..(104): Homolog of NCBI NO: 11320956 NR Description: methionine aminopeptidase-like protein
  misc_feature (1)..(104): Homolog of NCBI NO: 38345794 NR Description: OSJNBa0085I10.11 [Oryza sativa (japonica
  misc_feature (1)..(104): Homolog of NCBI NO: 25289731 NR Description: methionyl aminopeptidase-like protein
  misc_feature (1)..(104): Homolog of NCBI NO: 18419957 NR Description: methionyl aminopeptidase-like protein; protein
MIIDNGAYPSPLGYCGYPKSVCTSVNECICHGIPDSRPLEDGDIINIDVTVYLNGYHGDTSATFLCGDVDDEAKKLVKVTRECLDKAISICSPGVEIKQIGRTIQYVISE

SEQ ID NO: 19630 - DNA, 2117 bp, Zea mays subsp. mays
  misc_feature (1)..(2117): Ceres Seq. ID no. 12382616
  misc_feature: MA Experiment ID: 108504 Result: Up-regulated in Transcription
  misc_feature: MA Experiment 108504 PARAMETER Experiment Name: Zm_Drought_P Parameter: Age (day) Value: 8
  misc_feature: MA Experiment 108504 PARAMETER Experiment Name: Zm_Drought_P Parameter: Organism Value: Zea mays
  misc_feature: MA Experiment 108504 PARAMETER Experiment Name: Zm_Drought_P Parameter: Plant Line Value: 35A19
  misc_feature: MA Experiment 108504 PARAMETER Experiment Name: Zm_Drought_P Parameter: Timepoint (hr) Value: 12
  misc_feature: MA Experiment 108504 PARAMETER Experiment Name: Zm_Drought_P Parameter: Tissue Value: Aerial
  misc_feature: MA Experiment 108504 PARAMETER Experiment Name: Zm_Drought_P Parameter: Treatment Value: Drought vs. No Drought
  misc_feature: MA Experiment ID: 108522 Result: Up-regulated in Transcription
  misc_feature: MA Experiment 108522 PARAMETER Experiment Name: Zm_42deg_Heat_P Parameter: Age (day) Value: 8
  misc_feature: MA Experiment 108522 PARAMETER Experiment Name: Zm_42deg_Heat_P Parameter: Organism Value: Zea mays
  misc_feature: MA Experiment 108522 PARAMETER Experiment Name: Zm_42deg_Heat_P Parameter: Plant Line Value: 35A19
  misc_feature: MA Experiment 108522 PARAMETER Experiment Name: Zm_42deg_Heat_P Parameter: Temperature (deg C) Value: 42 vs. 22
  misc_feature: MA Experiment 108522 PARAMETER Experiment Name: Zm_42deg_Heat_P Parameter: Timepoint (hr) Value: 1
  misc_feature: MA Experiment 108522 PARAMETER Experiment Name: Zm_42deg_Heat_P Parameter: Tissue Value: Aerial
  misc_feature: MA Experiment ID: 108523 Result: Up-regulated in Transcription
  misc_feature: MA Experiment 108523 PARAMETER Experiment Name: Zm_42deg_Heat_P Parameter: Age (day) Value: 8
  misc_feature: MA Experiment 108523 PARAMETER Experiment Name: Zm_42deg_Heat_P Parameter: Organism Value: Zea mays
  misc_feature: MA Experiment 108523 PARAMETER Experiment Name: Zm_42deg_Heat_P Parameter: Plant Line Value: 35A19
  misc_feature: MA Experiment 108523 PARAMETER Experiment Name: Zm_42deg_Heat_P Parameter: Temperature (deg C) Value: 42 vs. 22
  misc_feature: MA Experiment 108523 PARAMETER Experiment Name: Zm_42deg_Heat_P Parameter: Timepoint (hr) Value: 6
  misc_feature: MA Experiment 108523 PARAMETER Experiment Name: Zm_42deg_Heat_P Parameter: Tissue Value: Aerial
  misc_feature: MA Experiment ID: 108540 Result: Up-regulated in Transcription
  misc_feature: MA Experiment 108540 PARAMETER Experiment Name: Zm_20percent_PEG_P Parameter: Age (day) Value: 8
  misc_feature: MA Experiment 108540 PARAMETER Experiment Name: Zm_20percent_PEG_P Parameter: Organism Value: Zea mays
  misc_feature: MA Experiment 108540 PARAMETER Experiment Name: Zm_20percent_PEG_P Parameter: Plant Line Value: 35A19
  misc_feature: MA Experiment 108540 PARAMETER Experiment Name: Zm_20percent_PEG_P Parameter: Timepoint (hr) Value: 6
  misc_feature: MA Experiment 108540 PARAMETER Experiment Name: Zm_20percent_PEG_P Parameter: Tissue Value: Aerial
  misc_feature: MA Experiment 108540 PARAMETER Experiment Name: Zm_20percent_PEG_P Parameter: Treatment Value: 20percent PEG vs. No Treatment
  misc_feature: MA Experiment ID: 108556 Result: Up-regulated in Transcription
  misc_feature: MA Experiment 108556 PARAMETER Experiment Name: Zm_Drought_P Parameter: Age (day) Value: 9
  misc_feature: MA Experiment 108556 PARAMETER Experiment Name: Zm_Drought_P Parameter: Organism Value: Zea mays
  misc_feature: MA Experiment 108556 PARAMETER Experiment Name: Zm_Drought_P Parameter: Plant Line Value: 35A19
  misc_feature: MA Experiment 108556 PARAMETER Experiment Name: Zm_Drought_P Parameter: Timepoint (hr) Value: 24
  misc_feature: MA Experiment 108556 PARAMETER Experiment Name: Zm_Drought_P Parameter: Tissue Value: Aerial
  misc_feature: MA Experiment 108556 PARAMETER Experiment Name: Zm_Drought_P Parameter: Treatment Value: Drought vs. No Drought
  misc_feature: MA Experiment ID: 20000480 Result: Up-regulated in Transcription
  misc_feature: MA Experiment 20000480 PARAMETER Experiment Name: Zm_Drought_P Parameter: Age (day) Value: 11
  misc_feature: MA Experiment 20000480 PARAMETER Experiment Name: Zm_Drought_P Parameter: Organism Value: Zea mays
  misc_feature: MA Experiment 20000480 PARAMETER Experiment Name: Zm_Drought_P Parameter: Plant Line Value: 35A19
  misc_feature: MA Experiment 20000480 PARAMETER Experiment Name: Zm_Drought_P Parameter: Timepoint (hr) Value: 72
  misc_feature: MA Experiment 20000480 PARAMETER Experiment Name: Zm_Drought_P Parameter: Tissue Value: Aerial
  misc_feature: MA Experiment 20000480 PARAMETER Experiment Name: Zm_Drought_P Parameter: Treatment Value: Drought vs. No Drought
gcacgagaccattacctagaacatcctaatcgaaaacccgatttcaccgaccatttttccccatttcacagcgggcgaatatctctcatctcccccatcctctttcctgcaacaactcctacccacccgacagaaatatcctaagcgctgacccgaatacccgattcgctcctcgtccggtcgattcctgctcctaatcgctcgaatcgagtccttgccccgtgttccgtgccacaatctgggcgcttggctcccgcgagccggggttcttgggcctgggcggaggccatggacaagccggtggcgccgggcattatcaaggaggagctcctggagcagcagccgccgacgcaggacggtgtgggtggcggcggggatgcgccgcgcccgatggaggggctgcacgaggtgggtcccccgcctttcctcaccaagacgttcgaccttgtggaggacccggccaccgacgccgtcctctcctggagccgcgccggcaacagcttcatcgtctgggacccgcacgtcttcgccgacgggctgctcccgcgcctcttcaagcacagtaacttctccagcttcgtgcgccagctcaacacctatggcttcagaaggttgatcctgacaggtgggagtttgcaaatgaaggtttcctcagaggtcaaaggcacctgctgaagatgataaagagaaggaagccaccatcagctgtggcaccattgcgacagcaacgtgcccctgcttcttgcctggaggttggtgagtttggatttgaggaggagattgataggctgaagcgtgacaagaacattttaatcacagaagtagtaaaactaaggcaggagcagcaaagtactaaagatcatgtgagagccatggaggaaaggctacgagtggctgaacagaagcaggtacagatgatggggttcttggcaagagcaatgcggaacccagagttcttcctcagttggcccagcagcaagacaagaggaaggagctcgaggataccatctcaaagaaaagaaggcggcccattgacaacacaccattctacagtgatggggaaagcgaacagcttgattcacagttgaaaatgttcgagtcaggtgttctcaatgggctcaatgaacctgagctggagaatttagcagtgaacattcaggagcttgggaagggaagcatagatgatgggaacttgactcaagttagtgaccagtcagagctgaacgacgacttctgggcagagcttttggtcgaagattttggagacaaggcaggacagccagagttggagggaagaactgaagacgtgaatgaccttgctcaacaactggggtatctgagttcttctagcccaaaatagagccagttcctaatggttgcccccacaatcactggtgctttccctaccctactgttgcagaccatcctgatcaaaccggtacttttcaaattcaattcaatgacacaaacctgttaaaatctggtaacattttcattccatttcttttatattgctggattagccaggaatgatgatggatctggcagacaaggtttgacgacccatccttctaaccatatccattatgtttgcgcagttgcatcttcagatttgccctcatcttttcttcttcttcttctgaaacattctaaattgctccttatccagttgactggtggtggagaggtgttcatactgaaggcgtgctgtggagaggtcactgccttgacgttgaaggcttagcgctgtactctgctgtgggagttacgtgtggggtgttggctaaatgtctcttccggcgtcttctggcaaaatgatctcgtggacggtgactggcaaagatgcctaggggccaacgtatacgtacacagctgttatcagatcttgttcaaagtcattgcgcggttttgacggtgctatgtatcgatcagggttctggccttctggggttgggttgtagaattgactggctgatctagtgttctccatgtatgactggtgtaaccttaaaacaccctcagcttgttgttgaactgtgacaagcatctcgtttttttgttgtactccattttcatcatcattgtacatcaaattgctgaattatgaacagatccct

SEQ ID NO: 19631 - protein, 136 aa, Zea mays subsp. mays
  peptide (1)..(136): Ceres Seq. ID no. 12382617
  misc_feature (1)..(84): Pfam Name: HSF-type DNA-binding Pfam Description: HSF-type DNA-binding
  misc_feature (1)..(136): Homolog of NCBI NO: 429155 NR Description: heat shock factor [Arabidopsis thaliana]
  misc_feature (1)..(118): Homolog of NCBI NO: 29126355 NR Description: putative heat shock transcription factor
  misc_feature (1)..(136): Homolog of NCBI NO: 729774 NR Description: HEAT SHOCK FACTOR PROTEIN HSF30 (HEAT SHOCK
  misc_feature (1)..(93): Homolog of NCBI NO: 30017583 NR Description: putative heat shock factor
  misc_feature (1)..(93): Homolog of NCBI NO: 15225255 NR Description: putative heat shock transcription factor; protein
  misc_feature (1)..(119): Homolog of NCBI NO: 15228865 NR Description: putative heat shock protein
  misc_feature (1)..(113): Homolog of NCBI NO: 34902614 NR Description: Putative heat shock protein
  misc_feature (1)..(93): Homolog of NCBI NO: 33087081 NR Description: heat stress protein [Oryza sativa (japonica
  misc_feature (1)..(93): Homolog of NCBI NO: 28971956 NR Description: putative heat shock transcription factor
  misc_feature (1)..(119): Homolog of NCBI NO: 37534406 NR Description: putative auxin-induced protein
MIKRRKPPSAVAPLRQQRAPASCLEVGEFGFEEEIDRLKRDKNILITEVVKLRQEQQSTKDHVRAMEERLRVAEQKQVQMMGFLARAMRNPEFFLSWPSSKTRGRSSRIPSQRKEGGPLTTHHSTVMGKANSLIHS

SEQ ID NO: 19632 - protein, 128 aa, Zea mays subsp. mays
  peptide (1)..(128): Ceres Seq. ID no. 12382618
  misc_feature (44)..(104): Pfam Name: HSF-type DNA-binding Pfam Description: HSF-type DNA-binding
  misc_feature (23)..(109): Homolog of NCBI NO: 429155 NR Description: heat shock factor [Arabidopsis thaliana]
  misc_feature (43)..(109): Homolog of NCBI NO: 29126355 NR Description: putative heat shock transcription factor
  misc_feature (22)..(109): Homolog of NCBI NO: 729774 NR Description: HEAT SHOCK FACTOR PROTEIN HSF30 (HEAT SHOCK
  misc_feature (30)..(109): Homolog of NCBI NO: 30017583 NR Description: putative heat shock factor
  misc_feature (27)..(109): Homolog of NCBI NO: 15225255 NR Description: putative heat shock transcription factor; protein
  misc_feature (32)..(109): Homolog of NCBI NO: 15228865 NR Description: putative heat shock protein
  misc_feature (1)..(104): Homolog of NCBI NO: 34902614 NR Description: Putative heat shock protein
  misc_feature (22)..(109): Homolog of NCBI NO: 33087081 NR Description: heat stress protein [Oryza sativa (japonica
  misc_feature (22)..(109): Homolog of NCBI NO: 28971956 NR Description: putative heat shock transcription factor
  misc_feature (1)..(109): Homolog of NCBI NO: 37534406 NR Description: putative auxin-induced protein
MDKPVAPGIIKEELLEQQPPTQDGVGGGGDAPRPMEGLHEVGPPPFLTKTFDLVEDPATDAVLSWSRAGNSFIVWDPHVFADGLLPRLFKHSNFSSFVRQLNTYGFRRLILTGGSLQMKVSSEVKGTC

SEQ ID NO: 19633 - protein, 94 aa, Zea mays subsp. mays
  peptide (1)..(94): Ceres Seq. ID no. 12382619
  misc_feature (10)..(70): Pfam Name: HSF-type DNA-binding Pfam Description: HSF-type DNA-binding
  misc_feature (1)..(75): Homolog of NCBI NO: 729774 NR Description: HEAT SHOCK FACTOR PROTEIN HSF30 (HEAT SHOCK
  misc_feature (1)..(75): Homolog of NCBI NO: 30017583 NR Description: putative heat shock factor
  misc_feature (1)..(75): Homolog of NCBI NO: 15225255 NR Description: putative heat shock transcription factor; protein
  misc_feature (1)..(75): Homolog of NCBI NO: 15228865 NR Description: putative heat shock protein
  misc_feature (1)..(75): Homolog of NCBI NO: 429155 NR Description: heat shock factor [Arabidopsis thaliana]
  misc_feature (9)..(75): Homolog of NCBI NO: 29126355 NR Description: putative heat shock transcription factor
  misc_feature (1)..(70): Homolog of NCBI NO: 34902614 NR Description: Putative heat shock protein
  misc_feature (1)..(75): Homolog of NCBI NO: 33087081 NR Description: heat stress protein [Oryza sativa (japonica
  misc_feature (1)..(75): Homolog of NCBI NO: 28971956 NR Description: putative heat shock transcription factor
  misc_feature (1)..(75): Homolog of NCBI NO: 37534406 NR Description: putative auxin-induced protein
MEGLHEVGPPPFLTKTFDLVEDPATDAVLSWSRAGNSFIVWDPHVFADGLLPRLFKHSNFSSFVRQLNTYGFRRLILTGGSLQMKVSSEVKGTC

SEQ ID NO: 19634 - DNA, 466 bp, Zea mays subsp. mays
  misc_feature (1)..(466): Ceres Seq. ID no. 11415029
  misc_feature: MA Experiment ID: 108527 Result: Down-regulated in Transcription
  misc_feature: MA Experiment 108527 PARAMETER Experiment Name: Zm_5mM_NO_P Parameter: Age (day) Value: 8
  misc_feature: MA Experiment 108527 PARAMETER Experiment Name: Zm_5mM_NO_P Parameter: Organism Value: Zea mays
  misc_feature: MA Experiment 108527 PARAMETER Experiment Name: Zm_5mM_NO_P Parameter: Plant Line Value: 35A19
  misc_feature: MA Experiment 108527 PARAMETER Experiment Name: Zm_5mM_NO_P Parameter: Timepoint (hr) Value: 6
  misc_feature: MA Experiment 108527 PARAMETER Experiment Name: Zm_5mM_NO_P Parameter: Tissue Value: Aerial
  misc_feature: MA Experiment 108527 PARAMETER Experiment Name: Zm_5mM_NO_P Parameter: Treatment Value: 5mM NO vs. No Treatment
  misc_feature: MA Experiment ID: 108528 Result: Down-regulated in Transcription
  misc_feature: MA Experiment 108528 PARAMETER Experiment Name: Zm_Imbibed_Seeds_P Parameter: Age (day) Value: 5 vs. 2
  misc_feature: MA Experiment 108528 PARAMETER Experiment Name: Zm_Imbibed_Seeds_P Parameter: Organism Value: Zea mays
  misc_feature: MA Experiment 108528 PARAMETER Experiment Name: Zm_Imbibed_Seeds_P Parameter: Plant Line Value: 35A19
  misc_feature: MA Experiment 108528 PARAMETER Experiment Name: Zm_Imbibed_Seeds_P Parameter: Tissue Value: Aerial vs. Embryo
  misc_feature: MA Experiment ID: 108530 Result: Down-regulated in Transcription
  misc_feature: MA Experiment 108530 PARAMETER Experiment Name: Zm_Imbibed_Seeds_P Parameter: Age (day) Value: 6 vs. 2
  misc_feature: MA Experiment 108530 PARAMETER Experiment Name: Zm_Imbibed_Seeds_P Parameter: Organism Value: Zea mays
  misc_feature: MA Experiment 108530 PARAMETER Experiment Name: Zm_Imbibed_Seeds_P Parameter: Plant Line Value: 35A19
  misc_feature: MA Experiment 108530 PARAMETER Experiment Name: Zm_Imbibed_Seeds_P Parameter: Tissue Value: Aerial vs. Embryo
  misc_feature: MA Experiment ID: 108535 Result: Up-regulated in Transcription
  misc_feature: MA Experiment 108535 PARAMETER Experiment Name: Zm_Meristem_P Parameter: Age (day) Value: 8
  misc_feature: MA Experiment 108535 PARAMETER Experiment Name: Zm_Meristem_P Parameter: Organism Value: Zea mays
  misc_feature: MA Experiment 108535 PARAMETER Experiment Name: Zm_Meristem_P Parameter: Plant Line Value: 35A19
  misc_feature: MA Experiment 108535 PARAMETER Experiment Name: Zm_Meristem_P Parameter: Tissue Value: Root Meristem vs. Above Root Meristem
  misc_feature: MA Experiment ID: 20000487 Result: Up-regulated in Transcription
  misc_feature: MA Experiment 20000487 PARAMETER Experiment Name: Zm_50mM_NH4NO3_L_to_H_P Parameter: Organism Value: Zea mays
  misc_feature: MA Experiment 20000487 PARAMETER Experiment Name: Zm_50mM_NH4NO3_L_to_H_P Parameter: Timepoint (hr) Value: 4
  misc_feature: MA Experiment 20000487 PARAMETER Experiment Name: Zm_50mM_NH4NO3_L_to_H_P Parameter: Tissue Value: Leaves
  misc_feature: MA Experiment 20000487 PARAMETER Experiment Name: Zm_50mM_NH4NO3_L_to_H_P Parameter: Treatment Value: 50mM NH4NO3 vs. 100mM Mannitol
  misc_feature: MA Experiment ID: 20000488 Result: Up-regulated in Transcription
  misc_feature: MA Experiment 20000488 PARAMETER Experiment Name: Zm_50mM_NH4NO3_L_to_H_P Parameter: Organism Value: Zea mays
  misc_feature: MA Experiment 20000488 PARAMETER Experiment Name: Zm_50mM_NH4NO3_L_to_H_P Parameter: Timepoint (hr) Value: 8
  misc_feature: MA Experiment 20000488 PARAMETER Experiment Name: Zm_50mM_NH4NO3_L_to_H_P Parameter: Tissue Value: Leaves
  misc_feature: MA Experiment 20000488 PARAMETER Experiment Name: Zm_50mM_NH4NO3_L_to_H_P Parameter: Treatment Value: 50mM NH4NO3 vs. 100mM Mannitol
  misc_feature: MA Experiment ID: 20000492 Result: Up-regulated in Transcription
  misc_feature: MA Experiment 20000492 PARAMETER Experiment Name: Zm_Hybrid_Seed_Dev_P Parameter: DAP Value: 12
  misc_feature: MA Experiment 20000492 PARAMETER Experiment Name: Zm_Hybrid_Seed_Dev_P Parameter: Organism Value: Zea mays
  misc_feature: MA Experiment 20000492 PARAMETER Experiment Name: Zm_Hybrid_Seed_Dev_P Parameter: Plant Line Value: 35A19
  misc_feature: MA Experiment 20000492 PARAMETER Experiment Name: Zm_Hybrid_Seed_Dev_P Parameter: Tissue Value: Fert Kernel vs. Unfert Floret
  misc_feature: MA Experiment ID: 20000535 Result: Up-regulated in Transcription
  misc_feature: MA Experiment 20000535 PARAMETER Experiment Name: Zm_Hybrid_Seed_Dev_P Parameter: DAP Value: 30 vs. 12
  misc_feature: MA Experiment 20000535 PARAMETER Experiment Name: Zm_Hybrid_Seed_Dev_P Parameter: Organism Value: Zea mays
  misc_feature: MA Experiment 20000535 PARAMETER Experiment Name: Zm_Hybrid_Seed_Dev_P Parameter: Plant Line Value: 35A19
  misc_feature: MA Experiment 20000535 PARAMETER Experiment Name: Zm_Hybrid_Seed_Dev_P Parameter: Tissue Value: Embryo vs. Unfert Floret
  misc_feature: MA Experiment ID: 20000633 Result: Down-regulated in Transcription
  misc_feature: MA Experiment 20000633 PARAMETER Experiment Name: Zm_Herbicide-Treatments_P Parameter: Timepoint (hr) Value: 4
  misc_feature: MA Experiment 20000633 PARAMETER Experiment Name: Zm_Herbicide-Treatments_P Parameter: Tissue Value: Aerial
  misc_feature: MA Experiment 20000633 PARAMETER Experiment Name: Zm_Herbicide-Treatments_P Parameter: Treatment Value: Trimec vs. No Treatment
  misc_feature: MA Experiment ID: 20001613 Result: Up-regulated in Transcription
  misc_feature: MA Experiment 20001613 PARAMETER Experiment Name: Zm_50ppm_KNO3_L-to-H_P Parameter: Age (day) Value: 20
  misc_feature: MA Experiment 20001613 PARAMETER Experiment Name: Zm_50ppm_KNO3_L-to-H_P Parameter: Organism Value: Zea mays
  misc_feature: MA Experiment 20001613 PARAMETER Experiment Name: Zm_50ppm_KNO3_L-to-H_P Parameter: Plant Line Value: 35A19
  misc_feature: MA Experiment 20001613 PARAMETER Experiment Name: Zm_50ppm_KNO3_L-to-H_P Parameter: Timepoint (hr) Value: 24
  misc_feature: MA Experiment 20001613 PARAMETER Experiment Name: Zm_50ppm_KNO3_L-to-H_P Parameter: Tissue Value: Roots
  misc_feature: MA Experiment 20001613 PARAMETER Experiment Name: Zm_50ppm_KNO3_L-to-H_P Parameter: Treatment Value: 50ppm KNO3 vs. 50ppm KCl
attttggctcctcactgccgcgccgccaccccctacaggtaaggaagaggagggcaggatgtcgcaccgtaagttcgagcacccgaggcacggctccctcggcttccttcccaggaagcgctcctcccgtcaccgcggcaaggtgaagtcattccctagggatgaccccaagaagccttgccatctcactgccttccttggctacaaggctggcatgactcacattgtccgtgaggttgagaagccaggatccaaactccataagaaggaaacttgtgaggctgttaccatcattgaaacycycttgtcaaaaadcggctcgtggcatatgtgaagactcctcgtggcctccgcacactcaactctgtttgggsccaacatcttagtgaagaagtgaggagaargttctacaagaactggtgcaagagcaagaagaargctttcacaaagtatgctctcaaatatg

SEQ ID NO: 19635 - protein, 110 aa, Zea mays subsp. mays
  peptide (1)..(110): Ceres Seq. ID no. 11415030
  misc_feature (20)..(100): Homolog of NCBI NO: 15220533 NR Description: ribosomal protein; protein id: At1g61580.1
  misc_feature (20)..(100): Homolog of NCBI NO: 81658 NR Description: ribosomal protein L3.e (clone ARP2), cytosolic -
  misc_feature (20)..(100): Homolog of NCBI NO: 15218306 NR Description: ribosomal protein
  misc_feature (20)..(100): Homolog of NCBI NO: 81657 NR Description: ribosomal protein L3.e (clone ARP1), cytosolic -
  misc_feature (20)..(100): Homolog of NCBI NO: 6688812 NR Description: L3 Ribosomal protein [Medicago sativa subsp. x
  misc_feature (20)..(100): Homolog of NCBI NO: 38327504 NR Description: ribosomal protein L3 [Lycopersicon esculentum]
  misc_feature (20)..(100): Homolog of NCBI NO: 34105768 NR Description: ribosomal protein L3 [Triticum aestivum]
  misc_feature (20)..(100): Homolog of NCBI NO: 548770 NR Description: 60S RIBOSOMAL PROTEIN L3
  misc_feature (20)..(100): Homolog of NCBI NO: 33526886 NR Description: ribosomal protein L3 [Triticum aestivum]
  misc_feature (20)..(100): Homolog of NCBI NO: 33526877 NR Description: ribosomal protein L3 [Triticum aestivum]
  misc_feature (100)..(100): Xaa is any aa, unknown or other
  misc_feature (101)..(101): Xaa is any aa, unknown or other
  misc_feature (105)..(105): Xaa is any aa, unknown or other
FWLLTAAPPPPTGKEEEGRMSHRKFEHPRHGSLGFLPRKRSSRHRGKVKSFPRDDPKKPCHLTAFLGYKAGMTHIVREVEKPGSKLHKKETCEAVTIIEXXLSKXGSWHM

SEQ ID NO: 19636 - protein, 91 aa, Zea mays subsp. mays
  peptide (1)..(91): Ceres Seq. ID no. 11415031
  misc_feature (1)..(81): Homolog of NCBI NO: 15220533 NR Description: ribosomal protein; protein id: At1g61580.1
  misc_feature (1)..(81): Homolog of NCBI NO: 81658 NR Description: ribosomal protein L3.e (clone ARP2), cytosolic -
  misc_feature (1)..(81): Homolog of NCBI NO: 15218306 NR Description: ribosomal protein
  misc_feature (1)..(81): Homolog of NCBI NO: 81657 NR Description: ribosomal protein L3.e (clone ARP1), cytosolic -
  misc_feature (1)..(81): Homolog of NCBI NO: 6688812 NR Description: L3 Ribosomal protein [Medicago sativa subsp. x
  misc_feature (1)..(81): Homolog of NCBI NO: 38327504 NR Description: ribosomal protein L3 [Lycopersicon esculentum]
  misc_feature (1)..(81): Homolog of NCBI NO: 34105768 NR Description: ribosomal protein L3 [Triticum aestivum]
  misc_feature (1)..(81): Homolog of NCBI NO: 548770 NR Description: 60S RIBOSOMAL PROTEIN L3
  misc_feature (1)..(81): Homolog of NCBI NO: 33526886 NR Description: ribosomal protein L3 [Triticum aestivum]
  misc_feature (1)..(81): Homolog of NCBI NO: 33526877 NR Description: ribosomal protein L3 [Triticum aestivum]
  misc_feature (81)..(81): Xaa is any aa, unknown or other
  misc_feature (82)..(82): Xaa is any aa, unknown or other
  misc_feature (86)..(86): Xaa is any aa, unknown or other
MSHRKFEHPRHGSLGFLPRKRSSRHRGKVKSFPRDDPKKPCHLTAFLGYKAGMTHIVREVEKPGSKLHKKETCEAVTIIEXXLSKXGSWHM

SEQ ID NO: 19637 - DNA, 1252 bp, Zea mays subsp. mays
  misc_feature (1)..(1252): Ceres Seq. ID no. 12350354
  misc_feature: MA Experiment ID: 108556 Result: Down-regulated in Transcription
  misc_feature: MA Experiment 108556 PARAMETER Experiment Name: Zm_Drought_P Parameter: Age (day) Value: 9
  misc_feature: MA Experiment 108556 PARAMETER Experiment Name: Zm_Drought_P Parameter: Organism Value: Zea mays
  misc_feature: MA Experiment 108556 PARAMETER Experiment Name: Zm_Drought_P Parameter: Plant Line Value: 35A19
  misc_feature: MA Experiment 108556 PARAMETER Experiment Name: Zm_Drought_P Parameter: Timepoint (hr) Value: 24
  misc_feature: MA Experiment 108556 PARAMETER Experiment Name: Zm_Drought_P Parameter: Tissue Value: Aerial
  misc_feature: MA Experiment 108556 PARAMETER Experiment Name: Zm_Drought_P Parameter: Treatment Value: Drought vs. No Drought
  misc_feature: MA Experiment ID: 20000535 Result: Down-regulated in Transcription
  misc_feature: MA Experiment 20000535 PARAMETER Experiment Name: Zm_Hybrid_Seed_Dev_P Parameter: DAP Value: 30 vs. 12
  misc_feature: MA Experiment 20000535 PARAMETER Experiment Name: Zm_Hybrid_Seed_Dev_P Parameter: Organism Value: Zea mays
  misc_feature: MA Experiment 20000535 PARAMETER Experiment Name: Zm_Hybrid_Seed_Dev_P Parameter: Plant Line Value: 35A19
  misc_feature: MA Experiment 20000535 PARAMETER Experiment Name: Zm_Hybrid_Seed_Dev_P Parameter: Tissue Value: Embryo vs. Unfert Floret
gatatctcattggagtgcaggactcggaggcagcccatttctaggcagcgcgtctcttcgcgcaccccccaattcgaacgacggagcacgacgcacgcagagccgcagagatccgtcacactgcaagttttgaaaactgaactgtaagatggcatcagcagagctttcccgtgaggaaaatgtgtacatggcgaagctcgccgagcaggcagagaggtacgaggaaatggttgagttcatggagaaggtagcgaaaactgttgactcggaggagctcactgtggaggagcgcaacctcctgtctgttgcatacaagaacgtcattggagcccgccgtgcctcatggcgcatcatctcctccatcgagcagaaggaggagggtcgaggcaatgaggaccgtgtaacactcatcaaggactaccgtggcaagattgaaactgagctcaccaagatctgtgatggcatcctcaagcttctcgaatctcaccttgtgccgtcttccaccgctcccgagtccaaggtcttctatctcaagatgaagggtgactactacagataccttgctgagttcaagactggagctgagagaaaggacgctgctgagaacaccatggtggcatacaaggctgcccaggacattgctttggctgagcttgctccaactcaccctattaggcttggactggcactcaacttctcagtgttctactatgagattctcaactcacccgatcgcgcctgcagtcttgcaaagcaggcttttgacgaggccatctcggaactggacaccctgagcgaggagtcctacaaggacagcactttgatcatgcagctccttcatgataacttgaccctatggacttctgacatctcggaggaccctgcggaagagatcagggaggcgcccaagcacgacttgagcgaggggcagtaaagccggctttacatgcctagaagctagtacctagtgtttgctgctgtctaatgacattatgcaatgtgatctggaccctggtttcttgggtgcgacgcttgtagcagccgtcttatgattatttgtcgggaaaatttgggggctccccatatgagatgctgccgggcaagacctcgccatcccccacctcgtttcaggcgggggacgctggagcctggtccggttgggttgggaagccccttaaactgttgtcgcttgcattttaaccttttcatcgccgttcagtggtcctaaatctatggctcgtctcagtggtct

SEQ ID NO: 19638 - protein, 261 aa, Zea mays subsp. mays
  peptide (1)..(261): Ceres Seq. ID no. 12350355
  misc_feature (8)..(245): Pfam Name: 14-3-3 protein Pfam Description: 14-3-3 protein
  misc_feature (1)..(261): Homolog of NCBI NO: 12229593 NR Description: 14-3-3-like protein
  misc_feature (6)..(261): Homolog of NCBI NO: 7435022 NR Description: GF14-c protein - rice
  misc_feature (14)..(261): Homolog of NCBI NO: 32401388 NR Description: 14-3-3 protein [Triticum aestivum]
  misc_feature (4)..(261): Homolog of NCBI NO: 2492487 NR Description: 14-3-3-LIKE PROTEIN B (14-3-3B)
  misc_feature (4)..(261): Homolog of NCBI NO: 7271253 NR Description: 14-3-3-like protein [Oryza sativa]
  misc_feature (2)..(261): Homolog of NCBI NO: 7435015 NR Description: 14-3-3 protein - barley
  misc_feature (14)..(261): Homolog of NCBI NO: 322869 NR Description: 14-3-3 protein homolog GF14-12 - maize
  misc_feature (2)..(261): Homolog of NCBI NO: 7435021 NR Description: GF14-b protein - rice
  misc_feature (1)..(261): Homolog of NCBI NO: 1345587 NR Description: 14-3-3-LIKE PROTEIN GF14-6
  misc_feature (1)..(261): Homolog of NCBI NO: 1345588 NR Description: 14-3-3-LIKE PROTEIN GF14-12
MASAELSREENVYMAKLAEQAERYEEMVEFMEKVAKTVDSEELTVEERNLLSVAYKNVIGARRASWRIISSIEQKEEGRGNEDRVTLIKDYRGKIETELTKICDGILKLLESHLVPSSTAPESKVFYLKMKGDYYRYLAEFKTGAERKDAAENTMVAYKAAQDIALAELAPTHPIRLGLALNFSVFYYEILNSPDRACSLAKQAFDEAISELDTLSEESYKDSTLIMQLLHDNLTLWTSDISEDPAEEIREAPKHDLSEGQ

SEQ ID NO: 19639 - protein, 248 aa, Zea mays subsp. mays
  peptide (1)..(248): Ceres Seq. ID no. 12350356
  misc_feature (1)..(232): Pfam Name: 14-3-3 protein Pfam Description: 14-3-3 protein
  misc_feature (1)..(248): Homolog of NCBI NO: 12229593 NR Description: 14-3-3-like protein
  misc_feature (1)..(248): Homolog of NCBI NO: 7435022 NR Description: GF14-c protein - rice
  misc_feature (1)..(248): Homolog of NCBI NO: 32401388 NR Description: 14-3-3 protein [Triticum aestivum]
  misc_feature (1)..(248): Homolog of NCBI NO: 2492487 NR Description: 14-3-3-LIKE PROTEIN B (14-3-3B)
  misc_feature (1)..(248): Homolog of NCBI NO: 7271253 NR Description: 14-3-3-like protein [Oryza sativa]
  misc_feature (1)..(248): Homolog of NCBI NO: 7435015 NR Description: 14-3-3 protein - barley
  misc_feature (1)..(248): Homolog of NCBI NO: 322869 NR Description: 14-3-3 protein homolog GF14-12 - maize
  misc_feature (1)..(248): Homolog of NCBI NO: 7435021 NR Description: GF14-b protein - rice
  misc_feature (1)..(248): Homolog of NCBI NO: 1345587 NR Description: 14-3-3-LIKE PROTEIN GF14-6
  misc_feature (1)..(248): Homolog of NCBI NO: 1345588 NR Description: 14-3-3-LIKE PROTEIN GF14-12
MAKLAEQAERYEEMVEFMEKVAKTVDSEELTVEERNLLSVAYKNVIGARRASWRIISSIEQKEEGRGNEDRVTLIKDYRGKIETELTKICDGILKLLESHLVPSSTAPESKVFYLKMKGDYYRYLAEFKTGAERKDAAENTMVAYKAAQDIALAELAPTHPIRLGLALNFSVFYYEILNSPDRACSLAKQAFDEAISELDTLSEESYKDSTLIMQLLHDNLTLWTSDISEDPAEEIREAPKHDLSEGQ

SEQ ID NO: 19640 - protein, 235 aa, Zea mays subsp. mays
  peptide (1)..(235): Ceres Seq. ID no. 12350357
  misc_feature (1)..(219): Pfam Name: 14-3-3 protein Pfam Description: 14-3-3 protein
  misc_feature (1)..(235): Homolog of NCBI NO: 12229593 NR Description: 14-3-3-like protein
  misc_feature (1)..(235): Homolog of NCBI NO: 7435022 NR Description: GF14-c protein - rice
  misc_feature (1)..(235): Homolog of NCBI NO: 32401388 NR Description: 14-3-3 protein [Triticum aestivum]
  misc_feature (1)..(235): Homolog of NCBI NO: 2492487 NR Description: 14-3-3-LIKE PROTEIN B (14-3-3B)
  misc_feature (1)..(235): Homolog of NCBI NO: 7271253 NR Description: 14-3-3-like protein [Oryza sativa]
  misc_feature (1)..(235): Homolog of NCBI NO: 7435015 NR Description: 14-3-3 protein - barley
  misc_feature (1)..(235): Homolog of NCBI NO: 322869 NR Description: 14-3-3 protein homolog GF14-12 - maize
  misc_feature (1)..(235): Homolog of NCBI NO: 7435021 NR Description: GF14-b protein - rice
  misc_feature (1)..(235): Homolog of NCBI NO: 1345587 NR Description: 14-3-3-LIKE PROTEIN GF14-6
  misc_feature (1)..(235): Homolog of NCBI NO: 1345588 NR Description: 14-3-3-LIKE PROTEIN GF14-12
MVEFMEKVAKTVDSEELTVEERNLLSVAYKNVIGARRASWRIISSIEQKEEGRGNEDRVTLIKDYRGKIETELTKICDGILKLLESHLVPSSTAPESKVFYLKMKGDYYRYLAEFKTGAERKDAAENTMVAYKAAQDIALAELAPTHPIRLGLALNFSVFYYEILNSPDRACSLAKQAFDEAISELDTLSEESYKDSTLIMQLLHDNLTLWTSDISEDPAEEIREAPKHDLSEGQ

SEQ ID NO: 19641 - DNA, 2763 bp, Zea mays subsp. mays
  misc_feature (1)..(2763): Ceres Seq. ID no. 13635181
  misc_feature: MA Experiment ID: 108528 Result: Up-regulated in Transcription
  misc_feature: MA Experiment 108528 PARAMETER Experiment Name: Zm_Imbibed_Seeds_P Parameter: Age (day) Value: 5 vs. 2
  misc_feature: MA Experiment 108528 PARAMETER Experiment Name: Zm_Imbibed_Seeds_P Parameter: Organism Value: Zea mays
  misc_feature: MA Experiment 108528 PARAMETER Experiment Name: Zm_Imbibed_Seeds_P Parameter: Plant Line Value: 35A19
  misc_feature: MA Experiment 108528 PARAMETER Experiment Name: Zm_Imbibed_Seeds_P Parameter: Tissue Value: Aerial vs. Embryo
  misc_feature: MA Experiment ID: 108529 Result: Down-regulated in Transcription
  misc_feature: MA Experiment 108529 PARAMETER Experiment Name: Zm_Imbibed_Seeds_P Parameter: Age (day) Value: 5 vs. 2
  misc_feature: MA Experiment 108529 PARAMETER Experiment Name: Zm_Imbibed_Seeds_P Parameter: Organism Value: Zea mays
  misc_feature: MA Experiment 108529 PARAMETER Experiment Name: Zm_Imbibed_Seeds_P Parameter: Plant Line Value: 35A19
  misc_feature: MA Experiment 108529 PARAMETER Experiment Name: Zm_Imbibed_Seeds_P Parameter: Tissue Value: Roots vs. Embryo
  misc_feature: MA Experiment ID: 108535 Result: Up-regulated in Transcription
  misc_feature: MA Experiment 108535 PARAMETER Experiment Name: Zm_Meristem_P Parameter: Age (day) Value: 8
  misc_feature: MA Experiment 108535 PARAMETER Experiment Name: Zm_Meristem_P Parameter: Organism Value: Zea mays
  misc_feature: MA Experiment 108535 PARAMETER Experiment Name: Zm_Meristem_P Parameter: Plant Line Value: 35A19
  misc_feature: MA Experiment 108535 PARAMETER Experiment Name: Zm_Meristem_P Parameter: Tissue Value: Root Meristem vs. Above Root Meristem
  misc_feature: MA Experiment ID: 108544 Result: Down-regulated in Transcription
  misc_feature: MA Experiment ID: 108546 Result: Down-regulated in Transcription
  misc_feature: MA Experiment 108546 PARAMETER Experiment Name: Zm_Imbibed_Seeds_P Parameter: Age (day) Value: 3 vs. 2
  misc_feature: MA Experiment 108546 PARAMETER Experiment Name: Zm_Imbibed_Seeds_P Parameter: Organism Value: Zea mays
  misc_feature: MA Experiment 108546 PARAMETER Experiment Name: Zm_Imbibed_Seeds_P Parameter: Plant Line Value: 35A19
  misc_feature: MA Experiment 108546 PARAMETER Experiment Name: Zm_Imbibed_Seeds_P Parameter: Tissue Value: Roots vs. Embryo
  misc_feature: MA Experiment ID: 108559 Result: Down-regulated in Transcription
  misc_feature: MA Experiment 108559 PARAMETER Experiment Name: Zm_5mM_NO_P Parameter: Age (day) Value: 8
  misc_feature: MA Experiment 108559 PARAMETER Experiment Name: Zm_5mM_NO_P Parameter: Organism Value: Zea mays
  misc_feature: MA Experiment 108559 PARAMETER Experiment Name: Zm_5mM_NO_P Parameter: Plant Line Value: 35A19
  misc_feature: MA Experiment 108559 PARAMETER Experiment Name: Zm_5mM_NO_P Parameter: Timepoint (hr) Value: 12
  misc_feature: MA Experiment 108559 PARAMETER Experiment Name: Zm_5mM_NO_P Parameter: Tissue Value: Aerial
  misc_feature: MA Experiment 108559 PARAMETER Experiment Name: Zm_5mM_NO_P Parameter: Treatment Value: 5mM NO vs. No Treatment
  misc_feature: MA Experiment ID: 108689 Result: Up-regulated in Transcription
  misc_feature: MA Experiment 108689 PARAMETER Experiment Name: Zm_Drought_Roots_P Parameter: Age (day) Value: 9
  misc_feature: MA Experiment 108689 PARAMETER Experiment Name: Zm_Drought_Roots_P Parameter: Organism Value: Zea mays
  misc_feature: MA Experiment 108689 PARAMETER Experiment Name: Zm_Drought_Roots_P Parameter: Plant Line Value: 35A19
  misc_feature: MA Experiment 108689 PARAMETER Experiment Name: Zm_Drought_Roots_P Parameter: Timepoint (hr) Value: 24
  misc_feature: MA Experiment 108689 PARAMETER Experiment Name: Zm_Drought_Roots_P Parameter: Tissue Value: Roots
  misc_feature: MA Experiment 108689 PARAMETER Experiment Name: Zm_Drought_Roots_P Parameter: Treatment Value: Drought vs. No Drought
  misc_feature: MA Experiment ID: 20000492 Result: Up-regulated in Transcription
  misc_feature: MA Experiment 20000492 PARAMETER Experiment Name: Zm_Hybrid_Seed_Dev_P Parameter: DAP Value: 12
  misc_feature: MA Experiment 20000492 PARAMETER Experiment Name: Zm_Hybrid_Seed_Dev_P Parameter: Organism Value: Zea mays
  misc_feature: MA Experiment 20000492 PARAMETER Experiment Name: Zm_Hybrid_Seed_Dev_P Parameter: Plant Line Value: 35A19
  misc_feature: MA Experiment 20000492 PARAMETER Experiment Name: Zm_Hybrid_Seed_Dev_P Parameter: Tissue Value: Fert Kernel vs. Unfert Floret
  misc_feature: MA Experiment ID: 20000535 Result: Up-regulated in Transcription
  misc_feature: MA Experiment 20000535 PARAMETER Experiment Name: Zm_Hybrid_Seed_Dev_P Parameter: DAP Value: 30 vs. 12
  misc_feature: MA Experiment 20000535 PARAMETER Experiment Name: Zm_Hybrid_Seed_Dev_P Parameter: Organism Value: Zea mays
  misc_feature: MA Experiment 20000535 PARAMETER Experiment Name: Zm_Hybrid_Seed_Dev_P Parameter: Plant Line Value: 35A19
  misc_feature: MA Experiment 20000535 PARAMETER Experiment Name: Zm_Hybrid_Seed_Dev_P Parameter: Tissue Value: Embryo vs. Unfert Floret
ggacttgccgtcggtgctcttcaggaggaaggacgctttctctcgcaccgttctgagctgcgctggtgctcctggaaaggtactggtgcctggaggtggcagtgatgacttgctttcctccgcagagccggtcgtggacactcaacctgaagaactacagatacctgaagcagaactgactgtggagaagacatcctcctcaccaactcaaacaacatcagcagtggctgaagcaagctcaggagttgaggctgaggagaggcctgagctctcagaagtgattggagttggaggtactggtggaaccaaaattgatggtgcaggcatcaaagccaaagcaccactcgtggaggagaaaccacgagttatcccaccaccaggagatggccaacgaatatatgagattgacccaatgttggaagggtttcggggtcaccttgactaccgatacagtgaatataagagattacgtgcggctattgatcaacatgaaggtggtttggatgcattttcacgcggttacgaaaagcttggatttactcgcagcgctgaaggtatcacttacagagaatgggctcctggagcatactctgcagcattagtaggtgacttcaacaactggaacccaaatgctgatgctatggccagaaatgagtacggcgtttgggagattttcctgcctaacaatgctgatggttcccctgctattcctcatggctcacgtgtaaagatacggatggacacaccatctggtgttaaggattccattcctgcctggatcaagttttctgtgcaggctccaggtgaaataccatacaacggtatatattatgacccacctgaagaggagaaatatgtattcaaacaccctcaacctaagcggcccaagtcactgcggatatatgaatcacatgttggaatgagtagcccggaaccaaagataaatacatatgctaacttcagagatgaggtgcttccaagaattaaaaagcttggatacaatgcagtacagataatggcaatccaggaacactcttattatgcaagctttgggtaccatgttacgaatttttttgccccaagtagccgttttgggactccagaggacctaaaatctcttattgataaagcgcatgagcttggcttgctagtgcttatggatattgttcatagtcattcatcaaataataccttggatggtttgaatggtttcgatggcaccgatacacattacttccatggtggtccacgaggccatcattggatgtgggattctcgcctattcaattatgggagttgggaagttttgagatttctattgtcaaatgcgagatggtggcttgaagaatataaatttgatgggtttcgatttgatggggtgacctccatgatgtatactcaccatggattacaagtgacattcactgggaactatggcgagtattttggatttgccactgatgttgatgcagtagtttacctaatgctggtaaacgatcttattcgtgggctttatccagaagctgtatccattggcgaagatgtcagcggaatgcctacattttgtatccctgtccaagatggtggtgttggttttgattatcgtcttcatatggctgtcccagacaaatggattgaacttctgaagcaaagtgacgaatattgggaaatgggtgacatcgtgcacaccttaacaaatagaaggtggcttgaaaagtgtgtcacttattgtgaaagtcatgatcaagctcttgttggtgacaagacaattgcattctggttgatggataaggatatgtatgatttcatggctctggacaggccttcaacgcctcgcatcgatcgtgggatagcattacataaaatgattaggcttgtcacaatgggtttaggaggtgaaggctatctaaatttcatgggaaatgagtttgggcatcctgaatggatagattttccaagaggtcctcaaagtcttccaaatggctccgtcattcctgggaataacaatagctttgataaatgccgccgtagatttgaccttggagatgcagattatcttagatatcgtggtatgcaagagtttgaccaggcaatgcagcaccttgagggaaaatatgaattcatgacatctgatcactcatatgtatcacggaagcatgaggaggataaggtgatcatctttgagagaggagatttggtcttcgtgttcaacttccactggagcaatagctattttgactatcgcgttggttgtttcaagcctgggaagtacaagatcgttttagattctgacgatggccttttcggtggatttagtcggcttgatcatgatgccgagtacttcactgctgactggccgcatgacaacaggccgtgttctttctcggtctatgcacccagcagaacagccgtcgtatatgcacctgcaggtgcagaggacgaatagggccacaacagcggttgttggggaagaacttcagagggatgtgctgctggtggactgacaccactgccacgcgcgatgctgccagatgttgccctcgagaccacgtggcaggacgatcagctattcaggtggataggttagcttaccgatgagctctcgctttcgagtgactggtgaaggaaatggacctcgcacaccgcattttcgctatgcattctgaaaatgtaccgtgtggttttgtacatatggcatcagtaggcattatatcattcatctcgctgaaccaaccatttacgctatactccgtactgctgtgc

SEQ ID NO: 19642 - protein, 814 aa, Zea mays subsp. mays
  peptide (1)..(814): Ceres Seq. ID no. 13635182
  misc_feature (132)..(806): Homolog of NCBI NO: 7433851 NR Description: 1,4-alpha-glucan branching enzyme (EC 2.4.1.18) I
  misc_feature (111)..(814): Homolog of NCBI NO: 7547156 NR Description: seed starch branching enzyme [Sorghum bicolor]
  misc_feature (132)..(806): Homolog of NCBI NO: 399544 NR Description: 1,4-alpha-glucan branching enzyme (Starch
  misc_feature (132)..(806): Homolog of NCBI NO: 283000 NR Description: 1,4-alpha-glucan branching enzyme (EC 2.4.1.18) I
  misc_feature (132)..(814): Homolog of NCBI NO: 5441248 NR Description: branching enzyme 3 [Phaseolus vulgaris]
  misc_feature (132)..(814): Homolog of NCBI NO: 4586237 NR Description: starch branching enzyme I [Triticum aestivum]
  misc_feature (132)..(814): Homolog of NCBI NO: 11037532 NR Description: starch branching enyzyme 1 [Triticum aestivum]
  misc_feature (132)..(814): Homolog of NCBI NO: 4586236 NR Description: starch branching enzyme I [Triticum aestivum]
  misc_feature (132)..(814): Homolog of NCBI NO: 7433857 NR Description: 1,4-alpha-glucan branching enzyme (EC 2.4.1.18)
  misc_feature (108)..(814): Homolog of NCBI NO: 1771261 NR Description: 1,4-alpha-glucan branching enzyme [Manihot
  misc_feature (132)..(806): Homolog of NCBI NO: 7433851 NR Description: 1,4-alpha-glucan branching enzyme (EC 2.4.1.18) I
  misc_feature (111)..(814): Homolog of NCBI NO: 7547156 NR Description: seed starch branching enzyme [Sorghum bicolor]
  misc_feature (132)..(806): Homolog of NCBI NO: 399544 NR Description: 1,4-alpha-glucan branching enzyme (Starch
  misc_feature (132)..(806): Homolog of NCBI NO: 283000 NR Description: 1,4-alpha-glucan branching enzyme (EC 2.4.1.18) I
  misc_feature (132)..(814): Homolog of NCBI NO: 5441248 NR Description: branching enzyme 3 [Phaseolus vulgaris]
  misc_feature (132)..(814): Homolog of NCBI NO: 4586237 NR Description: starch branching enzyme I [Triticum aestivum]
  misc_feature (132)..(814): Homolog of NCBI NO: 11037532 NR Description: starch branching enyzyme 1 [Triticum aestivum]
  misc_feature (132)..(814): Homolog of NCBI NO: 4586236 NR Description: starch branching enzyme I [Triticum aestivum]
  misc_feature (132)..(814): Homolog of NCBI NO: 7433857 NR Description: 1,4-alpha-glucan branching enzyme (EC 2.4.1.18)
  misc_feature (108)..(814): Homolog of NCBI NO: 1771261 NR Description: 1,4-alpha-glucan branching enzyme [Manihot
DLPSVLFRRKDAFSRTVLSCAGAPGKVLVPGGGSDDLLSSAEPVVDTQPEELQIPEAELTVEKTSSSPTQTTSAVAEASSGVEAEERPELSEVIGVGGTGGTKIDGAGIKAKAPLVEEKPRVIPPPGDGQRIYEIDPMLEGFRGHLDYRYSEYKRLRAAIDQHEGGLDAFSRGYEKLGFTRSAEGITYREWAPGAYSAALVGDFNNWNPNADAMARNEYGVWEIFLPNNADGSPAIPHGSRVKIRMDTPSGVKDSIPAWIKFSVQAPGEIPYNGIYYDPPEEEKYVFKHPQPKRPKSLRIYESHVGMSSPEPKINTYANFRDEVLPRIKKLGYNAVQIMAIQEHSYYASFGYHVTNFFAPSSRFGTPEDLKSLIDKAHELGLLVLMDIVHSHSSNNTLDGLNGFDGTDTHYFHGGPRGHHWMWDSRLFNYGSWEVLRFLLSNARWWLEEYKFDGFRFDGVTSMMYTHHGLQVTFTGNYGEYFGFATDVDAVVYLMLVNDLIRGLYPEAVSIGEDVSGMPTFCIPVQDGGVGFDYRLHMAVPDKWIELLKQSDEYWEMGDIVHTLTNRRWLEKCVTYCESHDQALVGDKTIAFWLMDKDMYDFMALDRPSTPRIDRGIALHKMIRLVTMGLGGEGYLNFMGNEFGHPEWIDFPRGPQSLPNGSVIPGNNNSFDKCRRRFDLGDADYLRYRGMQEFDQAMQHLEGKYEFMTSDHSYVSRKHEEDKVIIFERGDLVFVFNFHWSNSYFDYRVGCFKPGKYKIVLDSDDGLFGGFSRLDHDAEYFTADWPHDNRPCSFSVYAPSRTAVVYAPAGAEDE

SEQ ID NO: 19643 - protein, 677 aa, Zea mays subsp. mays
  peptide (1)..(677): Ceres Seq. ID no. 13635183
  misc_feature (1)..(669): Homolog of NCBI NO: 7433851 NR Description: 1,4-alpha-glucan branching enzyme (EC 2.4.1.18) I
  misc_feature (1)..(677): Homolog of NCBI NO: 7547156 NR Description: seed starch branching enzyme [Sorghum bicolor]
  misc_feature (1)..(669): Homolog of NCBI NO: 399544 NR Description: 1,4-alpha-glucan branching enzyme (Starch
  misc_feature (1)..(669): Homolog of NCBI NO: 283000 NR Description: 1,4-alpha-glucan branching enzyme (EC 2.4.1.18) I
  misc_feature (1)..(677): Homolog of NCBI NO: 5441248 NR Description: branching enzyme 3 [Phaseolus vulgaris]
  misc_feature (1)..(677): Homolog of NCBI NO: 4586237 NR Description: starch branching enzyme I [Triticum aestivum]
  misc_feature (1)..(677): Homolog of NCBI NO: 11037532 NR Description: starch branching enyzyme 1 [Triticum aestivum]
  misc_feature (1)..(677): Homolog of NCBI NO: 4586236 NR Description: starch branching enzyme I [Triticum aestivum]
  misc_feature (1)..(677): Homolog of NCBI NO: 7433857 NR Description: 1,4-alpha-glucan branching enzyme (EC 2.4.1.18)
  misc_feature (1)..(677): Homolog of NCBI NO: 1771261 NR Description: 1,4-alpha-glucan branching enzyme [Manihot
  misc_feature (1)..(669): Homolog of NCBI NO: 7433851 NR Description: 1,4-alpha-glucan branching enzyme (EC 2.4.1.18) I
  misc_feature (1)..(677): Homolog of NCBI NO: 7547156 NR Description: seed starch branching enzyme [Sorghum bicolor]
  misc_feature (1)..(669): Homolog of NCBI NO: 399544 NR Description: 1,4-alpha-glucan branching enzyme (Starch
  misc_feature (1)..(669): Homolog of NCBI NO: 283000 NR Description: 1,4-alpha-glucan branching enzyme (EC 2.4.1.18) I
  misc_feature (1)..(677): Homolog of NCBI NO: 5441248 NR Description: branching enzyme 3 [Phaseolus vulgaris]
  misc_feature (1)..(677): Homolog of NCBI NO: 4586237 NR Description: starch branching enzyme I [Triticum aestivum]
  misc_feature (1)..(677): Homolog of NCBI NO: 11037532 NR Description: starch branching enyzyme 1 [Triticum aestivum]
  misc_feature (1)..(677): Homolog of NCBI NO: 4586236 NR Description: starch branching enzyme I [Triticum aestivum]
  misc_feature (1)..(677): Homolog of NCBI NO: 7433857 NR Description: 1,4-alpha-glucan branching enzyme (EC 2.4.1.18)
  misc_feature (1)..(677): Homolog of NCBI NO: 1771261 NR Description: 1,4-alpha-glucan branching enzyme [Manihot
MLEGFRGHLDYRYSEYKRLRAAIDQHEGGLDAFSRGYEKLGFTRSAEGITYREWAPGAYSAALVGDFNNWNPNADAMARNEYGVWEIFLPNNADGSPAIPHGSRVKIRMDTPSGVKDSIPAWIKFSVQAPGEIPYNGIYYDPPEEEKYVFKHPQPKRPKSLRIYESHVGMSSPEPKINTYANFRDEVLPRIKKLGYNAVQIMAIQEHSYYASFGYHVTNFFAPSSRFGTPEDLKSLIDKAHELGLLVLMDIVHSHSSNNTLDGLNGFDGTDTHYFHGGPRGHHWMWDSRLFNYGSWEVLRFLLSNARWWLEEYKFDGFRFDGVTSMMYTHHGLQVTFTGNYGEYFGFATDVDAVVYLMLVNDLIRGLYPEAVSIGEDVSGMPTFCIPVQDGGVGFDYRLHMAVPDKWIELLKQSDEYWEMGDIVHTLTNRRWLEKCVTYCESHDQALVGDKTIAFWLMDKDMYDFMALDRPSTPRIDRGIALHKMIRLVTMGLGGEGYLNFMGNEFGHPEWIDFPRGPQSLPNGSVIPGNNNSFDKCRRRFDLGDADYLRYRGMQEFDQAMQHLEGKYEFMTSDHSYVSRKHEEDKVIIFERGDLVFVFNFHWSNSYFDYRVGCFKPGKYKIVLDSDDGLFGGFSRLDHDAEYFTADWPHDNRPCSFSVYAPSRTAVVYAPAGAEDE

SEQ ID NO: 19644 - protein, 601 aa, Zea mays subsp. mays
  peptide (1)..(601): Ceres Seq. ID no. 13635184
  misc_feature (1)..(593): Homolog of NCBI NO: 7433851 NR Description: 1,4-alpha-glucan branching enzyme (EC 2.4.1.18) I
  misc_feature (1)..(601): Homolog of NCBI NO: 7547156 NR Description: seed starch branching enzyme [Sorghum bicolor]
  misc_feature (1)..(593): Homolog of NCBI NO: 399544 NR Description: 1,4-alpha-glucan branching enzyme (Starch
  misc_feature (1)..(593): Homolog of NCBI NO: 283000 NR Description: 1,4-alpha-glucan branching enzyme (EC 2.4.1.18) I
  misc_feature (1)..(601): Homolog of NCBI NO: 5441248 NR Description: branching enzyme 3 [Phaseolus vulgaris]
  misc_feature (1)..(601): Homolog of NCBI NO: 11037532 NR Description: starch branching enyzyme 1 [Triticum aestivum]
  misc_feature (1)..(601): Homolog of NCBI NO: 4586237 NR Description: starch branching enzyme I [Triticum aestivum]
  misc_feature (1)..(601): Homolog of NCBI NO: 4586236 NR Description: starch branching enzyme I [Triticum aestivum]
  misc_feature (1)..(601): Homolog of NCBI NO: 7433857 NR Description: 1,4-alpha-glucan branching enzyme (EC 2.4.1.18)
  misc_feature (1)..(601): Homolog of NCBI NO: 1771261 NR Description: 1,4-alpha-glucan branching enzyme [Manihot
  misc_feature (1)..(601): Homolog of NCBI NO: 7547156 NR Description: seed starch branching enzyme [Sorghum bicolor]
  misc_feature (1)..(593): Homolog of NCBI NO: 399544 NR Description: 1,4-alpha-glucan branching enzyme (Starch
  misc_feature (1)..(593): Homolog of NCBI NO: 283000 NR Description: 1,4-alpha-glucan branching enzyme (EC 2.4.1.18) I
  misc_feature (1)..(601): Homolog of NCBI NO: 5441248 NR Description: branching enzyme 3 [Phaseolus vulgaris]
  misc_feature (1)..(601): Homolog of NCBI NO: 11037532 NR Description: starch branching enyzyme 1 [Triticum aestivum]
  misc_feature (1)..(601): Homolog of NCBI NO: 4586237 NR Description: starch branching enzyme I [Triticum aestivum]
  misc_feature (1)..(601): Homolog of NCBI NO: 4586236 NR Description: starch branching enzyme I [Triticum aestivum]
  misc_feature (1)..(601): Homolog of NCBI NO: 7433857 NR Description: 1,4-alpha-glucan branching enzyme (EC 2.4.1.18)
  misc_feature (1)..(601): Homolog of NCBI NO: 1771261 NR Description: 1,4-alpha-glucan branching enzyme [Manihot
  misc_feature (1)..(593): Homolog of NCBI NO: 7433851 NR Description: 1,4-alpha-glucan branching enzyme (EC 2.4.1.18) I
MARNEYGVWEIFLPNNADGSPAIPHGSRVKIRMDTPSGVKDSIPAWIKFSVQAPGEIPYNGIYYDPPEEEKYVFKHPQPKRPKSLRIYESHVGMSSPEPKINTYANFRDEVLPRIKKLGYNAVQIMAIQEHSYYASFGYHVTNFFAPSSRFGTPEDLKSLIDKAHELGLLVLMDIVHSHSSNNTLDGLNGFDGTDTHYFHGGPRGHHWMWDSRLFNYGSWEVLRFLLSNARWWLEEYKFDGFRFDGVTSMMYTHHGLQVTFTGNYGEYFGFATDVDAVVYLMLVNDLIRGLYPEAVSIGEDVSGMPTFCIPVQDGGVGFDYRLHMAVPDKWIELLKQSDEYWEMGDIVHTLTNRRWLEKCVTYCESHDQALVGDKTIAFWLMDKDMYDFMALDRPSTPRIDRGIALHKMIRLVTMGLGGEGYLNFMGNEFGHPEWIDFPRGPQSLPNGSVIPGNNNSFDKCRRRFDLGDADYLRYRGMQEFDQAMQHLEGKYEFMTSDHSYVSRKHEEDKVIIFERGDLVFVFNFHWSNSYFDYRVGCFKPGKYKIVLDSDDGLFGGFSRLDHDAEYFTADWPHDNRPCSFSVYAPSRTAVVYAPAGAEDE

SEQ ID NO: 19645 - DNA, 847 bp, Zea mays subsp. mays
  misc_feature (1)..(847): Ceres Seq. ID no. 12379704
  misc_feature: MA Experiment ID: 20000477 Result: Up-regulated in Transcription
  misc_feature: MA Experiment 20000477 PARAMETER Experiment Name: Zm_5mM_SA_P Parameter: Age (day) Value: 10
  misc_feature: MA Experiment 20000477 PARAMETER Experiment Name: Zm_5mM_SA_P Parameter: Organism Value: Zea mays
  misc_feature: MA Experiment 20000477 PARAMETER Experiment Name: Zm_5mM_SA_P Parameter: Plant Line Value: 35A19
  misc_feature: MA Experiment 20000477 PARAMETER Experiment Name: Zm_5mM_SA_P Parameter: Timepoint (hr) Value: 48
  misc_feature: MA Experiment 20000477 PARAMETER Experiment Name: Zm_5mM_SA_P Parameter: Tissue Value: Aerial
  misc_feature: MA Experiment 20000477 PARAMETER Experiment Name: Zm_5mM_SA_P Parameter: Treatment Value: 5mM SA vs. No Treatment
  misc_feature: MA Experiment ID: 20000478 Result: Up-regulated in Transcription
  misc_feature: MA Experiment 20000478 PARAMETER Experiment Name: Zm_5mM_SA_P Parameter: Age (day) Value: 11
  misc_feature: MA Experiment 20000478 PARAMETER Experiment Name: Zm_5mM_SA_P Parameter: Organism Value: Zea mays
  misc_feature: MA Experiment 20000478 PARAMETER Experiment Name: Zm_5mM_SA_P Parameter: Plant Line Value: 35A19
  misc_feature: MA Experiment 20000478 PARAMETER Experiment Name: Zm_5mM_SA_P Parameter: Timepoint (hr) Value: 72
  misc_feature: MA Experiment 20000478 PARAMETER Experiment Name: Zm_5mM_SA_P Parameter: Tissue Value: Aerial
  misc_feature: MA Experiment 20000478 PARAMETER Experiment Name: Zm_5mM_SA_P Parameter: Treatment Value: 5mM SA vs. No Treatment
  misc_feature: MA Experiment ID: 20000479 Result: Up-regulated in Transcription
  misc_feature: MA Experiment 20000479 PARAMETER Experiment Name: Zm_Drought_P Parameter: Age (day) Value: 10
  misc_feature: MA Experiment 20000479 PARAMETER Experiment Name: Zm_Drought_P Parameter: Organism Value: Zea mays
  misc_feature: MA Experiment 20000479 PARAMETER Experiment Name: Zm_Drought_P Parameter: Plant Line Value: 35A19
  misc_feature: MA Experiment 20000479 PARAMETER Experiment Name: Zm_Drought_P Parameter: Timepoint (hr) Value: 48
  misc_feature: MA Experiment 20000479 PARAMETER Experiment Name: Zm_Drought_P Parameter: Tissue Value: Aerial
  misc_feature: MA Experiment 20000479 PARAMETER Experiment Name: Zm_Drought_P Parameter: Treatment Value: Drought vs. No Drought
  misc_feature: MA Experiment ID: 20000626 Result: Up-regulated in Transcription
  misc_feature: MA Experiment 20000626 PARAMETER Experiment Name: Zm_Herbicide-Treatments_P Parameter: Timepoint (hr) Value: 12
  misc_feature: MA Experiment 20000626 PARAMETER Experiment Name: Zm_Herbicide-Treatments_P Parameter: Tissue Value: Aerial
  misc_feature: MA Experiment 20000626 PARAMETER Experiment Name: Zm_Herbicide-Treatments_P Parameter: Treatment Value: Roundup vs. No Treatment
gagacccctctgctccaactccaatccgccgctccactccaagtcacacggaggcagccatcgcagcctcgcccgactccgcttcccctgttctttgggcatggagctgatcacaaatgtcaccgagtacgagaagctcgcgaaggagaggctgccgaagatggtgtacgactactacgcctccggcgcagaagatcagtggacgctcaaggagaaccgggaggccttctccagaattctgtttaggccacgggtactgatcgacgtctcccgtatcgacatggccacaaacgttctgggcttcagcatttccatgcctatcatgatcgctccttcagccatgcagaaaatggctcatcctgatggagagcttgccacggcaagagctgcagcctctgcaggaacaataatgacattgtcctcatggtctacttccagcgttgaagaggtcaactcagttgggccgggcatacgtttcttccagctctatgtctacaaggacaggaacatcgtacggcaactcgtgaaaagggctgagatggctggcttcaaggccattgcactcacggtagacactccaatacttggccgcagggaagctgacattaagaacaggttcgccttacctccacatctggtgttgaaaaacttccaagcgctggatcttggcacgatggacaagacaaatgattccggccttgcttcctacgttgctggtcaagttgaccgcaccctttcctggaaggacgtcaagtggctgcagacaattaccacgttgccgatcctagtgaaagggatagtgactgcagaagacactaggcttgcgatcgaatatggcgctgctggg

SEQ ID NO: 19646 - protein, 282 aa, Zea mays subsp. mays
  peptide (1)..(282): Ceres Seq. ID no. 12379705
  misc_feature (47)..(281): Pfam Name: FMN-dependent dehydrogenase Pfam Description: FMN-dependent dehydrogenase
  misc_feature (34)..(281): Homolog of NCBI NO: 15231850 NR Description: glycolate oxidase, putative
  misc_feature (34)..(281): Homolog of NCBI NO: 2554675 NR Description: Three-Dimensional Structure Of Glycolate Oxidase
  misc_feature (34)..(281): Homolog of NCBI NO: 121530 NR Description: (S)-2-hydroxy-acid oxidase, peroxisomal
  misc_feature (34)..(281): Homolog of NCBI NO: 7431428 NR Description: (S)-2-hydroxy-acid oxidase (EC 1.1.3.15) -
  misc_feature (34)..(281): Homolog of NCBI NO: 1773330 NR Description: glycolate oxidase [Mesembryanthemum crystallinum]
  misc_feature (34)..(281): Homolog of NCBI NO: 228403 NR Description: glycolate oxidase
  misc_feature (34)..(281): Homolog of NCBI NO: 27549566 NR Description: glycolate oxidase [Zantedeschia aethiopica]
  misc_feature (34)..(281): Homolog of NCBI NO: 15236857 NR Description: glycolate oxidase - like protein
  misc_feature (37)..(281): Homolog of NCBI NO: 34395056 NR Description: putative glycolate oxidase
  misc_feature (34)..(281): Homolog of NCBI NO: 38344169 NR Description: OSJNBa0053K19.8 [Oryza sativa (japonica
RPLCSNSNPPLHSKSHGGSHRSLARLRFPCSLGMELITNVTEYEKLAKERLPKMVYDYYASGAEDQWTLKENREAFSRILFRPRVLIDVSRIDMATNVLGFSISMPIMIAPSAMQKMAHPDGELATARAAASAGTIMTLSSWSTSSVEEVNSVGPGIRFFQLYVYKDRNIVRQLVKRAEMAGFKAIALTVDTPILGRREADIKNRFALPPHLVLKNFQALDLGTMDKTNDSGLASYVAGQVDRTLSWKDVKWLQTITTLPILVKGIVTAEDTRLAIEYGAAG

SEQ ID NO: 19647 - protein, 249 aa, Zea mays subsp. mays
  peptide (1)..(249): Ceres Seq. ID no. 12379706
  misc_feature (14)..(248): Pfam Name: FMN-dependent dehydrogenase Pfam Description: FMN-dependent dehydrogenase
  misc_feature (1)..(248): Homolog of NCBI NO: 228403 NR Description: glycolate oxidase
  misc_feature (1)..(248): Homolog of NCBI NO: 27549566 NR Description: glycolate oxidase [Zantedeschia aethiopica]
  misc_feature (1)..(248): Homolog of NCBI NO: 15236857 NR Description: glycolate oxidase - like protein
  misc_feature (1)..(248): Homolog of NCBI NO: 1773330 NR Description: glycolate oxidase [Mesembryanthemum crystallinum]
  misc_feature (1)..(248): Homolog of NCBI NO: 2554675 NR Description: Three-Dimensional Structure Of Glycolate Oxidase
  misc_feature (1)..(248): Homolog of NCBI NO: 121530 NR Description: (S)-2-hydroxy-acid oxidase, peroxisomal
  misc_feature (1)..(248): Homolog of NCBI NO: 15231850 NR Description: glycolate oxidase, putative
  misc_feature (1)..(248): Homolog of NCBI NO: 7431428 NR Description: (S)-2-hydroxy-acid oxidase (EC 1.1.3.15) -
  misc_feature (4)..(248): Homolog of NCBI NO: 34395056 NR Description: putative glycolate oxidase
  misc_feature (1)..(248): Homolog of NCBI NO: 38344169 NR Description: OSJNBa0053K19.8 [Oryza sativa (japonica
MELITNVTEYEKLAKERLPKMVYDYYASGAEDQWTLKENREAFSRILFRPRVLIDVSRIDMATNVLGFSISMPIMIAPSAMQKMAHPDGELATARAAASAGTIMTLSSWSTSSVEEVNSVGPGIRFFQLYVYKDRNIVRQLVKRAEMAGFKAIALTVDTPILGRREADIKNRFALPPHLVLKNFQALDLGTMDKTNDSGLASYVAGQVDRTLSWKDVKWLQTITTLPILVKGIVTAEDTRLAIEYGAAG

SEQ ID NO: 19648 - protein, 229 aa, Zea mays subsp. mays
  peptide (1)..(229): Ceres Seq. ID no. 12379707
  misc_feature (1)..(228): Pfam Name: FMN-dependent dehydrogenase Pfam Description: FMN-dependent dehydrogenase
  misc_feature (1)..(228): Homolog of NCBI NO: 15231850 NR Description: glycolate oxidase, putative
  misc_feature (1)..(228): Homolog of NCBI NO: 2554675 NR Description: Three-Dimensional Structure Of Glycolate Oxidase
  misc_feature (1)..(228): Homolog of NCBI NO: 121530 NR Description: (S)-2-hydroxy-acid oxidase, peroxisomal
  misc_feature (1)..(228): Homolog of NCBI NO: 7431428 NR Description: (S)-2-hydroxy-acid oxidase (EC 1.1.3.15) -
  misc_feature (1)..(228): Homolog of NCBI NO: 1773330 NR Description: glycolate oxidase [Mesembryanthemum crystallinum]
  misc_feature (1)..(228): Homolog of NCBI NO: 228403 NR Description: glycolate oxidase
  misc_feature (1)..(228): Homolog of NCBI NO: 27549566 NR Description: glycolate oxidase [Zantedeschia aethiopica]
  misc_feature (1)..(228): Homolog of NCBI NO: 15236857 NR Description: glycolate oxidase - like protein
  misc_feature (1)..(228): Homolog of NCBI NO: 34395056 NR Description: putative glycolate oxidase
  misc_feature (1)..(228): Homolog of NCBI NO: 38344169 NR Description: OSJNBa0053K19.8 [Oryza sativa (japonica
MVYDYYASGAEDQWTLKENREAFSRILFRPRVLIDVSRIDMATNVLGFSISMPIMIAPSAMQKMAHPDGELATARAAASAGTIMTLSSWSTSSVEEVNSVGPGIRFFQLYVYKDRNIVRQLVKRAEMAGFKAIALTVDTPILGRREADIKNRFALPPHLVLKNFQALDLGTMDKTNDSGLASYVAGQVDRTLSWKDVKWLQTITTLPILVKGIVTAEDTRLAIEYGAAG

SEQ ID NO: 19649 - DNA, 475 bp, Zea mays subsp. mays
  misc_feature (1)..(475): Ceres Seq. ID no. 11404073
  misc_feature: MA Experiment ID: 108527 Result: Down-regulated in Transcription
  misc_feature: MA Experiment 108527 PARAMETER Experiment Name: Zm_5mM_NO_P Parameter: Age (day) Value: 8
  misc_feature: MA Experiment 108527 PARAMETER Experiment Name: Zm_5mM_NO_P Parameter: Organism Value: Zea mays
  misc_feature: MA Experiment 108527 PARAMETER Experiment Name: Zm_5mM_NO_P Parameter: Plant Line Value: 35A19
  misc_feature: MA Experiment 108527 PARAMETER Experiment Name: Zm_5mM_NO_P Parameter: Timepoint (hr) Value: 6
  misc_feature: MA Experiment 108527 PARAMETER Experiment Name: Zm_5mM_NO_P Parameter: Tissue Value: Aerial
  misc_feature: MA Experiment 108527 PARAMETER Experiment Name: Zm_5mM_NO_P Parameter: Treatment Value: 5mM NO vs. No Treatment
  misc_feature: MA Experiment ID: 108528 Result: Down-regulated in Transcription
  misc_feature: MA Experiment 108528 PARAMETER Experiment Name: Zm_Imbibed_Seeds_P Parameter: Age (day) Value: 5 vs. 2
  misc_feature: MA Experiment 108528 PARAMETER Experiment Name: Zm_Imbibed_Seeds_P Parameter: Organism Value: Zea mays
  misc_feature: MA Experiment 108528 PARAMETER Experiment Name: Zm_Imbibed_Seeds_P Parameter: Plant Line Value: 35A19
  misc_feature: MA Experiment 108528 PARAMETER Experiment Name: Zm_Imbibed_Seeds_P Parameter: Tissue Value: Aerial vs. Embryo
  misc_feature: MA Experiment ID: 108530 Result: Down-regulated in Transcription
  misc_feature: MA Experiment 108530 PARAMETER Experiment Name: Zm_Imbibed_Seeds_P Parameter: Age (day) Value: 6 vs. 2
  misc_feature: MA Experiment 108530 PARAMETER Experiment Name: Zm_Imbibed_Seeds_P Parameter: Organism Value: Zea mays
  misc_feature: MA Experiment 108530 PARAMETER Experiment Name: Zm_Imbibed_Seeds_P Parameter: Plant Line Value: 35A19
  misc_feature: MA Experiment 108530 PARAMETER Experiment Name: Zm_Imbibed_Seeds_P Parameter: Tissue Value: Aerial vs. Embryo
  misc_feature: MA Experiment ID: 108535 Result: Up-regulated in Transcription
  misc_feature: MA Experiment 108535 PARAMETER Experiment Name: Zm_Meristem_P Parameter: Age (day) Value: 8
  misc_feature: MA Experiment 108535 PARAMETER Experiment Name: Zm_Meristem_P Parameter: Organism Value: Zea mays
  misc_feature: MA Experiment 108535 PARAMETER Experiment Name: Zm_Meristem_P Parameter: Plant Line Value: 35A19
  misc_feature: MA Experiment 108535 PARAMETER Experiment Name: Zm_Meristem_P Parameter: Tissue Value: Root Meristem vs. Above Root Meristem
  misc_feature: MA Experiment ID: 20000487 Result: Up-regulated in Transcription
  misc_feature: MA Experiment 20000487 PARAMETER Experiment Name: Zm_50mM_NH4NO3_L_to_H_P Parameter: Organism Value: Zea mays
  misc_feature: MA Experiment 20000487 PARAMETER Experiment Name: Zm_50mM_NH4NO3_L_to_H_P Parameter: Timepoint (hr) Value: 4
  misc_feature: MA Experiment 20000487 PARAMETER Experiment Name: Zm_50mM_NH4NO3_L_to_H_P Parameter: Tissue Value: Leaves
  misc_feature: MA Experiment 20000487 PARAMETER Experiment Name: Zm_50mM_NH4NO3_L_to_H_P Parameter: Treatment Value: 50mM NH4NO3 vs. 100mM Mannitol
  misc_feature: MA Experiment ID: 20000488 Result: Up-regulated in Transcription
  misc_feature: MA Experiment 20000488 PARAMETER Experiment Name: Zm_50mM_NH4NO3_L_to_H_P Parameter: Organism Value: Zea mays
  misc_feature: MA Experiment 20000488 PARAMETER Experiment Name: Zm_50mM_NH4NO3_L_to_H_P Parameter: Timepoint (hr) Value: 8
  misc_feature: MA Experiment 20000488 PARAMETER Experiment Name: Zm_50mM_NH4NO3_L_to_H_P Parameter: Tissue Value: Leaves
  misc_feature: MA Experiment 20000488 PARAMETER Experiment Name: Zm_50mM_NH4NO3_L_to_H_P Parameter: Treatment Value: 50mM NH4NO3 vs. 100mM Mannitol
  misc_feature: MA Experiment ID: 20000492 Result: Up-regulated in Transcription
  misc_feature: MA Experiment 20000492 PARAMETER Experiment Name: Zm_Hybrid_Seed_Dev_P Parameter: DAP Value: 12
  misc_feature: MA Experiment 20000492 PARAMETER Experiment Name: Zm_Hybrid_Seed_Dev_P Parameter: Organism Value: Zea mays
  misc_feature: MA Experiment 20000492 PARAMETER Experiment Name: Zm_Hybrid_Seed_Dev_P Parameter: Plant Line Value: 35A19
  misc_feature: MA Experiment 20000492 PARAMETER Experiment Name: Zm_Hybrid_Seed_Dev_P Parameter: Tissue Value: Fert Kernel vs. Unfert Floret
  misc_feature: MA Experiment ID: 20000535 Result: Up-regulated in Transcription
  misc_feature: MA Experiment 20000535 PARAMETER Experiment Name: Zm_Hybrid_Seed_Dev_P Parameter: DAP Value: 30 vs. 12
  misc_feature: MA Experiment 20000535 PARAMETER Experiment Name: Zm_Hybrid_Seed_Dev_P Parameter: Organism Value: Zea mays
  misc_feature: MA Experiment 20000535 PARAMETER Experiment Name: Zm_Hybrid_Seed_Dev_P Parameter: Plant Line Value: 35A19
  misc_feature: MA Experiment 20000535 PARAMETER Experiment Name: Zm_Hybrid_Seed_Dev_P Parameter: Tissue Value: Embryo vs. Unfert Floret
  misc_feature: MA Experiment ID: 20000633 Result: Down-regulated in Transcription
  misc_feature: MA Experiment 20000633 PARAMETER Experiment Name: Zm_Herbicide-Treatments_P Parameter: Timepoint (hr) Value: 4
  misc_feature: MA Experiment 20000633 PARAMETER Experiment Name: Zm_Herbicide-Treatments_P Parameter: Tissue Value: Aerial
  misc_feature: MA Experiment 20000633 PARAMETER Experiment Name: Zm_Herbicide-Treatments_P Parameter: Treatment Value: Trimec vs. No Treatment
  misc_feature: MA Experiment ID: 20001613 Result: Up-regulated in Transcription
  misc_feature: MA Experiment 20001613 PARAMETER Experiment Name: Zm_50ppm_KNO3_L-to-H_P Parameter: Age (day) Value: 20
  misc_feature: MA Experiment 20001613 PARAMETER Experiment Name: Zm_50ppm_KNO3_L-to-H_P Parameter: Organism Value: Zea mays
  misc_feature: MA Experiment 20001613 PARAMETER Experiment Name: Zm_50ppm_KNO3_L-to-H_P Parameter: Plant Line Value: 35A19
  misc_feature: MA Experiment 20001613 PARAMETER Experiment Name: Zm_50ppm_KNO3_L-to-H_P Parameter: Timepoint (hr) Value: 24
  misc_feature: MA Experiment 20001613 PARAMETER Experiment Name: Zm_50ppm_KNO3_L-to-H_P Parameter: Tissue Value: Roots
  misc_feature: MA Experiment 20001613 PARAMETER Experiment Name: Zm_50ppm_KNO3_L-to-H_P Parameter: Treatment Value: 50ppm KNO3 vs. 50ppm KCl
aawaacagcccatatttcacacagggcatttcggttcggggcatttcggtccggcgggatcgaaactytcgcacccgagagccctttatatccgctaggtttacgcgcatttttgctcctcactgccgcgccgccaccctctacagataaggaagaggaggagggcaggatgtcgcaccgtaagttcgagcacccgaggmackgctccctcggcttccttcccaggaagcgctcctcccgtcaccgcggcaaggtgaagtcattccctagggatgacgccaagaagccttgccatctcactgccttccttggctacaaggcctggcatgactcacattgtccgtgagttgagaagccaggatccaaactccataagaaggaaacttgtgaggctgttaccatcattgaaaccccttctcttgtcattgttgggctcgtggcatatgtgaagactcctcgtggcctccgcacactc

SEQ ID NO: 19650 - protein, 114 aa, Zea mays subsp. mays
  peptide (1)..(114): Ceres Seq. ID no. 11404074
  misc_feature (57)..(114): Homolog of NCBI NO: 38327504 NR Description: ribosomal protein L3 [Lycopersicon esculentum]
  misc_feature (57)..(114): Homolog of NCBI NO: 23397228 NR Description: putative ribosomal protein [Arabidopsis thaliana]
  misc_feature (57)..(114): Homolog of NCBI NO: 15218306 NR Description: ribosomal protein
  misc_feature (57)..(114): Homolog of NCBI NO: 81657 NR Description: ribosomal protein L3.e (clone ARP1), cytosolic -
  misc_feature (57)..(114): Homolog of NCBI NO: 15220533 NR Description: ribosomal protein; protein id: At1g61580.1
  misc_feature (57)..(114): Homolog of NCBI NO: 81658 NR Description: ribosomal protein L3.e (clone ARP2), cytosolic -
  misc_feature (57)..(114): Homolog of NCBI NO: 34105768 NR Description: ribosomal protein L3 [Triticum aestivum]
  misc_feature (57)..(114): Homolog of NCBI NO: 548770 NR Description: 60S RIBOSOMAL PROTEIN L3
  misc_feature (57)..(114): Homolog of NCBI NO: 33526886 NR Description: ribosomal protein L3 [Triticum aestivum]
  misc_feature (57)..(114): Homolog of NCBI NO: 33526877 NR Description: ribosomal protein L3 [Triticum aestivum]
  misc_feature (1)..(1): Xaa is any aa, unknown or other
  misc_feature (23)..(23): Xaa is any aa, unknown or other
  misc_feature (67)..(67): Xaa is any aa, unknown or other
  misc_feature (68)..(68): Xaa is any aa, unknown or other
XTAHISHRAFRFGAFRSGGIETXAPESPLYPLGLRAFLLLTAAPPPSTDKEEEEGRMSHRKFEHPRXXSLGFLPRKRSSRHRGKVKSFPRDDAKKPCHLTAFLGYKAWHDSHCP

SEQ ID NO: 19651 - protein, 58 aa, Zea mays subsp. mays
  peptide (1)..(58): Ceres Seq. ID no. 11404075
MTPRSLAISLPSLATRPGMTHIVRELRSQDPNSIRRKLVRLLPSLKPLLLSLLGSWHM

SEQ ID NO: 19652 - protein, 58 aa, Zea mays subsp. mays
  peptide (1)..(58): Ceres Seq. ID no. 11404076
  misc_feature (1)..(58): Homolog of NCBI NO: 38327504 NR Description: ribosomal protein L3 [Lycopersicon esculentum]
  misc_feature (1)..(58): Homolog of NCBI NO: 15218306 NR Description: ribosomal protein
  misc_feature (1)..(58): Homolog of NCBI NO: 23397228 NR Description: putative ribosomal protein [Arabidopsis thaliana]
  misc_feature (1)..(58): Homolog of NCBI NO: 81657 NR Description: ribosomal protein L3.e (clone ARP1), cytosolic -
  misc_feature (1)..(58): Homolog of NCBI NO: 15220533 NR Description: ribosomal protein; protein id: At1g61580.1
  misc_feature (1)..(58): Homolog of NCBI NO: 81658 NR Description: ribosomal protein L3.e (clone ARP2), cytosolic -
  misc_feature (1)..(58): Homolog of NCBI NO: 34105768 NR Description: ribosomal protein L3 [Triticum aestivum]
  misc_feature (1)..(58): Homolog of NCBI NO: 548770 NR Description: 60S RIBOSOMAL PROTEIN L3
  misc_feature (1)..(58): Homolog of NCBI NO: 33526886 NR Description: ribosomal protein L3 [Triticum aestivum]
  misc_feature (1)..(58): Homolog of NCBI NO: 33526877 NR Description: ribosomal protein L3 [Triticum aestivum]
  misc_feature (11)..(11): Xaa is any aa, unknown or other
  misc_feature (12)..(12): Xaa is any aa, unknown or other
MSHRKFEHPRXXSLGFLPRKRSSRHRGKVKSFPRDDAKKPCHLTAFLGYKAWHDSHCP

SEQ ID NO: 19653 - DNA, 666 bp, Zea mays subsp. mays
  misc_feature (1)..(666): Ceres Seq. ID no. 13666056
  misc_feature: MA Experiment ID: 108530 Result: Down-regulated in Transcription
  misc_feature: MA Experiment 108530 PARAMETER Experiment Name: Zm_Imbibed_Seeds_P Parameter: Age (day) Value: 6 vs. 2
  misc_feature: MA Experiment 108530 PARAMETER Experiment Name: Zm_Imbibed_Seeds_P Parameter: Organism Value: Zea mays
  misc_feature: MA Experiment 108530 PARAMETER Experiment Name: Zm_Imbibed_Seeds_P Parameter: Plant Line Value: 35A19
  misc_feature: MA Experiment 108530 PARAMETER Experiment Name: Zm_Imbibed_Seeds_P Parameter: Tissue Value: Aerial vs. Embryo
  misc_feature: MA Experiment ID: 108535 Result: Up-regulated in Transcription
  misc_feature: MA Experiment 108535 PARAMETER Experiment Name: Zm_Meristem_P Parameter: Age (day) Value: 8
  misc_feature: MA Experiment 108535 PARAMETER Experiment Name: Zm_Meristem_P Parameter: Organism Value: Zea mays
  misc_feature: MA Experiment 108535 PARAMETER Experiment Name: Zm_Meristem_P Parameter: Plant Line Value: 35A19
  misc_feature: MA Experiment 108535 PARAMETER Experiment Name: Zm_Meristem_P Parameter: Tissue Value: Root Meristem vs. Above Root Meristem
  misc_feature: MA Experiment ID: 108543 Result: Up-regulated in Transcription
  misc_feature: MA Experiment ID: 108544 Result: Down-regulated in Transcription
  misc_feature: MA Experiment ID: 108556 Result: Down-regulated in Transcription
  misc_feature: MA Experiment 108556 PARAMETER Experiment Name: Zm_Drought_P Parameter: Age (day) Value: 9
  misc_feature: MA Experiment 108556 PARAMETER Experiment Name: Zm_Drought_P Parameter: Organism Value: Zea mays
  misc_feature: MA Experiment 108556 PARAMETER Experiment Name: Zm_Drought_P Parameter: Plant Line Value: 35A19
  misc_feature: MA Experiment 108556 PARAMETER Experiment Name: Zm_Drought_P Parameter: Timepoint (hr) Value: 24
  misc_feature: MA Experiment 108556 PARAMETER Experiment Name: Zm_Drought_P Parameter: Tissue Value: Aerial
  misc_feature: MA Experiment 108556 PARAMETER Experiment Name: Zm_Drought_P Parameter: Treatment Value: Drought vs. No Drought
  misc_feature: MA Experiment ID: 108597 Result: Down-regulated in Transcription
  misc_feature: MA Experiment 108597 PARAMETER Experiment Name: Zm_100uM_ABA_P Parameter: Age (day) Value: 9
  misc_feature: MA Experiment 108597 PARAMETER Experiment Name: Zm_100uM_ABA_P Parameter: Organism Value: Zea mays
  misc_feature: MA Experiment 108597 PARAMETER Experiment Name: Zm_100uM_ABA_P Parameter: Plant Line Value: 35A19
  misc_feature: MA Experiment 108597 PARAMETER Experiment Name: Zm_100uM_ABA_P Parameter: Timepoint (hr) Value: 24
  misc_feature: MA Experiment 108597 PARAMETER Experiment Name: Zm_100uM_ABA_P Parameter: Tissue Value: Aerial
  misc_feature: MA Experiment 108597 PARAMETER Experiment Name: Zm_100uM_ABA_P Parameter: Treatment Value: 100uM ABA vs. No Treatment
  misc_feature: MA Experiment ID: 20000478 Result: Down-regulated in Transcription
  misc_feature: MA Experiment 20000478 PARAMETER Experiment Name: Zm_5mM_SA_P Parameter: Age (day) Value: 11
  misc_feature: MA Experiment 20000478 PARAMETER Experiment Name: Zm_5mM_SA_P Parameter: Organism Value: Zea mays
  misc_feature: MA Experiment 20000478 PARAMETER Experiment Name: Zm_5mM_SA_P Parameter: Plant Line Value: 35A19
  misc_feature: MA Experiment 20000478 PARAMETER Experiment Name: Zm_5mM_SA_P Parameter: Timepoint (hr) Value: 72
  misc_feature: MA Experiment 20000478 PARAMETER Experiment Name: Zm_5mM_SA_P Parameter: Tissue Value: Aerial
  misc_feature: MA Experiment 20000478 PARAMETER Experiment Name: Zm_5mM_SA_P Parameter: Treatment Value: 5mM SA vs. No Treatment
  misc_feature: MA Experiment ID: 20000492 Result: Up-regulated in Transcription
  misc_feature: MA Experiment 20000492 PARAMETER Experiment Name: Zm_Hybrid_Seed_Dev_P Parameter: DAP Value: 12
  misc_feature: MA Experiment 20000492 PARAMETER Experiment Name: Zm_Hybrid_Seed_Dev_P Parameter: Organism Value: Zea mays
  misc_feature: MA Experiment 20000492 PARAMETER Experiment Name: Zm_Hybrid_Seed_Dev_P Parameter: Plant Line Value: 35A19
  misc_feature: MA Experiment 20000492 PARAMETER Experiment Name: Zm_Hybrid_Seed_Dev_P Parameter: Tissue Value: Fert Kernel vs. Unfert Floret
  misc_feature: MA Experiment ID: 20000535 Result: Up-regulated in Transcription
  misc_feature: MA Experiment 20000535 PARAMETER Experiment Name: Zm_Hybrid_Seed_Dev_P Parameter: DAP Value: 30 vs. 12
  misc_feature: MA Experiment 20000535 PARAMETER Experiment Name: Zm_Hybrid_Seed_Dev_P Parameter: Organism Value: Zea mays
  misc_feature: MA Experiment 20000535 PARAMETER Experiment Name: Zm_Hybrid_Seed_Dev_P Parameter: Plant Line Value: 35A19
  misc_feature: MA Experiment 20000535 PARAMETER Experiment Name: Zm_Hybrid_Seed_Dev_P Parameter: Tissue Value: Embryo vs. Unfert Floret
  misc_feature: MA Experiment ID: 20001606 Result: Up-regulated in Transcription
  misc_feature: MA Experiment 20001606 PARAMETER Experiment Name: Zm_50ppm_KNO3_L-to-H_P Parameter: Age (day) Value: 19
  misc_feature: MA Experiment 20001606 PARAMETER Experiment Name: Zm_50ppm_KNO3_L-to-H_P Parameter: Organism Value: Zea mays
  misc_feature: MA Experiment 20001606 PARAMETER Experiment Name: Zm_50ppm_KNO3_L-to-H_P Parameter: Plant Line Value: 35A19
  misc_feature: MA Experiment 20001606 PARAMETER Experiment Name: Zm_50ppm_KNO3_L-to-H_P Parameter: Timepoint (hr) Value: 8
  misc_feature: MA Experiment 20001606 PARAMETER Experiment Name: Zm_50ppm_KNO3_L-to-H_P Parameter: Tissue Value: Shoots
  misc_feature: MA Experiment 20001606 PARAMETER Experiment Name: Zm_50ppm_KNO3_L-to-H_P Parameter: Treatment Value: 50ppm KNO3 vs. 50ppm KCl
  misc_feature: MA Experiment ID: 20001608 Result: Up-regulated in Transcription
  misc_feature: MA Experiment 20001608 PARAMETER Experiment Name: Zm_50ppm_KNO3_L-to-H_P Parameter: Age (day) Value: 21
  misc_feature: MA Experiment 20001608 PARAMETER Experiment Name: Zm_50ppm_KNO3_L-to-H_P Parameter: Organism Value: Zea mays
  misc_feature: MA Experiment 20001608 PARAMETER Experiment Name: Zm_50ppm_KNO3_L-to-H_P Parameter: Plant Line Value: 35A19
  misc_feature: MA Experiment 20001608 PARAMETER Experiment Name: Zm_50ppm_KNO3_L-to-H_P Parameter: Timepoint (hr) Value: 48
  misc_feature: MA Experiment 20001608 PARAMETER Experiment Name: Zm_50ppm_KNO3_L-to-H_P Parameter: Tissue Value: Shoots
  misc_feature: MA Experiment 20001608 PARAMETER Experiment Name: Zm_50ppm_KNO3_L-to-H_P Parameter: Treatment Value: 50ppm KNO3 vs. 50ppm KCl
aatcaaaagcaaaaaccctaatcgcatctgcttccagagccccccgccgccgctgcgccctcctctcggtcctgccgtccgtcgaggtaaaaggacagcatggtgagggtcagcgtgctcaatgatgctctcaagtccatgtacaatgctgaaaagatagggaaacgtcaggtcatgatcaggccgtcatccaaggtgatcatcaagttcctgacggtcatgcagcgccatggctacattggcgagttcgagtacgtggatgaccacagagctgggaagatcgtggtggagctgaatggaagactgaataaatgtggtgttattagcccacgttttgatgtaggtgttaaggagatcgagggatggacggcgaggcttcttccatctcgccagtttggctacatcgtcctaacaacttctgctggaattatggaccatgaggaggcccgccgtaagaatgttggtggcaaggttctaggtttcttttattgaaaatgtgtttttttgagccacagatgcgtccaagaactcgtctgatgttttgaggtttgttaagactgggtgtctgagcctttgcggtttgttaagacagcgatgtgtcatgtatttcagaaattgggatttttatgagatgtacctgctagagccctgtctgtttcgattttc

SEQ ID NO: 19654 - protein, 130 aa, Zea mays subsp. mays; identical to SEQ ID NO: 14997
  peptide (1)..(130): Ceres Seq. ID no. 13666057
  misc_feature (5)..(130): Pfam Name: Ribosomal protein S8 Pfam Description: Ribosomal protein S8
  misc_feature (1)..(130): Homolog of NCBI NO: 14326103 NR Description: ribosomal protein S22 [Candida albicans]
  misc_feature (1)..(130): Homolog of NCBI NO: 6322271 NR Description: Homology to rat S15a; Rps22ap [Saccharomyces
  misc_feature (1)..(130): Homolog of NCBI NO: 15225502 NR Description: 40S ribosomal protein S15A (RPS15aC) [Arabidopsis
  misc_feature (1)..(130): Homolog of NCBI NO: 2130985 NR Description: r-protein BnS15a [Brassica napus]
  misc_feature (1)..(130): Homolog of NCBI NO: 28411802 NR Description: ribosomal protein S15 [Oryza sativa (japonica
  misc_feature (1)..(130): Homolog of NCBI NO: 13560779 NR Description: cytoplasmic ribosomal protein S15a [Daucus carota]
  misc_feature (1)..(130): Homolog of NCBI NO: 15231316 NR Description: 40S ribosomal protein S15A (RPS15aD) [Arabidopsis
  misc_feature (1)..(130): Homolog of NCBI NO: 6683481 NR Description: wrp15a [Citrullus lanatus]
  misc_feature (1)..(130): Homolog of NCBI NO: 133793 NR Description: 40S RIBOSOMAL PROTEIN S15A (PPCB8)
  misc_feature (1)..(130): Homolog of NCBI NO: 15223001 NR Description: 40S ribosomal protein S15A (RPS15aA) [Arabidopsis

SEQ ID NO: 19655 - protein, 117 aa, Zea mays subsp. mays; identical to SEQ ID NO: 14998
  peptide (1)..(117): Ceres Seq. ID no. 13666058
  misc_feature (1)..(117): Pfam Name: Ribosomal protein S8 Pfam Description: Ribosomal protein S8
  misc_feature (1)..(117): Homolog of NCBI NO: 14326103 NR Description: ribosomal protein S22 [Candida albicans]
  misc_feature (1)..(117): Homolog of NCBI NO: 6322271 NR Description: Homology to rat S15a; Rps22ap [Saccharomyces
  misc_feature (1)..(117): Homolog of NCBI NO: 15225502 NR Description: 40S ribosomal protein S15A (RPS15aC) [Arabidopsis
  misc_feature (1)..(117): Homolog of NCBI NO: 2130985 NR Description: r-protein BnS15a [Brassica napus]
  misc_feature (1)..(117): Homolog of NCBI NO: 28411802 NR Description: ribosomal protein S15 [Oryza sativa (japonica
  misc_feature (1)..(117): Homolog of NCBI NO: 13560779 NR Description: cytoplasmic ribosomal protein S15a [Daucus carota]
  misc_feature (1)..(117): Homolog of NCBI NO: 15231316 NR Description: 40S ribosomal protein S15A (RPS15aD) [Arabidopsis
  misc_feature (1)..(117): Homolog of NCBI NO: 6683481 NR Description: wrp15a [Citrullus lanatus]
  misc_feature (1)..(117): Homolog of NCBI NO: 133793 NR Description: 40S RIBOSOMAL PROTEIN S15A (PPCB8)
  misc_feature (1)..(117): Homolog of NCBI NO: 15223001 NR Description: 40S ribosomal protein S15A (RPS15aA) [Arabidopsis

SEQ ID NO: 19656 - protein, 105 aa, Zea mays subsp. mays; identical to SEQ ID NO: 14999
  peptide (1)..(105): Ceres Seq. ID no. 13666059
  misc_feature (1)..(105): Pfam Name: Ribosomal protein S8 Pfam Description: Ribosomal protein S8
  misc_feature (1)..(105): Homolog of NCBI NO: 14326103 NR Description: ribosomal protein S22 [Candida albicans]
  misc_feature (1)..(105): Homolog of NCBI NO: 6322271 NR Description: Homology to rat S15a; Rps22ap [Saccharomyces
  misc_feature (1)..(105): Homolog of NCBI NO: 15225502 NR Description: 40S ribosomal protein S15A (RPS15aC) [Arabidopsis
  misc_feature (1)..(105): Homolog of NCBI NO: 2130985 NR Description: r-protein BnS15a [Brassica napus]
  misc_feature (1)..(105): Homolog of NCBI NO: 28411802 NR Description: ribosomal protein S15 [Oryza sativa (japonica
  misc_feature (1)..(105): Homolog of NCBI NO: 13560779 NR Description: cytoplasmic ribosomal protein S15a [Daucus carota]
  misc_feature (1)..(105): Homolog of NCBI NO: 15231316 NR Description: 40S ribosomal protein S15A (RPS15aD) [Arabidopsis
  misc_feature (1)..(105): Homolog of NCBI NO: 6683481 NR Description: wrp15a [Citrullus lanatus]
  misc_feature (1)..(105): Homolog of NCBI NO: 133793 NR Description: 40S RIBOSOMAL PROTEIN S15A (PPCB8)
  misc_feature (1)..(105): Homolog of NCBI NO: 15223001 NR Description: 40S ribosomal protein S15A (RPS15aA) [Arabidopsis

SEQ ID NO: 19657 - DNA, 1698 bp, Zea mays subsp. mays; identical to SEQ ID NO: 13749
  misc_feature (1)..(1698): Ceres Seq. ID no. 13494587
  misc_feature: MA Experiment ID: 108556 Result: Up-regulated in Transcription
  misc_feature: MA Experiment 108556 PARAMETER Experiment Name: Zm_Drought_P Parameter: Age (day) Value: 9
  misc_feature: MA Experiment 108556 PARAMETER Experiment Name: Zm_Drought_P Parameter: Organism Value: Zea mays
  misc_feature: MA Experiment 108556 PARAMETER Experiment Name: Zm_Drought_P Parameter: Plant Line Value: 35A19
  misc_feature: MA Experiment 108556 PARAMETER Experiment Name: Zm_Drought_P Parameter: Timepoint (hr) Value: 24
  misc_feature: MA Experiment 108556 PARAMETER Experiment Name: Zm_Drought_P Parameter: Tissue Value: Aerial
  misc_feature: MA Experiment 108556 PARAMETER Experiment Name: Zm_Drought_P Parameter: Treatment Value: Drought vs. No Drought
  misc_feature: MA Experiment ID: 20001606 Result: Down-regulated in Transcription
  misc_feature: MA Experiment 20001606 PARAMETER Experiment Name: Zm_50ppm_KNO3_L-to-H_P Parameter: Age (day) Value: 19
  misc_feature: MA Experiment 20001606 PARAMETER Experiment Name: Zm_50ppm_KNO3_L-to-H_P Parameter: Organism Value: Zea mays
  misc_feature: MA Experiment 20001606 PARAMETER Experiment Name: Zm_50ppm_KNO3_L-to-H_P Parameter: Plant Line Value: 35A19
  misc_feature: MA Experiment 20001606 PARAMETER Experiment Name: Zm_50ppm_KNO3_L-to-H_P Parameter: Timepoint (hr) Value: 8
  misc_feature: MA Experiment 20001606 PARAMETER Experiment Name: Zm_50ppm_KNO3_L-to-H_P Parameter: Tissue Value: Shoots
  misc_feature: MA Experiment 20001606 PARAMETER Experiment Name: Zm_50ppm_KNO3_L-to-H_P Parameter: Treatment Value: 50ppm KNO3 vs. 50ppm KCl

SEQ ID NO: 19658 - protein, 355 aa, Zea mays subsp. mays; identical to SEQ ID NO: 13750
  peptide (1)..(355): Ceres Seq. ID no. 13494588
  misc_feature (1)..(81): Pfam Name: Assemblin (Peptidase family S21) Pfam Description: Assemblin (Peptidase family S21)
  misc_feature (1)..(341): Homolog of NCBI NO: 22773231 NR Description: Putative RNA-binding protein [Oryza sativa
  misc_feature (34)..(340): Homolog of NCBI NO: 18087662 NR Description: putative RNA-binding protein [Oryza sativa]
  misc_feature (29)..(334): Homolog of NCBI NO: 30682679 NR Description: expressed protein [Arabidopsis thaliana] gb|AAD10646.1~gene_id:MRP15.12~strong similarity to unknown [Arabidopsis thaliana] >gi|21703124|gb|AAM74503.1|
  misc_feature (29)..(334): Homolog of NCBI NO: 25084169 NR Description: Unknown protein [Arabidopsis thaliana]
  misc_feature (29)..(334): Homolog of NCBI NO: 30682683 NR Description: expressed protein [Arabidopsis thaliana]
  misc_feature (82)..(336): Homolog of NCBI NO: 18405397 NR Description: expressed protein [Arabidopsis thaliana] At1g55500/T5A14_10 [Arabidopsis thaliana]
  misc_feature (29)..(204): Homolog of NCBI NO: 25372787 NR Description: Rubisco subunit binding-protein beta subunit - Arabidopsis thaliana >gi|4204265|gb|AAD10646.1| Hypothetical
  misc_feature (80)..(243): Homolog of NCBI NO: 34395023 NR Description: high-glucose-regulated protein 8-like [Oryza
  misc_feature (30)..(191): Homolog of NCBI NO: 30682433 NR Description: expressed protein [Arabidopsis thaliana]
  misc_feature (30)..(191): Homolog of NCBI NO: 30682438 NR Description: expressed protein [Arabidopsis thaliana]

SEQ ID NO: 19659 - protein, 263 aa, Zea mays subsp. mays; identical to SEQ ID NO: 13751
  peptide (1)..(263): Ceres Seq. ID no. 13494589
  misc_feature (1)..(249): Homolog of NCBI NO: 22773231 NR Description: Putative RNA-binding protein [Oryza sativa
  misc_feature (1)..(248): Homolog of NCBI NO: 18087662 NR Description: putative RNA-binding protein [Oryza sativa]
  misc_feature (1)..(242): Homolog of NCBI NO: 30682679 NR Description: expressed protein [Arabidopsis thaliana] gb|AAD10646.1~gene_id:MRP15.12~strong similarity to unknown [Arabidopsis thaliana] >gi|21703124|gb|AAM74503.1|
  misc_feature (1)..(242): Homolog of NCBI NO: 25084169 NR Description: Unknown protein [Arabidopsis thaliana]
  misc_feature (1)..(242): Homolog of NCBI NO: 30682683 NR Description: expressed protein [Arabidopsis thaliana]
  misc_feature (1)..(244): Homolog of NCBI NO: 18405397 NR Description: expressed protein [Arabidopsis thaliana] At1g55500/T5A14_10 [Arabidopsis thaliana]
  misc_feature (1)..(112): Homolog of NCBI NO: 25372787 NR Description: Rubisco subunit binding-protein beta subunit - Arabidopsis thaliana >gi|4204265|gb|AAD10646.1| Hypothetical
  misc_feature (1)..(151): Homolog of NCBI NO: 34395023 NR Description: high-glucose-regulated protein 8-like [Oryza
  misc_feature (1)..(99): Homolog of NCBI NO: 30682433 NR Description: expressed protein [Arabidopsis thaliana]
  misc_feature (1)..(99): Homolog of NCBI NO: 30682438 NR Description: expressed protein [Arabidopsis thaliana]

SEQ ID NO: 19660 - protein, 244 aa, Zea mays subsp. mays; identical to SEQ ID NO: 13752
  peptide (1)..(244): Ceres Seq. ID no. 13494590
  misc_feature (1)..(223): Homolog of NCBI NO: 30682679 NR Description: expressed protein [Arabidopsis thaliana] gb|AAD10646.1~gene_id:MRP15.12~strong similarity to unknown [Arabidopsis thaliana] >gi|21703124|gb|AAM74503.1|
  misc_feature (1)..(223): Homolog of NCBI NO: 25084169 NR Description: Unknown protein [Arabidopsis thaliana]
  misc_feature (1)..(223): Homolog of NCBI NO: 30682683 NR Description: expressed protein [Arabidopsis thaliana]
  misc_feature (1)..(225): Homolog of NCBI NO: 18405397 NR Description: expressed protein [Arabidopsis thaliana] At1g55500/T5A14_10 [Arabidopsis thaliana]
  misc_feature (1)..(93): Homolog of NCBI NO: 25372787 NR Description: Rubisco subunit binding-protein beta subunit - Arabidopsis thaliana >gi|4204265|gb|AAD10646.1| Hypothetical
  misc_feature (1)..(132): Homolog of NCBI NO: 34395023 NR Description: high-glucose-regulated protein 8-like [Oryza
  misc_feature (1)..(80): Homolog of NCBI NO: 30682433 NR Description: expressed protein [Arabidopsis thaliana]
  misc_feature (1)..(80): Homolog of NCBI NO: 30682438 NR Description: expressed protein [Arabidopsis thaliana]
  misc_feature (1)..(230): Homolog of NCBI NO: 22773231 NR Description: Putative RNA-binding protein [Oryza sativa
  misc_feature (1)..(229): Homolog of NCBI NO: 18087662 NR Description: putative RNA-binding protein [Oryza sativa]

SEQ ID NO: 19661 - DNA, 1101 bp, Zea mays subsp. mays
  misc_feature (1)..(1101): Ceres Seq. ID no. 13586344
  misc_feature: MA Experiment ID: 108529 Result: Down-regulated in Transcription
  misc_feature: MA Experiment 108529 PARAMETER Experiment Name: Zm_Imbibed_Seeds_P Parameter: Age (day) Value: 5 vs. 2
  misc_feature: MA Experiment 108529 PARAMETER Experiment Name: Zm_Imbibed_Seeds_P Parameter: Organism Value: Zea mays
  misc_feature: MA Experiment 108529 PARAMETER Experiment Name: Zm_Imbibed_Seeds_P Parameter: Plant Line Value: 35A19
  misc_feature: MA Experiment 108529 PARAMETER Experiment Name: Zm_Imbibed_Seeds_P Parameter: Tissue Value: Roots vs. Embryo
  misc_feature: MA Experiment ID: 108530 Result: Down-regulated in Transcription
  misc_feature: MA Experiment 108530 PARAMETER Experiment Name: Zm_Imbibed_Seeds_P Parameter: Age (day) Value: 6 vs. 2
  misc_feature: MA Experiment 108530 PARAMETER Experiment Name: Zm_Imbibed_Seeds_P Parameter: Organism Value: Zea mays
  misc_feature: MA Experiment 108530 PARAMETER Experiment Name: Zm_Imbibed_Seeds_P Parameter: Plant Line Value: 35A19
  misc_feature: MA Experiment 108530 PARAMETER Experiment Name: Zm_Imbibed_Seeds_P Parameter: Tissue Value: Aerial vs. Embryo
  misc_feature: MA Experiment ID: 108535 Result: Up-regulated in Transcription
  misc_feature: MA Experiment 108535 PARAMETER Experiment Name: Zm_Meristem_P Parameter: Age (day) Value: 8
  misc_feature: MA Experiment 108535 PARAMETER Experiment Name: Zm_Meristem_P Parameter: Organism Value: Zea mays
  misc_feature: MA Experiment 108535 PARAMETER Experiment Name: Zm_Meristem_P Parameter: Plant Line Value: 35A19
  misc_feature: MA Experiment 108535 PARAMETER Experiment Name: Zm_Meristem_P Parameter: Tissue Value: Root Meristem vs. Above Root Meristem
  misc_feature: MA Experiment ID: 20000487 Result: Up-regulated in Transcription
  misc_feature: MA Experiment 20000487 PARAMETER Experiment Name: Zm_50mM_NH4NO3_L_to_H_P Parameter: Organism Value: Zea mays
  misc_feature: MA Experiment 20000487 PARAMETER Experiment Name: Zm_50mM_NH4NO3_L_to_H_P Parameter: Timepoint (hr) Value: 4
  misc_feature: MA Experiment 20000487 PARAMETER Experiment Name: Zm_50mM_NH4NO3_L_to_H_P Parameter: Tissue Value: Leaves
  misc_feature: MA Experiment 20000487 PARAMETER Experiment Name: Zm_50mM_NH4NO3_L_to_H_P Parameter: Treatment Value: 50mM NH4NO3 vs. 100mM Mannitol
  misc_feature: MA Experiment ID: 20000488 Result: Up-regulated in Transcription
  misc_feature: MA Experiment 20000488 PARAMETER Experiment Name: Zm_50mM_NH4NO3_L_to_H_P Parameter: Organism Value: Zea mays
  misc_feature: MA Experiment 20000488 PARAMETER Experiment Name: Zm_50mM_NH4NO3_L_to_H_P Parameter: Timepoint (hr) Value: 8
  misc_feature: MA Experiment 20000488 PARAMETER Experiment Name: Zm_50mM_NH4NO3_L_to_H_P Parameter: Tissue Value: Leaves
  misc_feature: MA Experiment 20000488 PARAMETER Experiment Name: Zm_50mM_NH4NO3_L_to_H_P Parameter: Treatment Value: 50mM NH4NO3 vs. 100mM Mannitol
  misc_feature: MA Experiment ID: 20000534 Result: Down-regulated in Transcription
  misc_feature: MA Experiment 20000534 PARAMETER Experiment Name: Zm_Hybrid_Pollen_P Parameter: Age (day) Value: 8
  misc_feature: MA Experiment 20000534 PARAMETER Experiment Name: Zm_Hybrid_Pollen_P Parameter: Organism Value: Zea mays
  misc_feature: MA Experiment 20000534 PARAMETER Experiment Name: Zm_Hybrid_Pollen_P Parameter: Plant Line Value: 35A19
  misc_feature: MA Experiment 20000534 PARAMETER Experiment Name: Zm_Hybrid_Pollen_P Parameter: Tissue Value: Pollen vs. Aerial
  misc_feature: MA Experiment ID: 20000535 Result: Up-regulated in Transcription
  misc_feature: MA Experiment 20000535 PARAMETER Experiment Name: Zm_Hybrid_Seed_Dev_P Parameter: DAP Value: 30 vs. 12
  misc_feature: MA Experiment 20000535 PARAMETER Experiment Name: Zm_Hybrid_Seed_Dev_P Parameter: Organism Value: Zea mays
  misc_feature: MA Experiment 20000535 PARAMETER Experiment Name: Zm_Hybrid_Seed_Dev_P Parameter: Plant Line Value: 35A19
  misc_feature: MA Experiment 20000535 PARAMETER Experiment Name: Zm_Hybrid_Seed_Dev_P Parameter: Tissue Value: Embryo vs. Unfert Floret
  misc_feature: MA Experiment ID: 20001606 Result: Up-regulated in Transcription
  misc_feature: MA Experiment 20001606 PARAMETER Experiment Name: Zm_50ppm_KNO3_L-to-H_P Parameter: Age (day) Value: 19
  misc_feature: MA Experiment 20001606 PARAMETER Experiment Name: Zm_50ppm_KNO3_L-to-H_P Parameter: Organism Value: Zea mays
  misc_feature: MA Experiment 20001606 PARAMETER Experiment Name: Zm_50ppm_KNO3_L-to-H_P Parameter: Plant Line Value: 35A19
  misc_feature: MA Experiment 20001606 PARAMETER Experiment Name: Zm_50ppm_KNO3_L-to-H_P Parameter: Timepoint (hr) Value: 8
  misc_feature: MA Experiment 20001606 PARAMETER Experiment Name: Zm_50ppm_KNO3_L-to-H_P Parameter: Tissue Value: Shoots
  misc_feature: MA Experiment 20001606 PARAMETER Experiment Name: Zm_50ppm_KNO3_L-to-H_P Parameter: Treatment Value: 50ppm KNO3 vs. 50ppm KCl
  misc_feature: MA Experiment ID: 20001608 Result: Up-regulated in Transcription
  misc_feature: MA Experiment 20001608 PARAMETER Experiment Name: Zm_50ppm_KNO3_L-to-H_P Parameter: Age (day) Value: 21
  misc_feature: MA Experiment 20001608 PARAMETER Experiment Name: Zm_50ppm_KNO3_L-to-H_P Parameter: Organism Value: Zea mays
  misc_feature: MA Experiment 20001608 PARAMETER Experiment Name: Zm_50ppm_KNO3_L-to-H_P Parameter: Plant Line Value: 35A19
  misc_feature: MA Experiment 20001608 PARAMETER Experiment Name: Zm_50ppm_KNO3_L-to-H_P Parameter: Timepoint (hr) Value: 48
  misc_feature: MA Experiment 20001608 PARAMETER Experiment Name: Zm_50ppm_KNO3_L-to-H_P Parameter: Tissue Value: Shoots
  misc_feature: MA Experiment 20001608 PARAMETER Experiment Name: Zm_50ppm_KNO3_L-to-H_P Parameter: Treatment Value: 50ppm KNO3 vs. 50ppm KCl
caacctttcaaattgaattgggctaccagtggggctggtgagaaacgtggagacgatggttcagattatactatatttgttggggacttggcctcggatgttacagatttcattctacaagatacgttcaagagtcgttatccatcagttaagggtgcaaaagttgtctttgacagaactactggccgttcgaaaggctatggttttgtaaagtttgcagattcggatgaacagacacgggcaatgactgaaatgaatggacaatactgttctagcagggccatgcgccttggaccagcatccaacaagaagaatactggtggaccacaaccatcgagtgctatttaccagaacacccaaggaactgattctgatagcgatccgaacaatactactgtatttgttggtggccttgacccgagtgtgactgatgagcttctgaagcaaaccttcagtccatatggagagcttctctatgtcaaaatacctgtaggaaagcgctgcgggtttgtccaatattctaacagggcatcagctgaggaggccataagggtgctaaatggaagccagctgggaggtcagagcataaggctctcatggggccgtagccctgcaaacaagcagcctcagcaagagcagagccaatggagtggtggcggctattatgggtatccccaaggatacgatccatatggctatgctcggccccctcaagatcctgccatgtacgcctacgcagcatatccagggtatggaaattaccagcaacagccaccacagcagcccccgccacaacagtaatgatgtcccgagagtgatcatttgcaagctggtcgcaaagtagctgggggttggggcgcagcaactttggtgcgttggcatgagaaattttgcggcggttgcttgtgttgtgttgtattgttccgacgcccttgtacacgtagcctgtgttgtaactgaatttttgccgaggccttatgagtgactagtgtttcaactgtaactggattgcacatttttgtctcaaggaatgtactattattgtgtggctcgtgccgctttgaacgctgagtccaggtattaatttttcttcatgctctt

SEQ ID NO: 19662 - protein, 266 aa, Zea mays subsp. mays
  peptide (1)..(266): Ceres Seq. ID no. 13586345
  misc_feature (25)..(97): Pfam Name: RNA recognition motif. (a.k.a. RRM, RBD, or RNP domain) Pfam Description: RNA recognition motif. (a.k.a. RRM, RBD, or RNP
  misc_feature (1)..(257): Homolog of NCBI NO: 18423684 NR Description: RNA binding protein 45 (RBP45), putative
  misc_feature (1)..(257): Homolog of NCBI NO: 9758270 NR Description: contains similarity to polyadenylate-binding
  misc_feature (1)..(265): Homolog of NCBI NO: 18416906 NR Description: RNA binding protein 45 (RBP45), putative
  misc_feature (1)..(265): Homolog of NCBI NO: 7485342 NR Description: hypothetical protein F10M23.340 - Arabidopsis
  misc_feature (1)..(266): Homolog of NCBI NO: 40253807 NR Description: putative RNA Binding Protein 45
  misc_feature (1)..(261): Homolog of NCBI NO: 9663767 NR Description: RNA Binding Protein 45 [Nicotiana plumbaginifolia]
  misc_feature (1)..(266): Homolog of NCBI NO: 34901884 NR Description: putative RNA Binding Protein 45
  misc_feature (1)..(266): Homolog of NCBI NO: 34395214 NR Description: putative RNA Binding Protein
  misc_feature (1)..(266): Homolog of NCBI NO: 30524689 NR Description: salt tolerance protein 6 [Beta vulgaris]
  misc_feature (1)..(265): Homolog of NCBI NO: 34896988 NR Description: putative RNA binding protein [Oryza sativa]
QPFKLNWATSGAGEKRGDDGSDYTIFVGDLASDVTDFILQDTFKSRYPSVKGAKVVFDRTTGRSKGYGFVKFADSDEQTRAMTEMNGQYCSSRAMRLGPASNKKNTGGPQPSSAIYQNTQGTDSDSDPNNTTVFVGGLDPSVTDELLKQTFSPYGELLYVKIPVGKRCGFVQYSNRASAEEAIRVLNGSQLGGQSIRLSWGRSPANKQPQQEQSQWSGGGYYGYPQGYDPYGYARPPQDPAMYAYAAYPGYGNYQQQPPQQPPPQQ

SEQ ID NO: 19663 - protein, 185 aa, Zea mays subsp. mays
  peptide (1)..(185): Ceres Seq. ID no. 13586346
  misc_feature (1)..(176): Homolog of NCBI NO: 18423684 NR Description: RNA binding protein 45 (RBP45), putative
  misc_feature (1)..(176): Homolog of NCBI NO: 9758270 NR Description: contains similarity to polyadenylate-binding
  misc_feature (1)..(184): Homolog of NCBI NO: 18416906 NR Description: RNA binding protein 45 (RBP45), putative
  misc_feature (1)..(184): Homolog of NCBI NO: 7485342 NR Description: hypothetical protein F10M23.340 - Arabidopsis
  misc_feature (1)..(185): Homolog of NCBI NO: 40253807 NR Description: putative RNA Binding Protein 45
  misc_feature (1)..(180): Homolog of NCBI NO: 9663767 NR Description: RNA Binding Protein 45 [Nicotiana plumbaginifolia]
  misc_feature (1)..(185): Homolog of NCBI NO: 34901884 NR Description: putative RNA Binding Protein 45
  misc_feature (1)..(185): Homolog of NCBI NO: 34395214 NR Description: putative RNA Binding Protein
  misc_feature (1)..(185): Homolog of NCBI NO: 30524689 NR Description: salt tolerance protein 6 [Beta vulgaris]
  misc_feature (1)..(184): Homolog of NCBI NO: 34896988 NR Description: putative RNA binding protein [Oryza sativa]
MTEMNGQYCSSRAMRLGPASNKKNTGGPQPSSAIYQNTQGTDSDSDPNNTTVFVGGLDPSVTDELLKQTFSPYGELLYVKIPVGKRCGFVQYSNRASAEEAIRVLNGSQLGGQSIRLSWGRSPANKQPQQEQSQWSGGGYYGYPQGYDPYGYARPPQDPAMYAYAAYPGYGNYQQQPPQQPPPQQ

SEQ ID NO: 19664 - protein, 182 aa, Zea mays subsp. mays
  peptide (1)..(182): Ceres Seq. ID no. 13586347
  misc_feature (1)..(173): Homolog of NCBI NO: 18423684 NR Description: RNA binding protein 45 (RBP45), putative
  misc_feature (1)..(173): Homolog of NCBI NO: 9758270 NR Description: contains similarity to polyadenylate-binding
  misc_feature (1)..(181): Homolog of NCBI NO: 18416906 NR Description: RNA binding protein 45 (RBP45), putative
  misc_feature (1)..(181): Homolog of NCBI NO: 7485342 NR Description: hypothetical protein F10M23.340 - Arabidopsis
  misc_feature (1)..(182): Homolog of NCBI NO: 40253807 NR Description: putative RNA Binding Protein 45
  misc_feature (1)..(177): Homolog of NCBI NO: 9663767 NR Description: RNA Binding Protein 45 [Nicotiana plumbaginifolia]
  misc_feature (1)..(182): Homolog of NCBI NO: 34901884 NR Description: putative RNA Binding Protein 45
  misc_feature (1)..(182): Homolog of NCBI NO: 34395214 NR Description: putative RNA Binding Protein
  misc_feature (1)..(182): Homolog of NCBI NO: 30524689 NR Description: salt tolerance protein 6 [Beta vulgaris]
  misc_feature (1)..(181): Homolog of NCBI NO: 34896988 NR Description: putative RNA binding protein [Oryza sativa]
MNGQYCSSRAMRLGPASNKKNTGGPQPSSAIYQNTQGTDSDSDPNNTTVFVGGLDPSVTDELLKQTFSPYGELLYVKIPVGKRCGFVQYSNRASAEEAIRVLNGSQLGGQSIRLSWGRSPANKQPQQEQSQWSGGGYYGYPQGYDPYGYARPPQDPAMYAYAAYPGYGNYQQQPPQQPPPQQ

SEQ ID NO: 19665 - DNA, 692 bp, Zea mays subsp. mays
  misc_feature (1)..(692): Ceres Seq. ID no. 12364056
  misc_feature: MA Experiment ID: 108529 Result: Up-regulated in Transcription
  misc_feature: MA Experiment 108529 PARAMETER Experiment Name: Zm_Imbibed_Seeds_P Parameter: Age (day) Value: 5 vs. 2
  misc_feature: MA Experiment 108529 PARAMETER Experiment Name: Zm_Imbibed_Seeds_P Parameter: Organism Value: Zea mays
  misc_feature: MA Experiment 108529 PARAMETER Experiment Name: Zm_Imbibed_Seeds_P Parameter: Plant Line Value: 35A19
  misc_feature: MA Experiment 108529 PARAMETER Experiment Name: Zm_Imbibed_Seeds_P Parameter: Tissue Value: Roots vs. Embryo
  misc_feature: MA Experiment ID: 108535 Result: Down-regulated in Transcription
  misc_feature: MA Experiment 108535 PARAMETER Experiment Name: Zm_Meristem_P Parameter: Age (day) Value: 8
  misc_feature: MA Experiment 108535 PARAMETER Experiment Name: Zm_Meristem_P Parameter: Organism Value: Zea mays
  misc_feature: MA Experiment 108535 PARAMETER Experiment Name: Zm_Meristem_P Parameter: Plant Line Value: 35A19
  misc_feature: MA Experiment 108535 PARAMETER Experiment Name: Zm_Meristem_P Parameter: Tissue Value: Root Meristem vs. Above Root Meristem
  misc_feature: MA Experiment ID: 108543 Result: Down-regulated in Transcription
gctaaagaaagaggtcctgtcacagatatcgatccgattgggaattctcctgtgatcattaagaagacaattcttgagaagattgcccccacatggatgaatgtgtcaattcaaatgaaagaggatgaagagacagataaagtttttggatgggtgttggaaatgtatgcatacgctgttgctagcgcattgcatggagttcatcatatccttcgtaaagatttcatgatccagccaccttttgatacaaagctccagaatacatttataatccacttcacttatggatgtgactactcactaaagggtgaactgacctatggtaaagttggtgaatggcgatttgacaaaagatcattcccagataggccaccaccaagaaatcttacattgccccctcctggagtaccagaaagtgtggttactctagtgaaaatggtcaatgaagctagtgcaaaccttcctcggtgggatgatggaatataaactttggatgatgtcaattatatcttaggttcctttgatctgcccttgtatatggggaatatcaaagtatcaggtgcagtcggttgtttggtttacatccaaaatagctgcttgcacttgcacaccatacctgatagaagaagatacataattttctcattgtactttttaggaaaagaaaagaaatgaaagtaaagttagcatcg

SEQ ID NO: 19666 - protein, 161 aa, Zea mays subsp. mays
  peptide (1)..(161): Ceres Seq. ID no. 12364057
  misc_feature (2)..(155): Homolog of NCBI NO: 25371351 NR Description: hypothetical protein At2g25260 [imported] -
  misc_feature (2)..(158): Homolog of NCBI NO: 30682704 NR Description: expressed protein [Arabidopsis thaliana]
  misc_feature (2)..(158): Homolog of NCBI NO: 24413996 NR Description: hypothetical protein~similar to Arabidopsis
  misc_feature (4)..(157): Homolog of NCBI NO: 22327055 NR Description: Expressed protein
  misc_feature (3)..(158): Homolog of NCBI NO: 15240642 NR Description: putative protein
AKERGPVTDIDPIGNSPVIIKKTILEKIAPTWMNVSIQMKEDEETDKVFGWVLEMYAYAVASALHGVHHILRKDFMIQPPFDTKLQNTFIIHFTYGCDYSLKGELTYGKVGEWRFDKRSFPDRPPPRNLTLPPPGVPESVVTLVKMVNEASANLPRWDDGI

SEQ ID NO: 19667 - protein, 129 aa, Zea mays subsp. mays
  peptide (1)..(129): Ceres Seq. ID no. 12364058
  misc_feature (1)..(123): Homolog of NCBI NO: 25371351 NR Description: hypothetical protein At2g25260 [imported] -
  misc_feature (1)..(126): Homolog of NCBI NO: 30682704 NR Description: expressed protein [Arabidopsis thaliana]
  misc_feature (1)..(126): Homolog of NCBI NO: 24413996 NR Description: hypothetical protein~similar to Arabidopsis
  misc_feature (1)..(125): Homolog of NCBI NO: 22327055 NR Description: Expressed protein
  misc_feature (1)..(126): Homolog of NCBI NO: 15240642 NR Description: putative protein
MNVSIQMKEDEETDKVFGWVLEMYAYAVASALHGVHHILRKDFMIQPPFDTKLQNTFIIHFTYGCDYSLKGELTYGKVGEWRFDKRSFPDRPPPRNLTLPPPGVPESVVTLVKMVNEASANLPRWDDGI

SEQ ID NO: 19668 - protein, 123 aa, Zea mays subsp. mays
  peptide (1)..(123): Ceres Seq. ID no. 12364059
  misc_feature (1)..(117): Homolog of NCBI NO: 25371351 NR Description: hypothetical protein At2g25260 [imported] -
  misc_feature (1)..(120): Homolog of NCBI NO: 30682704 NR Description: expressed protein [Arabidopsis thaliana]
  misc_feature (1)..(120): Homolog of NCBI NO: 24413996 NR Description: hypothetical protein~similar to Arabidopsis
  misc_feature (1)..(119): Homolog of NCBI NO: 22327055 NR Description: Expressed protein
  misc_feature (1)..(120): Homolog of NCBI NO: 15240642 NR Description: putative protein
MKEDEETDKVFGWVLEMYAYAVASALHGVHHILRKDFMIQPPFDTKLQNTFIIHFTYGCDYSLKGELTYGKVGEWRFDKRSFPDRPPPRNLTLPPPGVPESVVTLVKMVNEASANLPRWDDGI

SEQ ID NO: 19669 - DNA, 1458 bp, Zea mays subsp. mays; identical to SEQ ID NO: 14377
  misc_feature (1)..(1458): Ceres Seq. ID no. 13586374
  misc_feature: MA Experiment ID: 108523 Result: Down-regulated in Transcription
  misc_feature: MA Experiment 108523 PARAMETER Experiment Name: Zm_42deg_Heat_P Parameter: Age (day) Value: 8
  misc_feature: MA Experiment 108523 PARAMETER Experiment Name: Zm_42deg_Heat_P Parameter: Organism Value: Zea mays
  misc_feature: MA Experiment 108523 PARAMETER Experiment Name: Zm_42deg_Heat_P Parameter: Plant Line Value: 35A19
  misc_feature: MA Experiment 108523 PARAMETER Experiment Name: Zm_42deg_Heat_P Parameter: Temperature (deg C) Value: 42 vs. 22
  misc_feature: MA Experiment 108523 PARAMETER Experiment Name: Zm_42deg_Heat_P Parameter: Timepoint (hr) Value: 6
  misc_feature: MA Experiment 108523 PARAMETER Experiment Name: Zm_42deg_Heat_P Parameter: Tissue Value: Aerial
  misc_feature: MA Experiment ID: 108528 Result: Up-regulated in Transcription
  misc_feature: MA Experiment 108528 PARAMETER Experiment Name: Zm_Imbibed_Seeds_P Parameter: Age (day) Value: 5 vs. 2
  misc_feature: MA Experiment 108528 PARAMETER Experiment Name: Zm_Imbibed_Seeds_P Parameter: Organism Value: Zea mays
  misc_feature: MA Experiment 108528 PARAMETER Experiment Name: Zm_Imbibed_Seeds_P Parameter: Plant Line Value: 35A19
  misc_feature: MA Experiment 108528 PARAMETER Experiment Name: Zm_Imbibed_Seeds_P Parameter: Tissue Value: Aerial vs. Embryo
  misc_feature: MA Experiment ID: 108529 Result: Up-regulated in Transcription
  misc_feature: MA Experiment 108529 PARAMETER Experiment Name: Zm_Imbibed_Seeds_P Parameter: Age (day) Value: 5 vs. 2
  misc_feature: MA Experiment 108529 PARAMETER Experiment Name: Zm_Imbibed_Seeds_P Parameter: Organism Value: Zea mays
  misc_feature: MA Experiment 108529 PARAMETER Experiment Name: Zm_Imbibed_Seeds_P Parameter: Plant Line Value: 35A19
  misc_feature: MA Experiment 108529 PARAMETER Experiment Name: Zm_Imbibed_Seeds_P Parameter: Tissue Value: Roots vs. Embryo
  misc_feature: MA Experiment ID: 108530 Result: Up-regulated in Transcription
  misc_feature: MA Experiment 108530 PARAMETER Experiment Name: Zm_Imbibed_Seeds_P Parameter: Age (day) Value: 6 vs. 2
  misc_feature: MA Experiment 108530 PARAMETER Experiment Name: Zm_Imbibed_Seeds_P Parameter: Organism Value: Zea mays
  misc_feature: MA Experiment 108530 PARAMETER Experiment Name: Zm_Imbibed_Seeds_P Parameter: Plant Line Value: 35A19
  misc_feature: MA Experiment 108530 PARAMETER Experiment Name: Zm_Imbibed_Seeds_P Parameter: Tissue Value: Aerial vs. Embryo
  misc_feature: MA Experiment ID: 108534 Result: Down-regulated in Transcription
  misc_feature: MA Experiment 108534 PARAMETER Experiment Name: Zm_4deg_Cold_P Parameter: Age (hr) Value: 8
  misc_feature: MA Experiment 108534 PARAMETER Experiment Name: Zm_4deg_Cold_P Parameter: Organism Value: Zea mays
  misc_feature: MA Experiment 108534 PARAMETER Experiment Name: Zm_4deg_Cold_P Parameter: Plant Line Value: 35A19
  misc_feature: MA Experiment 108534 PARAMETER Experiment Name: Zm_4deg_Cold_P Parameter: Temperature (deg C) Value: 4 vs. 22
  misc_feature: MA Experiment 108534 PARAMETER Experiment Name: Zm_4deg_Cold_P Parameter: Timepoint (hr) Value: 6
  misc_feature: MA Experiment 108534 PARAMETER Experiment Name: Zm_4deg_Cold_P Parameter: Tissue Value: Aerial
  misc_feature: MA Experiment ID: 108535 Result: Down-regulated in Transcription
  misc_feature: MA Experiment 108535 PARAMETER Experiment Name: Zm_Meristem_P Parameter: Age (day) Value: 8
  misc_feature: MA Experiment 108535 PARAMETER Experiment Name: Zm_Meristem_P Parameter: Organism Value: Zea mays
  misc_feature: MA Experiment 108535 PARAMETER Experiment Name: Zm_Meristem_P Parameter: Plant Line Value: 35A19
  misc_feature: MA Experiment 108535 PARAMETER Experiment Name: Zm_Meristem_P Parameter: Tissue Value: Root Meristem vs. Above Root Meristem
  misc_feature: MA Experiment ID: 108543 Result: Down-regulated in Transcription
  misc_feature: MA Experiment ID: 108545 Result: Up-regulated in Transcription
  misc_feature: MA Experiment 108545 PARAMETER Experiment Name: Zm_Imbibed_Seeds_P Parameter: Age (day) Value: 3 vs. 2
  misc_feature: MA Experiment 108545 PARAMETER Experiment Name: Zm_Imbibed_Seeds_P Parameter: Organism Value: Zea mays
  misc_feature: MA Experiment 108545 PARAMETER Experiment Name: Zm_Imbibed_Seeds_P Parameter: Plant Line Value: 35A19
  misc_feature: MA Experiment 108545 PARAMETER Experiment Name: Zm_Imbibed_Seeds_P Parameter: Tissue Value: Aerial vs. Embryo
  misc_feature: MA Experiment ID: 108546 Result: Up-regulated in Transcription
  misc_feature: MA Experiment 108546 PARAMETER Experiment Name: Zm_Imbibed_Seeds_P Parameter: Age (day) Value: 3 vs. 2
  misc_feature: MA Experiment 108546 PARAMETER Experiment Name: Zm_Imbibed_Seeds_P Parameter: Organism Value: Zea mays
  misc_feature: MA Experiment 108546 PARAMETER Experiment Name: Zm_Imbibed_Seeds_P Parameter: Plant Line Value: 35A19
  misc_feature: MA Experiment 108546 PARAMETER Experiment Name: Zm_Imbibed_Seeds_P Parameter: Tissue Value: Roots vs. Embryo
  misc_feature: MA Experiment ID: 108547 Result: Up-regulated in Transcription
  misc_feature: MA Experiment 108547 PARAMETER Experiment Name: Zm_Imbibed_Seeds_P Parameter: Age (day) Value: 4 vs. 2
  misc_feature: MA Experiment 108547 PARAMETER Experiment Name: Zm_Imbibed_Seeds_P Parameter: Organism Value: Zea mays
  misc_feature: MA Experiment 108547 PARAMETER Experiment Name: Zm_Imbibed_Seeds_P Parameter: Plant Line Value: 35A19
  misc_feature: MA Experiment 108547 PARAMETER Experiment Name: Zm_Imbibed_Seeds_P Parameter: Tissue Value: Aerial vs. Embryo
  misc_feature: MA Experiment ID: 20000108 Result: Down-regulated in Transcription
  misc_feature: MA Experiment 20000108 PARAMETER Experiment Name: Zm_Root-Tips_P Parameter: Age (day) Value: 12
  misc_feature: MA Experiment 20000108 PARAMETER Experiment Name: Zm_Root-Tips_P Parameter: Organism Value: Zea mays
  misc_feature: MA Experiment 20000108 PARAMETER Experiment Name: Zm_Root-Tips_P Parameter: Tissue Value: Root tips vs. Root mid region    35
  misc_feature: MA Experiment 20000108 PARAMETER Experiment Name: Zm_Root-Tips_P Parameter: Tissue Value: Root tips vs. Root mid region   Sequence Listing-Misc Features (4)
  misc_feature: MA Experiment ID: 20000535 Result: Down-regulated in Transcription
  misc_feature: MA Experiment 20000535 PARAMETER Experiment Name: Zm_Hybrid_Seed_Dev_P Parameter: DAP Value: 30 vs. 12
  misc_feature: MA Experiment 20000535 PARAMETER Experiment Name: Zm_Hybrid_Seed_Dev_P Parameter: Organism Value: Zea mays
  misc_feature: MA Experiment 20000535 PARAMETER Experiment Name: Zm_Hybrid_Seed_Dev_P Parameter: Plant Line Value: 35A19
  misc_feature: MA Experiment 20000535 PARAMETER Experiment Name: Zm_Hybrid_Seed_Dev_P Parameter: Tissue Value: Embryo vs. Unfert Floret
  misc_feature: MA Experiment ID: 20001608 Result: Down-regulated in Transcription
  misc_feature: MA Experiment 20001608 PARAMETER Experiment Name: Zm_50ppm_KNO3_L-to-H_P Parameter: Age (day) Value: 21
  misc_feature: MA Experiment 20001608 PARAMETER Experiment Name: Zm_50ppm_KNO3_L-to-H_P Parameter: Organism Value: Zea mays
  misc_feature: MA Experiment 20001608 PARAMETER Experiment Name: Zm_50ppm_KNO3_L-to-H_P Parameter: Plant Line Value: 35A19
  misc_feature: MA Experiment 20001608 PARAMETER Experiment Name: Zm_50ppm_KNO3_L-to-H_P Parameter: Timepoint (hr) Value: 48
  misc_feature: MA Experiment 20001608 PARAMETER Experiment Name: Zm_50ppm_KNO3_L-to-H_P Parameter: Tissue Value: Shoots
  misc_feature: MA Experiment 20001608 PARAMETER Experiment Name: Zm_50ppm_KNO3_L-to-H_P Parameter: Treatment Value: 50ppm KNO3 vs. 50ppm KCl

SEQ ID NO: 19670 - protein, 371 aa, Zea mays subsp. mays; identical to SEQ ID NO: 14378
  peptide (1)..(371): Ceres Seq. ID no. 13586375
  misc_feature (137)..(364): Pfam Name: Papain family cysteine protease Pfam Description: Papain family cysteine protease
  misc_feature (1)..(371): Homolog of NCBI NO: 1706260 NR Description: Cysteine proteinase 1 precursor
  misc_feature (6)..(369): Homolog of NCBI NO: 15705865 NR Description: cysteine proteinase precursor [Sandersonia
  misc_feature (6)..(369): Homolog of NCBI NO: 5051468 NR Description: putative preprocysteine proteinase [Nicotiana
  misc_feature (6)..(369): Homolog of NCBI NO: 4757570 NR Description: cysteine proteinase precursor [Solanum melongena]
  misc_feature (6)..(369): Homolog of NCBI NO: 28192375 NR Description: CPR2-like cysteine proteinase [Nicotiana tabacum]
  misc_feature (6)..(371): Homolog of NCBI NO: 7435795 NR Description: cysteine proteinase (EC 3.4.22.-) 2 precursor - bean >gi|2511691|emb|CAB17075.1| cysteine proteinase precursor
  misc_feature (6)..(369): Homolog of NCBI NO: 419782 NR Description: cysteine proteinase (EC 3.4.22.-) precursor
  misc_feature (4)..(369): Homolog of NCBI NO: 100203 NR Description: cysteine proteinase (EC 3.4.22.-) precursor -
  misc_feature (6)..(369): Homolog of NCBI NO: 419781 NR Description: cysteine proteinase (EC 3.4.22.-) precursor
  misc_feature (1)..(366): Homolog of NCBI NO: 7381219 NR Description: papain-like cysteine proteinase isoform I

SEQ ID NO: 19671 - DNA, 392 bp, Zea mays subsp. mays
  misc_feature (1)..(392): Ceres Seq. ID no. 12595039
  misc_feature: MA Experiment ID: 108527 Result: Down-regulated in Transcription
  misc_feature: MA Experiment 108527 PARAMETER Experiment Name: Zm_5mM_NO_P Parameter: Age (day) Value: 8
  misc_feature: MA Experiment 108527 PARAMETER Experiment Name: Zm_5mM_NO_P Parameter: Organism Value: Zea mays
  misc_feature: MA Experiment 108527 PARAMETER Experiment Name: Zm_5mM_NO_P Parameter: Plant Line Value: 35A19
  misc_feature: MA Experiment 108527 PARAMETER Experiment Name: Zm_5mM_NO_P Parameter: Timepoint (hr) Value: 6
  misc_feature: MA Experiment 108527 PARAMETER Experiment Name: Zm_5mM_NO_P Parameter: Tissue Value: Aerial
  misc_feature: MA Experiment 108527 PARAMETER Experiment Name: Zm_5mM_NO_P Parameter: Treatment Value: 5mM NO vs. No Treatment
  misc_feature: MA Experiment ID: 108528 Result: Down-regulated in Transcription
  misc_feature: MA Experiment 108528 PARAMETER Experiment Name: Zm_Imbibed_Seeds_P Parameter: Age (day) Value: 5 vs. 2
  misc_feature: MA Experiment 108528 PARAMETER Experiment Name: Zm_Imbibed_Seeds_P Parameter: Organism Value: Zea mays
  misc_feature: MA Experiment 108528 PARAMETER Experiment Name: Zm_Imbibed_Seeds_P Parameter: Plant Line Value: 35A19
  misc_feature: MA Experiment 108528 PARAMETER Experiment Name: Zm_Imbibed_Seeds_P Parameter: Tissue Value: Aerial vs. Embryo
  misc_feature: MA Experiment ID: 108530 Result: Down-regulated in Transcription
  misc_feature: MA Experiment 108530 PARAMETER Experiment Name: Zm_Imbibed_Seeds_P Parameter: Age (day) Value: 6 vs. 2
  misc_feature: MA Experiment 108530 PARAMETER Experiment Name: Zm_Imbibed_Seeds_P Parameter: Organism Value: Zea mays
  misc_feature: MA Experiment 108530 PARAMETER Experiment Name: Zm_Imbibed_Seeds_P Parameter: Plant Line Value: 35A19
  misc_feature: MA Experiment 108530 PARAMETER Experiment Name: Zm_Imbibed_Seeds_P Parameter: Tissue Value: Aerial vs. Embryo
  misc_feature: MA Experiment ID: 108535 Result: Up-regulated in Transcription
  misc_feature: MA Experiment 108535 PARAMETER Experiment Name: Zm_Meristem_P Parameter: Age (day) Value: 8
  misc_feature: MA Experiment 108535 PARAMETER Experiment Name: Zm_Meristem_P Parameter: Organism Value: Zea mays
  misc_feature: MA Experiment 108535 PARAMETER Experiment Name: Zm_Meristem_P Parameter: Plant Line Value: 35A19
  misc_feature: MA Experiment 108535 PARAMETER Experiment Name: Zm_Meristem_P Parameter: Tissue Value: Root Meristem vs. Above Root Meristem
  misc_feature: MA Experiment ID: 20000487 Result: Up-regulated in Transcription
  misc_feature: MA Experiment 20000487 PARAMETER Experiment Name: Zm_50mM_NH4NO3_L_to_H_P Parameter: Organism Value: Zea mays
  misc_feature: MA Experiment 20000487 PARAMETER Experiment Name: Zm_50mM_NH4NO3_L_to_H_P Parameter: Timepoint (hr) Value: 4
  misc_feature: MA Experiment 20000487 PARAMETER Experiment Name: Zm_50mM_NH4NO3_L_to_H_P Parameter: Tissue Value: Leaves
  misc_feature: MA Experiment 20000487 PARAMETER Experiment Name: Zm_50mM_NH4NO3_L_to_H_P Parameter: Treatment Value: 50mM NH4NO3 vs. 100mM Mannitol
  misc_feature: MA Experiment ID: 20000488 Result: Up-regulated in Transcription
  misc_feature: MA Experiment 20000488 PARAMETER Experiment Name: Zm_50mM_NH4NO3_L_to_H_P Parameter: Organism Value: Zea mays
  misc_feature: MA Experiment 20000488 PARAMETER Experiment Name: Zm_50mM_NH4NO3_L_to_H_P Parameter: Timepoint (hr) Value: 8
  misc_feature: MA Experiment 20000488 PARAMETER Experiment Name: Zm_50mM_NH4NO3_L_to_H_P Parameter: Tissue Value: Leaves
  misc_feature: MA Experiment 20000488 PARAMETER Experiment Name: Zm_50mM_NH4NO3_L_to_H_P Parameter: Treatment Value: 50mM NH4NO3 vs. 100mM Mannitol
  misc_feature: MA Experiment ID: 20000492 Result: Up-regulated in Transcription
  misc_feature: MA Experiment 20000492 PARAMETER Experiment Name: Zm_Hybrid_Seed_Dev_P Parameter: DAP Value: 12
  misc_feature: MA Experiment 20000492 PARAMETER Experiment Name: Zm_Hybrid_Seed_Dev_P Parameter: Organism Value: Zea mays
  misc_feature: MA Experiment 20000492 PARAMETER Experiment Name: Zm_Hybrid_Seed_Dev_P Parameter: Plant Line Value: 35A19
  misc_feature: MA Experiment 20000492 PARAMETER Experiment Name: Zm_Hybrid_Seed_Dev_P Parameter: Tissue Value: Fert Kernel vs. Unfert Floret
  misc_feature: MA Experiment ID: 20000535 Result: Up-regulated in Transcription
  misc_feature: MA Experiment 20000535 PARAMETER Experiment Name: Zm_Hybrid_Seed_Dev_P Parameter: DAP Value: 30 vs. 12
  misc_feature: MA Experiment 20000535 PARAMETER Experiment Name: Zm_Hybrid_Seed_Dev_P Parameter: Organism Value: Zea mays
  misc_feature: MA Experiment 20000535 PARAMETER Experiment Name: Zm_Hybrid_Seed_Dev_P Parameter: Plant Line Value: 35A19
  misc_feature: MA Experiment 20000535 PARAMETER Experiment Name: Zm_Hybrid_Seed_Dev_P Parameter: Tissue Value: Embryo vs. Unfert Floret
  misc_feature: MA Experiment ID: 20000633 Result: Down-regulated in Transcription
  misc_feature: MA Experiment 20000633 PARAMETER Experiment Name: Zm_Herbicide-Treatments_P Parameter: Timepoint (hr) Value: 4
  misc_feature: MA Experiment 20000633 PARAMETER Experiment Name: Zm_Herbicide-Treatments_P Parameter: Tissue Value: Aerial
  misc_feature: MA Experiment 20000633 PARAMETER Experiment Name: Zm_Herbicide-Treatments_P Parameter: Treatment Value: Trimec vs. No Treatment
  misc_feature: MA Experiment ID: 20001613 Result: Up-regulated in Transcription
  misc_feature: MA Experiment 20001613 PARAMETER Experiment Name: Zm_50ppm_KNO3_L-to-H_P Parameter: Age (day) Value: 20
  misc_feature: MA Experiment 20001613 PARAMETER Experiment Name: Zm_50ppm_KNO3_L-to-H_P Parameter: Organism Value: Zea mays
  misc_feature: MA Experiment 20001613 PARAMETER Experiment Name: Zm_50ppm_KNO3_L-to-H_P Parameter: Plant Line Value: 35A19
  misc_feature: MA Experiment 20001613 PARAMETER Experiment Name: Zm_50ppm_KNO3_L-to-H_P Parameter: Timepoint (hr) Value: 24
  misc_feature: MA Experiment 20001613 PARAMETER Experiment Name: Zm_50ppm_KNO3_L-to-H_P Parameter: Tissue Value: Roots
  misc_feature: MA Experiment 20001613 PARAMETER Experiment Name: Zm_50ppm_KNO3_L-to-H_P Parameter: Treatment Value: 50ppm KNO3 vs. 50ppm KCl
aattgtggctcctcacttctgcgccgccacccactacaggaagaggaggagggcaggatgtcgcaccgtaagttcgagcacccgaggcacggctccctcggcttccttcccaggaagcgctcctcccgccaccgcgcaaggtgaagtcatttcccagggatgaccccaagaagccttgccatctcactgccttccttggctacaagctggcatgactcacattgtccgtgaggttgagaagccaggatccaaactccataagaaggaaacttgtgaggctgttaccatcattgaaacccctcctcttgtcattgttgggctcgtggcatatgtgaagactcctcgtggcctccgcacactcaactctgtttgggcccaacatcttagcgaag

SEQ ID NO: 19672 - protein, 60 aa, Zea mays subsp. mays
  peptide (1)..(60): Ceres Seq. ID no. 12595040
  misc_feature (1)..(59): Pfam Name: Ribosomal protein L3 Pfam Description: Ribosomal protein L3
  misc_feature (1)..(59): Homolog of NCBI NO: 15220533 NR Description: ribosomal protein; protein id: At1g61580.1
  misc_feature (1)..(59): Homolog of NCBI NO: 81658 NR Description: ribosomal protein L3.e (clone ARP2), cytosolic -
  misc_feature (1)..(59): Homolog of NCBI NO: 15218306 NR Description: ribosomal protein
  misc_feature (1)..(59): Homolog of NCBI NO: 6688812 NR Description: L3 Ribosomal protein [Medicago sativa subsp. x
  misc_feature (1)..(59): Homolog of NCBI NO: 81657 NR Description: ribosomal protein L3.e (clone ARP1), cytosolic -
  misc_feature (1)..(59): Homolog of NCBI NO: 38327504 NR Description: ribosomal protein L3 [Lycopersicon esculentum]
  misc_feature (1)..(59): Homolog of NCBI NO: 34105768 NR Description: ribosomal protein L3 [Triticum aestivum]
  misc_feature (1)..(59): Homolog of NCBI NO: 548770 NR Description: 60S RIBOSOMAL PROTEIN L3
  misc_feature (1)..(59): Homolog of NCBI NO: 33526886 NR Description: ribosomal protein L3 [Triticum aestivum]
  misc_feature (1)..(59): Homolog of NCBI NO: 33526877 NR Description: ribosomal protein L3 [Triticum aestivum]
MTHIVREVEKPGSKLHKKETCEAVTIIETPPLVIVGLVAYVKTPRGLRTLNSVWAQHLSE

SEQ ID NO: 19673 - protein, 53 aa, Zea mays subsp. mays
  peptide (1)..(53): Ceres Seq. ID no. 12595041
  misc_feature (25)..(53): Homolog of NCBI NO: 17553058 NR Description: 60S Ribosomal Protein, Large subunit 3, RPL-3
  misc_feature (25)..(53): Homolog of NCBI NO: 15293867 NR Description: ribosomal protein L3 [Ictalurus punctatus]
IVAPHFCAATHYRKRRRAGCRTVSSSTRGTAPSASFPGSAPPATAQGEVISQG

SEQ ID NO: 19674 - protein, 47 aa, Zea mays subsp. mays
  peptide (1)..(47): Ceres Seq. ID no. 12595042
  misc_feature (20)..(47): Homolog of NCBI NO: 15220533 NR Description: ribosomal protein; protein id: At1g61580.1
  misc_feature (20)..(47): Homolog of NCBI NO: 81658 NR Description: ribosomal protein L3.e (clone ARP2), cytosolic -
  misc_feature (20)..(47): Homolog of NCBI NO: 15218306 NR Description: ribosomal protein
  misc_feature (20)..(47): Homolog of NCBI NO: 81657 NR Description: ribosomal protein L3.e (clone ARP1), cytosolic -
  misc_feature (20)..(47): Homolog of NCBI NO: 6688812 NR Description: L3 Ribosomal protein [Medicago sativa subsp. x
  misc_feature (20)..(47): Homolog of NCBI NO: 38327504 NR Description: ribosomal protein L3 [Lycopersicon esculentum]
  misc_feature (20)..(47): Homolog of NCBI NO: 34105768 NR Description: ribosomal protein L3 [Triticum aestivum]
  misc_feature (20)..(47): Homolog of NCBI NO: 548770 NR Description: 60S RIBOSOMAL PROTEIN L3
  misc_feature (20)..(47): Homolog of NCBI NO: 33526886 NR Description: ribosomal protein L3 [Triticum aestivum]
  misc_feature (20)..(47): Homolog of NCBI NO: 33526877 NR Description: ribosomal protein L3 [Triticum aestivum]
NCGSSLLRRHPLQEEEEGRMSHRKFEHPRHGSLGFLPRKRSSRHRAR

SEQ ID NO: 19675 - DNA, 818 bp, Zea mays subsp. mays
  misc_feature (1)..(818): Ceres Seq. ID no. 12347624
  misc_feature: MA Experiment ID: 108523 Result: Down-regulated in Transcription
  misc_feature: MA Experiment 108523 PARAMETER Experiment Name: Zm_42deg_Heat_P Parameter: Age (day) Value: 8
  misc_feature: MA Experiment 108523 PARAMETER Experiment Name: Zm_42deg_Heat_P Parameter: Organism Value: Zea mays
  misc_feature: MA Experiment 108523 PARAMETER Experiment Name: Zm_42deg_Heat_P Parameter: Plant Line Value: 35A19
  misc_feature: MA Experiment 108523 PARAMETER Experiment Name: Zm_42deg_Heat_P Parameter: Temperature (deg C) Value: 42 vs. 22
  misc_feature: MA Experiment 108523 PARAMETER Experiment Name: Zm_42deg_Heat_P Parameter: Timepoint (hr) Value: 6
  misc_feature: MA Experiment 108523 PARAMETER Experiment Name: Zm_42deg_Heat_P Parameter: Tissue Value: Aerial
  misc_feature: MA Experiment ID: 108543 Result: Up-regulated in Transcription
  misc_feature: MA Experiment ID: 108544 Result: Down-regulated in Transcription
  misc_feature: MA Experiment ID: 108556 Result: Down-regulated in Transcription
  misc_feature: MA Experiment 108556 PARAMETER Experiment Name: Zm_Drought_P Parameter: Age (day) Value: 9
  misc_feature: MA Experiment 108556 PARAMETER Experiment Name: Zm_Drought_P Parameter: Organism Value: Zea mays
  misc_feature: MA Experiment 108556 PARAMETER Experiment Name: Zm_Drought_P Parameter: Plant Line Value: 35A19
  misc_feature: MA Experiment 108556 PARAMETER Experiment Name: Zm_Drought_P Parameter: Timepoint (hr) Value: 24
  misc_feature: MA Experiment 108556 PARAMETER Experiment Name: Zm_Drought_P Parameter: Tissue Value: Aerial
  misc_feature: MA Experiment 108556 PARAMETER Experiment Name: Zm_Drought_P Parameter: Treatment Value: Drought vs. No Drought
  misc_feature: MA Experiment ID: 20000478 Result: Down-regulated in Transcription
  misc_feature: MA Experiment 20000478 PARAMETER Experiment Name: Zm_5mM_SA_P Parameter: Age (day) Value: 11
  misc_feature: MA Experiment 20000478 PARAMETER Experiment Name: Zm_5mM_SA_P Parameter: Organism Value: Zea mays
  misc_feature: MA Experiment 20000478 PARAMETER Experiment Name: Zm_5mM_SA_P Parameter: Plant Line Value: 35A19
  misc_feature: MA Experiment 20000478 PARAMETER Experiment Name: Zm_5mM_SA_P Parameter: Timepoint (hr) Value: 72
  misc_feature: MA Experiment 20000478 PARAMETER Experiment Name: Zm_5mM_SA_P Parameter: Tissue Value: Aerial
  misc_feature: MA Experiment 20000478 PARAMETER Experiment Name: Zm_5mM_SA_P Parameter: Treatment Value: 5mM SA vs. No Treatment
  misc_feature: MA Experiment ID: 20000479 Result: Down-regulated in Transcription
  misc_feature: MA Experiment 20000479 PARAMETER Experiment Name: Zm_Drought_P Parameter: Age (day) Value: 10
  misc_feature: MA Experiment 20000479 PARAMETER Experiment Name: Zm_Drought_P Parameter: Organism Value: Zea mays
  misc_feature: MA Experiment 20000479 PARAMETER Experiment Name: Zm_Drought_P Parameter: Plant Line Value: 35A19
  misc_feature: MA Experiment 20000479 PARAMETER Experiment Name: Zm_Drought_P Parameter: Timepoint (hr) Value: 48
  misc_feature: MA Experiment 20000479 PARAMETER Experiment Name: Zm_Drought_P Parameter: Tissue Value: Aerial
  misc_feature: MA Experiment 20000479 PARAMETER Experiment Name: Zm_Drought_P Parameter: Treatment Value: Drought vs. No Drought
  misc_feature: MA Experiment ID: 20000480 Result: Down-regulated in Transcription
  misc_feature: MA Experiment 20000480 PARAMETER Experiment Name: Zm_Drought_P Parameter: Age (day) Value: 11
  misc_feature: MA Experiment 20000480 PARAMETER Experiment Name: Zm_Drought_P Parameter: Organism Value: Zea mays
  misc_feature: MA Experiment 20000480 PARAMETER Experiment Name: Zm_Drought_P Parameter: Plant Line Value: 35A19
  misc_feature: MA Experiment 20000480 PARAMETER Experiment Name: Zm_Drought_P Parameter: Timepoint (hr) Value: 72
  misc_feature: MA Experiment 20000480 PARAMETER Experiment Name: Zm_Drought_P Parameter: Tissue Value: Aerial
  misc_feature: MA Experiment 20000480 PARAMETER Experiment Name: Zm_Drought_P Parameter: Treatment Value: Drought vs. No Drought
  misc_feature: MA Experiment ID: 20000488 Result: Down-regulated in Transcription
  misc_feature: MA Experiment 20000488 PARAMETER Experiment Name: Zm_50mM_NH4NO3_L_to_H_P Parameter: Organism Value: Zea mays
  misc_feature: MA Experiment 20000488 PARAMETER Experiment Name: Zm_50mM_NH4NO3_L_to_H_P Parameter: Timepoint (hr) Value: 8
  misc_feature: MA Experiment 20000488 PARAMETER Experiment Name: Zm_50mM_NH4NO3_L_to_H_P Parameter: Tissue Value: Leaves
  misc_feature: MA Experiment 20000488 PARAMETER Experiment Name: Zm_50mM_NH4NO3_L_to_H_P Parameter: Treatment Value: 50mM NH4NO3 vs. 100mM Mannitol
  misc_feature: MA Experiment ID: 20000533 Result: Down-regulated in Transcription
  misc_feature: MA Experiment 20000533 PARAMETER Experiment Name: Zm_0.001percent_MeJA_P Parameter: Age (day) Value: 11
  misc_feature: MA Experiment 20000533 PARAMETER Experiment Name: Zm_0.001percent_MeJA_P Parameter: Organism Value: Zea mays
  misc_feature: MA Experiment 20000533 PARAMETER Experiment Name: Zm_0.001percent_MeJA_P Parameter: Plant Line Value: 35A19
  misc_feature: MA Experiment 20000533 PARAMETER Experiment Name: Zm_0.001percent_MeJA_P Parameter: Timepoint (hr) Value: 72
  misc_feature: MA Experiment 20000533 PARAMETER Experiment Name: Zm_0.001percent_MeJA_P Parameter: Tissue Value: Aerial
  misc_feature: MA Experiment 20000533 PARAMETER Experiment Name: Zm_0.001percent_MeJA_P Parameter: Treatment Value: 0.001percent MeJA vs. No Treatment
taagcgacatcacaggggagacaagaggtggttcagggattgcctttggaagtgagatgtcaggtggcatatcggaagtacgggctgtgggcctccgcnttgtcaactcccttcacgggatcagaatcaagacggccccggggcgcggagggtacgtggagaatgtgtacatagcagatgtgagcatggacaatgtttcgatggccatcaggatcactggaaactacggtgaacatcctgatgacaaatatgacagcactgctctccctgtgataagcaatattacaatcaaggatgttgttggcgttaacattggggttgctggtatattggaaggcattcagggggacaatttcagcaacatttgtctgtccaatgtttccctcagtgtgcaatctgcacatccatggaattgttcacttattgaagggtattcgaactcggtgatcccagaatcatgcgaacagctcagaagcaattgtagacagacatccatttgctacgatggaagcagttcttcagtaatgcgtgtgcagcaaccaagacatacatcgcccaccagccggttgctagatcttttttctggagttggcttcattttagtgtaggtagagctgtgcttgttcttgctgcaaagggggcttgcttcatgtagtgagagccctattagtcatgtatatctgattcttgcaattatttgtgattagagtgccacttgcttcatgtatatagctgttgagatgactgtcggtgtatctttgcctgttttgttccaatttttggtatgtgaatgcaatctgcataactttatggttttg

SEQ ID NO: 19676 - protein, 201 aa, Zea mays subsp. mays
  peptide (1)..(201): Ceres Seq. ID no. 12347625
  misc_feature (10)..(153): Pfam Name: Glycosyl hydrolases family 28 Pfam Description: Glycosyl hydrolases family 28
  misc_feature (10)..(171): Homolog of NCBI NO: 15228881 NR Description: polygalacturonase, putative
  misc_feature (10)..(171): Homolog of NCBI NO: 7939578 NR Description: polygalacturonase-like protein [Arabidopsis
  misc_feature (3)..(185): Homolog of NCBI NO: 18412253 NR Description: polygalacturonase, putative
  misc_feature (13)..(156): Homolog of NCBI NO: 15236514 NR Description: polygalacturonase, putative; protein id:
  misc_feature (10)..(157): Homolog of NCBI NO: 21593399 NR Description: polygalacturonase-like protein [Arabidopsis
  misc_feature (10)..(157): Homolog of NCBI NO: 18397713 NR Description: polygalacturonase, putative
  misc_feature (10)..(171): Homolog of NCBI NO: 21553827 NR Description: polygalacturonase, putative [Arabidopsis thaliana]
  misc_feature (3)..(185): Homolog of NCBI NO: 11263971 NR Description: hypothetical protein T17J13.70 - Arabidopsis
  misc_feature (2)..(193): Homolog of NCBI NO: 34393209 NR Description: putative polygalacturonase
  misc_feature (1)..(191): Homolog of NCBI NO: 40714685 NR Description: putative polygalacturonase
  misc_feature (33)..(33): Xaa is any aa, unknown or other
SDITGETRGGSGIAFGSEMSGGISEVRAVGLRXVNSLHGIRIKTAPGRGGYVENVYIADVSMDNVSMAIRITGNYGEHPDDKYDSTALPVISNITIKDVVGVNIGVAGILEGIQGDNFSNICLSNVSLSVQSAHPWNCSLIEGYSNSVIPESCEQLRSNCRQTSICYDGSSSSVMRVQQPRHTSPTSRLLDLFSGVGFILV

SEQ ID NO: 19677 - protein, 183 aa, Zea mays subsp. mays
  peptide (1)..(183): Ceres Seq. ID no. 12347626
  misc_feature (1)..(135): Pfam Name: Glycosyl hydrolases family 28 Pfam Description: Glycosyl hydrolases family 28
  misc_feature (1)..(139): Homolog of NCBI NO: 30679999 NR Description: polygalacturonase, putative [Arabidopsis
  misc_feature (1)..(139): Homolog of NCBI NO: 18397713 NR Description: polygalacturonase, putative
  misc_feature (1)..(138): Homolog of NCBI NO: 15236514 NR Description: polygalacturonase, putative; protein id:
  misc_feature (1)..(153): Homolog of NCBI NO: 15228881 NR Description: polygalacturonase, putative
  misc_feature (1)..(153): Homolog of NCBI NO: 21553827 NR Description: polygalacturonase, putative [Arabidopsis thaliana]
  misc_feature (1)..(153): Homolog of NCBI NO: 7939578 NR Description: polygalacturonase-like protein [Arabidopsis
  misc_feature (1)..(167): Homolog of NCBI NO: 18412253 NR Description: polygalacturonase, putative
  misc_feature (1)..(167): Homolog of NCBI NO: 11263971 NR Description: hypothetical protein T17J13.70 - Arabidopsis
  misc_feature (1)..(175): Homolog of NCBI NO: 34393209 NR Description: putative polygalacturonase
  misc_feature (1)..(173): Homolog of NCBI NO: 40714685 NR Description: putative polygalacturonase
  misc_feature (15)..(15): Xaa is any aa, unknown or other
MSGGISEVRAVGLRXVNSLHGIRIKTAPGRGGYVENVYIADVSMDNVSMAIRITGNYGEHPDDKYDSTALPVISNITIKDVVGVNIGVAGILEGIQGDNFSNICLSNVSLSVQSAHPWNCSLIEGYSNSVIPESCEQLRSNCRQTSICYDGSSSSVMRVQQPRHTSPTSRLLDLFSGVGFILV

SEQ ID NO: 19678 - protein, 140 aa, Zea mays subsp. mays
  peptide (1)..(140): Ceres Seq. ID no. 12347627
  misc_feature (1)..(92): Pfam Name: Glycosyl hydrolases family 28 Pfam Description: Glycosyl hydrolases family 28
  misc_feature (1)..(96): Homolog of NCBI NO: 30679999 NR Description: polygalacturonase, putative [Arabidopsis
  misc_feature (1)..(96): Homolog of NCBI NO: 18397713 NR Description: polygalacturonase, putative
  misc_feature (1)..(95): Homolog of NCBI NO: 15236514 NR Description: polygalacturonase, putative; protein id:
  misc_feature (1)..(110): Homolog of NCBI NO: 15228881 NR Description: polygalacturonase, putative
  misc_feature (1)..(110): Homolog of NCBI NO: 21553827 NR Description: polygalacturonase, putative [Arabidopsis thaliana]
  misc_feature (1)..(110): Homolog of NCBI NO: 7939578 NR Description: polygalacturonase-like protein [Arabidopsis
  misc_feature (1)..(124): Homolog of NCBI NO: 18412253 NR Description: polygalacturonase, putative
  misc_feature (1)..(124): Homolog of NCBI NO: 11263971 NR Description: hypothetical protein T17J13.70 - Arabidopsis
  misc_feature (1)..(132): Homolog of NCBI NO: 34393209 NR Description: putative polygalacturonase
  misc_feature (1)..(130): Homolog of NCBI NO: 40714685 NR Description: putative polygalacturonase
MDNVSMAIRITGNYGEHPDDKYDSTALPVISNITIKDVVGVNIGVAGILEGIQGDNFSNICLSNVSLSVQSAHPWNCSLIEGYSNSVIPESCEQLRSNCRQTSICYDGSSSSVMRVQQPRHTSPTSRLLDLFSGVGFILV

SEQ ID NO: 19679 - DNA, 543 bp, Zea mays subsp. mays
  misc_feature (1)..(543): Ceres Seq. ID no. 13622597
  misc_feature: MA Experiment ID: 108504 Result: Down-regulated in Transcription
  misc_feature: MA Experiment 108504 PARAMETER Experiment Name: Zm_Drought_P Parameter: Age (day) Value: 8
  misc_feature: MA Experiment 108504 PARAMETER Experiment Name: Zm_Drought_P Parameter: Organism Value: Zea mays
  misc_feature: MA Experiment 108504 PARAMETER Experiment Name: Zm_Drought_P Parameter: Plant Line Value: 35A19
  misc_feature: MA Experiment 108504 PARAMETER Experiment Name: Zm_Drought_P Parameter: Timepoint (hr) Value: 12
  misc_feature: MA Experiment 108504 PARAMETER Experiment Name: Zm_Drought_P Parameter: Tissue Value: Aerial
  misc_feature: MA Experiment 108504 PARAMETER Experiment Name: Zm_Drought_P Parameter: Treatment Value: Drought vs. No Drought
  misc_feature: MA Experiment ID: 108523 Result: Down-regulated in Transcription
  misc_feature: MA Experiment 108523 PARAMETER Experiment Name: Zm_42deg_Heat_P Parameter: Age (day) Value: 8
  misc_feature: MA Experiment 108523 PARAMETER Experiment Name: Zm_42deg_Heat_P Parameter: Organism Value: Zea mays
  misc_feature: MA Experiment 108523 PARAMETER Experiment Name: Zm_42deg_Heat_P Parameter: Plant Line Value: 35A19
  misc_feature: MA Experiment 108523 PARAMETER Experiment Name: Zm_42deg_Heat_P Parameter: Temperature (deg C) Value: 42 vs. 22
  misc_feature: MA Experiment 108523 PARAMETER Experiment Name: Zm_42deg_Heat_P Parameter: Timepoint (hr) Value: 6
  misc_feature: MA Experiment 108523 PARAMETER Experiment Name: Zm_42deg_Heat_P Parameter: Tissue Value: Aerial
  misc_feature: MA Experiment ID: 108528 Result: Down-regulated in Transcription
  misc_feature: MA Experiment 108528 PARAMETER Experiment Name: Zm_Imbibed_Seeds_P Parameter: Age (day) Value: 5 vs. 2
  misc_feature: MA Experiment 108528 PARAMETER Experiment Name: Zm_Imbibed_Seeds_P Parameter: Organism Value: Zea mays
  misc_feature: MA Experiment 108528 PARAMETER Experiment Name: Zm_Imbibed_Seeds_P Parameter: Plant Line Value: 35A19
  misc_feature: MA Experiment 108528 PARAMETER Experiment Name: Zm_Imbibed_Seeds_P Parameter: Tissue Value: Aerial vs. Embryo
  misc_feature: MA Experiment ID: 108530 Result: Down-regulated in Transcription
  misc_feature: MA Experiment 108530 PARAMETER Experiment Name: Zm_Imbibed_Seeds_P Parameter: Age (day) Value: 6 vs. 2
  misc_feature: MA Experiment 108530 PARAMETER Experiment Name: Zm_Imbibed_Seeds_P Parameter: Organism Value: Zea mays
  misc_feature: MA Experiment 108530 PARAMETER Experiment Name: Zm_Imbibed_Seeds_P Parameter: Plant Line Value: 35A19
  misc_feature: MA Experiment 108530 PARAMETER Experiment Name: Zm_Imbibed_Seeds_P Parameter: Tissue Value: Aerial vs. Embryo
  misc_feature: MA Experiment ID: 108535 Result: Up-regulated in Transcription
  misc_feature: MA Experiment 108535 PARAMETER Experiment Name: Zm_Meristem_P Parameter: Age (day) Value: 8
  misc_feature: MA Experiment 108535 PARAMETER Experiment Name: Zm_Meristem_P Parameter: Organism Value: Zea mays
  misc_feature: MA Experiment 108535 PARAMETER Experiment Name: Zm_Meristem_P Parameter: Plant Line Value: 35A19
  misc_feature: MA Experiment 108535 PARAMETER Experiment Name: Zm_Meristem_P Parameter: Tissue Value: Root Meristem vs. Above Root Meristem
  misc_feature: MA Experiment ID: 108544 Result: Down-regulated in Transcription
  misc_feature: MA Experiment ID: 108556 Result: Down-regulated in Transcription
  misc_feature: MA Experiment 108556 PARAMETER Experiment Name: Zm_Drought_P Parameter: Age (day) Value: 9
  misc_feature: MA Experiment 108556 PARAMETER Experiment Name: Zm_Drought_P Parameter: Organism Value: Zea mays
  misc_feature: MA Experiment 108556 PARAMETER Experiment Name: Zm_Drought_P Parameter: Plant Line Value: 35A19
  misc_feature: MA Experiment 108556 PARAMETER Experiment Name: Zm_Drought_P Parameter: Timepoint (hr) Value: 24
  misc_feature: MA Experiment 108556 PARAMETER Experiment Name: Zm_Drought_P Parameter: Tissue Value: Aerial
  misc_feature: MA Experiment 108556 PARAMETER Experiment Name: Zm_Drought_P Parameter: Treatment Value: Drought vs. No Drought
  misc_feature: MA Experiment ID: 108597 Result: Down-regulated in Transcription
  misc_feature: MA Experiment 108597 PARAMETER Experiment Name: Zm_100uM_ABA_P Parameter: Age (day) Value: 9
  misc_feature: MA Experiment 108597 PARAMETER Experiment Name: Zm_100uM_ABA_P Parameter: Organism Value: Zea mays
  misc_feature: MA Experiment 108597 PARAMETER Experiment Name: Zm_100uM_ABA_P Parameter: Plant Line Value: 35A19
  misc_feature: MA Experiment 108597 PARAMETER Experiment Name: Zm_100uM_ABA_P Parameter: Timepoint (hr) Value: 24
  misc_feature: MA Experiment 108597 PARAMETER Experiment Name: Zm_100uM_ABA_P Parameter: Tissue Value: Aerial
  misc_feature: MA Experiment 108597 PARAMETER Experiment Name: Zm_100uM_ABA_P Parameter: Treatment Value: 100uM ABA vs. No Treatment
  misc_feature: MA Experiment ID: 20000477 Result: Down-regulated in Transcription
  misc_feature: MA Experiment 20000477 PARAMETER Experiment Name: Zm_5mM_SA_P Parameter: Age (day) Value: 10
  misc_feature: MA Experiment 20000477 PARAMETER Experiment Name: Zm_5mM_SA_P Parameter: Organism Value: Zea mays
  misc_feature: MA Experiment 20000477 PARAMETER Experiment Name: Zm_5mM_SA_P Parameter: Plant Line Value: 35A19
  misc_feature: MA Experiment 20000477 PARAMETER Experiment Name: Zm_5mM_SA_P Parameter: Timepoint (hr) Value: 48
  misc_feature: MA Experiment 20000477 PARAMETER Experiment Name: Zm_5mM_SA_P Parameter: Tissue Value: Aerial
  misc_feature: MA Experiment 20000477 PARAMETER Experiment Name: Zm_5mM_SA_P Parameter: Treatment Value: 5mM SA vs. No Treatment
  misc_feature: MA Experiment ID: 20000478 Result: Down-regulated in Transcription
  misc_feature: MA Experiment 20000478 PARAMETER Experiment Name: Zm_5mM_SA_P Parameter: Age (day) Value: 11
  misc_feature: MA Experiment 20000478 PARAMETER Experiment Name: Zm_5mM_SA_P Parameter: Organism Value: Zea mays
  misc_feature: MA Experiment 20000478 PARAMETER Experiment Name: Zm_5mM_SA_P Parameter: Plant Line Value: 35A19
  misc_feature: MA Experiment 20000478 PARAMETER Experiment Name: Zm_5mM_SA_P Parameter: Timepoint (hr) Value: 72
  misc_feature: MA Experiment 20000478 PARAMETER Experiment Name: Zm_5mM_SA_P Parameter: Tissue Value: Aerial
  misc_feature: MA Experiment 20000478 PARAMETER Experiment Name: Zm_5mM_SA_P Parameter: Treatment Value: 5mM SA vs. No Treatment
  misc_feature: MA Experiment ID: 20000488 Result: Down-regulated in Transcription
  misc_feature: MA Experiment 20000488 PARAMETER Experiment Name: Zm_50mM_NH4NO3_L_to_H_P Parameter: Organism Value: Zea mays
  misc_feature: MA Experiment 20000488 PARAMETER Experiment Name: Zm_50mM_NH4NO3_L_to_H_P Parameter: Timepoint (hr) Value: 8
  misc_feature: MA Experiment 20000488 PARAMETER Experiment Name: Zm_50mM_NH4NO3_L_to_H_P Parameter: Tissue Value: Leaves
  misc_feature: MA Experiment 20000488 PARAMETER Experiment Name: Zm_50mM_NH4NO3_L_to_H_P Parameter: Treatment Value: 50mM NH4NO3 vs. 100mM Mannitol
  misc_feature: MA Experiment ID: 20000626 Result: Down-regulated in Transcription
  misc_feature: MA Experiment 20000626 PARAMETER Experiment Name: Zm_Herbicide-Treatments_P Parameter: Timepoint (hr) Value: 12
  misc_feature: MA Experiment 20000626 PARAMETER Experiment Name: Zm_Herbicide-Treatments_P Parameter: Tissue Value: Aerial
  misc_feature: MA Experiment 20000626 PARAMETER Experiment Name: Zm_Herbicide-Treatments_P Parameter: Treatment Value: Roundup vs. No Treatment
  misc_feature: MA Experiment ID: 20001608 Result: Up-regulated in Transcription
  misc_feature: MA Experiment 20001608 PARAMETER Experiment Name: Zm_50ppm_KNO3_L-to-H_P Parameter: Age (day) Value: 21
  misc_feature: MA Experiment 20001608 PARAMETER Experiment Name: Zm_50ppm_KNO3_L-to-H_P Parameter: Organism Value: Zea mays
  misc_feature: MA Experiment 20001608 PARAMETER Experiment Name: Zm_50ppm_KNO3_L-to-H_P Parameter: Plant Line Value: 35A19
  misc_feature: MA Experiment 20001608 PARAMETER Experiment Name: Zm_50ppm_KNO3_L-to-H_P Parameter: Timepoint (hr) Value: 48
  misc_feature: MA Experiment 20001608 PARAMETER Experiment Name: Zm_50ppm_KNO3_L-to-H_P Parameter: Tissue Value: Shoots
  misc_feature: MA Experiment 20001608 PARAMETER Experiment Name: Zm_50ppm_KNO3_L-to-H_P Parameter: Treatment Value: 50ppm KNO3 vs. 50ppm KCl
aattcttccagctttttgttggaagatgtctacagaaacccaggcccgctccagtttgaaggaccaggtgccgattcaaagcctatttcattgtgcgttgaggatcaagactatatgggcagaataaaaaagttgcaggaatacttggagaaggtgaagaggattgtgaagcctgggtgctcgcaggatgttcttaaagcggcgctgagtgccatgtcttctgtgacggaaacactgaacatcatgacttcatcttctaccggccagactccactgagtcattaggtaccatttcatggtatggatcataatccccacttttttcagtggtggcgattaacgagtttaggaacagcaaccctggtatcatacgggttattcttttgtagccttttggagagttctatcggttttggattcggtagtttatgaaggcttgttgatgagtttgagctcgaatagcttttgaaacagccggatgatgccatctttaataaaccaaattctgtgactgcattcacatttctgtcagttacctgagtc

SEQ ID NO: 19680 - protein, 94 aa, Zea mays subsp. mays
  peptide (1)..(94): Ceres Seq. ID no. 13622598
  misc_feature (31)..(84): Homolog of NCBI NO: 18539421 NR Description: putative phosphofructokinase [Pinus sylvestris]
  misc_feature (2)..(94): Homolog of NCBI NO: 29647436 NR Description: putative pyrophosphate--fructose 6-phosphate
  misc_feature (1)..(92): Homolog of NCBI NO: 3790102 NR Description: pyrophosphate-dependent phosphofructokinase alpha
  misc_feature (1)..(91): Homolog of NCBI NO: 129881 NR Description: Pyrophosphate--fructose 6-phosphate alpha subunit (PFP) (6-phosphofructokinase, (Pyrophosphate-dependent 6-phosphofructose-1-kinase) (PPI-PFK)
  misc_feature (1)..(89): Homolog of NCBI NO: 15218074 NR Description: pyrophosphate-dependent phosphofructokinase alpha
  misc_feature (1)..(89): Homolog of NCBI NO: 15223082 NR Description: pyrophosphate-dependent phosphofructokinase alpha
  misc_feature (1)..(92): Homolog of NCBI NO: 2499488 NR Description: Pyrophosphate--fructose 6-phosphate alpha subunit (PFP) (6-phosphofructokinase, pyrophosphate
NSSSFLLEDVYRNPGPLQFEGPGADSKPISLCVEDQDYMGRIKKLQEYLEKVKRIVKPGCSQDVLKAALSAMSSVTETLNIMTSSSTGQTPLSH

SEQ ID NO: 19681 - protein, 56 aa, Zea mays subsp. mays
  peptide (1)..(56): Ceres Seq. ID no. 13622599
  misc_feature (1)..(46): Homolog of NCBI NO: 18539421 NR Description: putative phosphofructokinase [Pinus sylvestris]
  misc_feature (1)..(56): Homolog of NCBI NO: 29647436 NR Description: putative pyrophosphate--fructose 6-phosphate
  misc_feature (1)..(54): Homolog of NCBI NO: 3790102 NR Description: pyrophosphate-dependent phosphofructokinase alpha
  misc_feature (1)..(53): Homolog of NCBI NO: 129881 NR Description: Pyrophosphate--fructose 6-phosphate alpha subunit (PFP) (6-phosphofructokinase, (Pyrophosphate-dependent 6-phosphofructose-1-kinase) (PPI-PFK)
  misc_feature (1)..(51): Homolog of NCBI NO: 15218074 NR Description: pyrophosphate-dependent phosphofructokinase alpha
  misc_feature (1)..(51): Homolog of NCBI NO: 15223082 NR Description: pyrophosphate-dependent phosphofructokinase alpha
  misc_feature (1)..(54): Homolog of NCBI NO: 2499488 NR Description: Pyrophosphate--fructose 6-phosphate alpha subunit (PFP) (6-phosphofructokinase, pyrophosphate
MGRIKKLQEYLEKVKRIVKPGCSQDVLKAALSAMSSVTETLNIMTSSSTGQTPLSH

SEQ ID NO: 19682 - DNA, 1573 bp, Zea mays subsp. mays; identical to SEQ ID NO: 2420
  misc_feature (1)..(1573): Ceres Seq. ID no. 13493056
  misc_feature: MA Experiment ID: 108530 Result: Down-regulated in Transcription
  misc_feature: MA Experiment 108530 PARAMETER Experiment Name: Zm_Imbibed_Seeds_P Parameter: Age (day) Value: 6 vs. 2
  misc_feature: MA Experiment 108530 PARAMETER Experiment Name: Zm_Imbibed_Seeds_P Parameter: Organism Value: Zea mays
  misc_feature: MA Experiment 108530 PARAMETER Experiment Name: Zm_Imbibed_Seeds_P Parameter: Plant Line Value: 35A19
  misc_feature: MA Experiment 108530 PARAMETER Experiment Name: Zm_Imbibed_Seeds_P Parameter: Tissue Value: Aerial vs. Embryo
  misc_feature: MA Experiment ID: 108535 Result: Up-regulated in Transcription
  misc_feature: MA Experiment 108535 PARAMETER Experiment Name: Zm_Meristem_P Parameter: Age (day) Value: 8
  misc_feature: MA Experiment 108535 PARAMETER Experiment Name: Zm_Meristem_P Parameter: Organism Value: Zea mays
  misc_feature: MA Experiment 108535 PARAMETER Experiment Name: Zm_Meristem_P Parameter: Plant Line Value: 35A19
  misc_feature: MA Experiment 108535 PARAMETER Experiment Name: Zm_Meristem_P Parameter: Tissue Value: Root Meristem vs. Above Root Meristem

SEQ ID NO: 19683 - protein, 389 aa, Zea mays subsp. mays; identical to SEQ ID NO: 2421
  peptide (1)..(389): Ceres Seq. ID no. 13493057
  misc_feature (50)..(343): Pfam Name: Ribosomal protein L3 Pfam Description: Ribosomal protein L3
  misc_feature (50)..(343): Pfam Name: Ribosomal protein L3 Pfam Description: Ribosomal protein L3
  misc_feature (1)..(388): Homolog of NCBI NO: 22203712 NR Description: ribosomal protein L3 [Chlamys farreri]
  misc_feature (1)..(388): Homolog of NCBI NO: 4506649 NR Description: ribosomal protein L3
  misc_feature (1)..(388): Homolog of NCBI NO: 7305441 NR Description: ribosomal protein L3; ribosomal protein L3
  misc_feature (1)..(387): Homolog of NCBI NO: 81657 NR Description: ribosomal protein L3.e (clone ARP1), cytosolic -
  misc_feature (1)..(387): Homolog of NCBI NO: 23397228 NR Description: putative ribosomal protein [Arabidopsis thaliana]
  misc_feature (1)..(388): Homolog of NCBI NO: 22203712 NR Description: ribosomal protein L3 [Chlamys farreri]
  misc_feature (1)..(388): Homolog of NCBI NO: 7305441 NR Description: ribosomal protein L3; ribosomal protein L3
  misc_feature (1)..(387): Homolog of NCBI NO: 23397228 NR Description: putative ribosomal protein [Arabidopsis thaliana]
  misc_feature (1)..(389): Homolog of NCBI NO: 548770 NR Description: 60S RIBOSOMAL PROTEIN L3
  misc_feature (1)..(381): Homolog of NCBI NO: 6688812 NR Description: L3 Ribosomal protein [Medicago sativa subsp. x
  misc_feature (1)..(389): Homolog of NCBI NO: 15220533 NR Description: 60S ribosomal protein L3 (RPL3B) [Arabidopsis
  misc_feature (1)..(389): Homolog of NCBI NO: 81658 NR Description: ribosomal protein L3.e (clone ARP2), cytosolic -
  misc_feature (1)..(387): Homolog of NCBI NO: 15218306 NR Description: 60S ribosomal protein L3 (RPL3A) [Arabidopsis
  misc_feature (1)..(387): Homolog of NCBI NO: 81657 NR Description: ribosomal protein L3.e (clone ARP1), cytosolic -
  misc_feature (1)..(388): Homolog of NCBI NO: 4506649 NR Description: ribosomal protein L3
  misc_feature (1)..(387): Homolog of NCBI NO: 15218306 NR Description: 60S ribosomal protein L3 (RPL3A) [Arabidopsis
  misc_feature (1)..(389): Homolog of NCBI NO: 81658 NR Description: ribosomal protein L3.e (clone ARP2), cytosolic -
  misc_feature (1)..(389): Homolog of NCBI NO: 15220533 NR Description: 60S ribosomal protein L3 (RPL3B) [Arabidopsis
  misc_feature (1)..(381): Homolog of NCBI NO: 6688812 NR Description: L3 Ribosomal protein [Medicago sativa subsp. x
  misc_feature (1)..(389): Homolog of NCBI NO: 548770 NR Description: 60S RIBOSOMAL PROTEIN L3

SEQ ID NO: 19684 - protein, 337 aa, Zea mays subsp. mays; identical to SEQ ID NO: 2422
  peptide (1)..(337): Ceres Seq. ID no. 13493058
  misc_feature (1)..(291): Pfam Name: Ribosomal protein L3 Pfam Description: Ribosomal protein L3
  misc_feature (1)..(291): Pfam Name: Ribosomal protein L3 Pfam Description: Ribosomal protein L3
  misc_feature (1)..(336): Homolog of NCBI NO: 22203712 NR Description: ribosomal protein L3 [Chlamys farreri]
  misc_feature (1)..(336): Homolog of NCBI NO: 4506649 NR Description: ribosomal protein L3
  misc_feature (1)..(336): Homolog of NCBI NO: 7305441 NR Description: ribosomal protein L3; ribosomal protein L3
  misc_feature (1)..(335): Homolog of NCBI NO: 81657 NR Description: ribosomal protein L3.e (clone ARP1), cytosolic -
  misc_feature (1)..(335): Homolog of NCBI NO: 23397228 NR Description: putative ribosomal protein [Arabidopsis thaliana]
  misc_feature (1)..(336): Homolog of NCBI NO: 22203712 NR Description: ribosomal protein L3 [Chlamys farreri]
  misc_feature (1)..(336): Homolog of NCBI NO: 7305441 NR Description: ribosomal protein L3; ribosomal protein L3
  misc_feature (1)..(335): Homolog of NCBI NO: 23397228 NR Description: putative ribosomal protein [Arabidopsis thaliana]
  misc_feature (1)..(337): Homolog of NCBI NO: 548770 NR Description: 60S RIBOSOMAL PROTEIN L3
  misc_feature (1)..(329): Homolog of NCBI NO: 6688812 NR Description: L3 Ribosomal protein [Medicago sativa subsp. x
  misc_feature (1)..(337): Homolog of NCBI NO: 15220533 NR Description: 60S ribosomal protein L3 (RPL3B) [Arabidopsis
  misc_feature (1)..(337): Homolog of NCBI NO: 81658 NR Description: ribosomal protein L3.e (clone ARP2), cytosolic -
  misc_feature (1)..(335): Homolog of NCBI NO: 15218306 NR Description: 60S ribosomal protein L3 (RPL3A) [Arabidopsis
  misc_feature (1)..(335): Homolog of NCBI NO: 81657 NR Description: ribosomal protein L3.e (clone ARP1), cytosolic -
  misc_feature (1)..(336): Homolog of NCBI NO: 4506649 NR Description: ribosomal protein L3
  misc_feature (1)..(335): Homolog of NCBI NO: 15218306 NR Description: 60S ribosomal protein L3 (RPL3A) [Arabidopsis
  misc_feature (1)..(337): Homolog of NCBI NO: 81658 NR Description: ribosomal protein L3.e (clone ARP2), cytosolic -
  misc_feature (1)..(337): Homolog of NCBI NO: 15220533 NR Description: 60S ribosomal protein L3 (RPL3B) [Arabidopsis
  misc_feature (1)..(329): Homolog of NCBI NO: 6688812 NR Description: L3 Ribosomal protein [Medicago sativa subsp. x
  misc_feature (1)..(337): Homolog of NCBI NO: 548770 NR Description: 60S RIBOSOMAL PROTEIN L3

SEQ ID NO: 19685 - protein, 237 aa, Zea mays subsp. mays; identical to SEQ ID NO: 2423
  peptide (1)..(237): Ceres Seq. ID no. 13493059
  misc_feature (1)..(191): Pfam Name: Ribosomal protein L3 Pfam Description: Ribosomal protein L3
  misc_feature (1)..(191): Pfam Name: Ribosomal protein L3 Pfam Description: Ribosomal protein L3
  misc_feature (1)..(237): Homolog of NCBI NO: 15220533 NR Description: 60S ribosomal protein L3 (RPL3B) [Arabidopsis
  misc_feature (1)..(229): Homolog of NCBI NO: 6688812 NR Description: L3 Ribosomal protein [Medicago sativa subsp. x
  misc_feature (1)..(236): Homolog of NCBI NO: 4506649 NR Description: ribosomal protein L3
  misc_feature (1)..(235): Homolog of NCBI NO: 81657 NR Description: ribosomal protein L3.e (clone ARP1), cytosolic -
  misc_feature (1)..(235): Homolog of NCBI NO: 15218306 NR Description: 60S ribosomal protein L3 (RPL3A) [Arabidopsis
  misc_feature (1)..(236): Homolog of NCBI NO: 22203712 NR Description: ribosomal protein L3 [Chlamys farreri]
  misc_feature (1)..(236): Homolog of NCBI NO: 7305441 NR Description: ribosomal protein L3; ribosomal protein L3
  misc_feature (1)..(235): Homolog of NCBI NO: 23397228 NR Description: putative ribosomal protein [Arabidopsis thaliana]
  misc_feature (1)..(237): Homolog of NCBI NO: 548770 NR Description: 60S RIBOSOMAL PROTEIN L3
  misc_feature (1)..(229): Homolog of NCBI NO: 6688812 NR Description: L3 Ribosomal protein [Medicago sativa subsp. x
  misc_feature (1)..(237): Homolog of NCBI NO: 15220533 NR Description: 60S ribosomal protein L3 (RPL3B) [Arabidopsis
  misc_feature (1)..(237): Homolog of NCBI NO: 81658 NR Description: ribosomal protein L3.e (clone ARP2), cytosolic -
  misc_feature (1)..(235): Homolog of NCBI NO: 15218306 NR Description: 60S ribosomal protein L3 (RPL3A) [Arabidopsis
  misc_feature (1)..(235): Homolog of NCBI NO: 81657 NR Description: ribosomal protein L3.e (clone ARP1), cytosolic -
  misc_feature (1)..(236): Homolog of NCBI NO: 4506649 NR Description: ribosomal protein L3
  misc_feature (1)..(237): Homolog of NCBI NO: 81658 NR Description: ribosomal protein L3.e (clone ARP2), cytosolic -
  misc_feature (1)..(235): Homolog of NCBI NO: 23397228 NR Description: putative ribosomal protein [Arabidopsis thaliana]
  misc_feature (1)..(236): Homolog of NCBI NO: 7305441 NR Description: ribosomal protein L3; ribosomal protein L3
  misc_feature (1)..(236): Homolog of NCBI NO: 22203712 NR Description: ribosomal protein L3 [Chlamys farreri]
  misc_feature (1)..(237): Homolog of NCBI NO: 548770 NR Description: 60S RIBOSOMAL PROTEIN L3

SEQ ID NO: 19686 - DNA, 1738 bp, Zea mays subsp. mays; identical to SEQ ID NO: 7802
  misc_feature (1)..(1738): Ceres Seq. ID no. 12413950
  misc_feature: MA Experiment ID: 108529 Result: Down-regulated in Transcription
  misc_feature: MA Experiment 108529 PARAMETER Experiment Name: Zm_Imbibed_Seeds_P Parameter: Age (day) Value: 5 vs. 2
  misc_feature: MA Experiment 108529 PARAMETER Experiment Name: Zm_Imbibed_Seeds_P Parameter: Organism Value: Zea mays
  misc_feature: MA Experiment 108529 PARAMETER Experiment Name: Zm_Imbibed_Seeds_P Parameter: Plant Line Value: 35A19
  misc_feature: MA Experiment 108529 PARAMETER Experiment Name: Zm_Imbibed_Seeds_P Parameter: Tissue Value: Roots vs. Embryo
  misc_feature: MA Experiment ID: 108530 Result: Down-regulated in Transcription
  misc_feature: MA Experiment 108530 PARAMETER Experiment Name: Zm_Imbibed_Seeds_P Parameter: Age (day) Value: 6 vs. 2
  misc_feature: MA Experiment 108530 PARAMETER Experiment Name: Zm_Imbibed_Seeds_P Parameter: Organism Value: Zea mays
  misc_feature: MA Experiment 108530 PARAMETER Experiment Name: Zm_Imbibed_Seeds_P Parameter: Plant Line Value: 35A19
  misc_feature: MA Experiment 108530 PARAMETER Experiment Name: Zm_Imbibed_Seeds_P Parameter: Tissue Value: Aerial vs. Embryo
  misc_feature: MA Experiment ID: 108535 Result: Up-regulated in Transcription
  misc_feature: MA Experiment 108535 PARAMETER Experiment Name: Zm_Meristem_P Parameter: Age (day) Value: 8
  misc_feature: MA Experiment 108535 PARAMETER Experiment Name: Zm_Meristem_P Parameter: Organism Value: Zea mays
  misc_feature: MA Experiment 108535 PARAMETER Experiment Name: Zm_Meristem_P Parameter: Plant Line Value: 35A19
  misc_feature: MA Experiment 108535 PARAMETER Experiment Name: Zm_Meristem_P Parameter: Tissue Value: Root Meristem vs. Above Root Meristem
  misc_feature: MA Experiment ID: 108544 Result: Down-regulated in Transcription
  misc_feature: MA Experiment ID: 20000487 Result: Up-regulated in Transcription
  misc_feature: MA Experiment 20000487 PARAMETER Experiment Name: Zm_50mM_NH4NO3_L_to_H_P Parameter: Organism Value: Zea mays
  misc_feature: MA Experiment 20000487 PARAMETER Experiment Name: Zm_50mM_NH4NO3_L_to_H_P Parameter: Timepoint (hr) Value: 4
  misc_feature: MA Experiment 20000487 PARAMETER Experiment Name: Zm_50mM_NH4NO3_L_to_H_P Parameter: Tissue Value: Leaves
  misc_feature: MA Experiment 20000487 PARAMETER Experiment Name: Zm_50mM_NH4NO3_L_to_H_P Parameter: Treatment Value: 50mM NH4NO3 vs. 100mM Mannitol
  misc_feature: MA Experiment ID: 20000488 Result: Up-regulated in Transcription
  misc_feature: MA Experiment 20000488 PARAMETER Experiment Name: Zm_50mM_NH4NO3_L_to_H_P Parameter: Organism Value: Zea mays
  misc_feature: MA Experiment 20000488 PARAMETER Experiment Name: Zm_50mM_NH4NO3_L_to_H_P Parameter: Timepoint (hr) Value: 8
  misc_feature: MA Experiment 20000488 PARAMETER Experiment Name: Zm_50mM_NH4NO3_L_to_H_P Parameter: Tissue Value: Leaves
  misc_feature: MA Experiment 20000488 PARAMETER Experiment Name: Zm_50mM_NH4NO3_L_to_H_P Parameter: Treatment Value: 50mM NH4NO3 vs. 100mM Mannitol
  misc_feature: MA Experiment ID: 20000492 Result: Up-regulated in Transcription
  misc_feature: MA Experiment 20000492 PARAMETER Experiment Name: Zm_Hybrid_Seed_Dev_P Parameter: DAP Value: 12
  misc_feature: MA Experiment 20000492 PARAMETER Experiment Name: Zm_Hybrid_Seed_Dev_P Parameter: Organism Value: Zea mays
  misc_feature: MA Experiment 20000492 PARAMETER Experiment Name: Zm_Hybrid_Seed_Dev_P Parameter: Plant Line Value: 35A19
  misc_feature: MA Experiment 20000492 PARAMETER Experiment Name: Zm_Hybrid_Seed_Dev_P Parameter: Tissue Value: Fert Kernel vs. Unfert Floret
  misc_feature: MA Experiment ID: 20000626 Result: Up-regulated in Transcription
  misc_feature: MA Experiment 20000626 PARAMETER Experiment Name: Zm_Herbicide-Treatments_P Parameter: Timepoint (hr) Value: 12
  misc_feature: MA Experiment 20000626 PARAMETER Experiment Name: Zm_Herbicide-Treatments_P Parameter: Tissue Value: Aerial
  misc_feature: MA Experiment 20000626 PARAMETER Experiment Name: Zm_Herbicide-Treatments_P Parameter: Treatment Value: Roundup vs. No Treatment

SEQ ID NO: 19687 - protein, 418 aa, Zea mays subsp. mays; identical to SEQ ID NO: 7803
  peptide (1)..(418): Ceres Seq. ID no. 12413951
  misc_feature (31)..(404): Pfam Name: Mpp10 protein Pfam Description: Mpp10 protein
  misc_feature (31)..(404): Homolog of NCBI NO: 18425086 NR Description: expressed protein; protein id: At5g66540.1, by cDNA: gi_14488062 [Arabidopsis thaliana] gene_id:K1F13.21~unknown protein [Arabidopsis thaliana]
  misc_feature (38)..(415): Homolog of NCBI NO: 29351667 NR Description: similar to U3 small nucleolar ribonucleoprotein
  misc_feature (38)..(415): Homolog of NCBI NO: 34856326 NR Description: similar to U3 small nucleolar ribonucleoprotein
  misc_feature (41)..(415): Homolog of NCBI NO: 2230873 NR Description: M phase phosphoprotein 10 [Homo sapiens]
  misc_feature (26)..(418): Homolog of NCBI NO: 28175284 NR Description: Unknown (protein for IMAGE:5543289) [Xenopus
  misc_feature (95)..(405): Homolog of NCBI NO: 6322461 NR Description: part of small (ribosomal) subunit (SSU) (contains U3 snoRNA); Mpp10p [Saccharomyces cerevisiae] U3 small nucleolar ribonucleoprotein protein MPP10
  misc_feature (14)..(409): Homolog of NCBI NO: 19920954 NR Description: CG13097-PA [Drosophila melanogaster]
  misc_feature (5)..(409): Homolog of NCBI NO: 19114546 NR Description: putative component of the U3 small nucleolar [Schizosaccharomyces pombe] >gi|3183346|sp|O13910|YDW3_SCHPO protein C23C11.03 in chromosome I >gi|7493124|pir||T38241
  misc_feature (193)..(415): Homolog of NCBI NO: 21312690 NR Description: RIKEN cDNA 2810453H10 [Mus musculus]
  misc_feature (13)..(390): Homolog of NCBI NO: 40740848 NR Description: hypothetical protein AN4298.2 [Aspergillus

SEQ ID NO: 19688 - protein, 380 aa, Zea mays subsp. mays; identical to SEQ ID NO: 7804
  peptide (1)..(380): Ceres Seq. ID no. 12413952
  misc_feature (1)..(366): Pfam Name: Mpp10 protein Pfam Description: Mpp10 protein
  misc_feature (1)..(366): Homolog of NCBI NO: 18425086 NR Description: expressed protein; protein id: At5g66540.1, by cDNA: gi_14488062 [Arabidopsis thaliana] gene_id:K1F13.21~unknown protein [Arabidopsis thaliana]
  misc_feature (1)..(377): Homolog of NCBI NO: 29351667 NR Description: similar to U3 small nucleolar ribonucleoprotein
  misc_feature (1)..(377): Homolog of NCBI NO: 34856326 NR Description: similar to U3 small nucleolar ribonucleoprotein
  misc_feature (3)..(377): Homolog of NCBI NO: 2230873 NR Description: M phase phosphoprotein 10 [Homo sapiens]
  misc_feature (1)..(380): Homolog of NCBI NO: 28175284 NR Description: Unknown (protein for IMAGE:5543289) [Xenopus
  misc_feature (57)..(367): Homolog of NCBI NO: 6322461 NR Description: part of small (ribosomal) subunit (SSU) (contains U3 snoRNA); Mpp10p [Saccharomyces cerevisiae] U3 small nucleolar ribonucleoprotein protein MPP10
  misc_feature (1)..(371): Homolog of NCBI NO: 19920954 NR Description: CG13097-PA [Drosophila melanogaster]
  misc_feature (1)..(371): Homolog of NCBI NO: 19114546 NR Description: putative component of the U3 small nucleolar [Schizosaccharomyces pombe] >gi|3183346|sp|O13910|YDW3_SCHPO protein C23C11.03 in chromosome I >gi|7493124|pir||T38241
  misc_feature (155)..(377): Homolog of NCBI NO: 21312690 NR Description: RIKEN cDNA 2810453H10 [Mus musculus]
  misc_feature (1)..(352): Homolog of NCBI NO: 40740848 NR Description: hypothetical protein AN4298.2 [Aspergillus

SEQ ID NO: 19689 - protein, 326 aa, Zea mays subsp. mays; identical to SEQ ID NO: 7805
  peptide (1)..(326): Ceres Seq. ID no. 12413953
  misc_feature (1)..(312): Pfam Name: Mpp10 protein Pfam Description: Mpp10 protein
  misc_feature (101)..(323): Homolog of NCBI NO: 21312690 NR Description: RIKEN cDNA 2810453H10 [Mus musculus]
  misc_feature (1)..(312): Homolog of NCBI NO: 18425086 NR Description: expressed protein; protein id: At5g66540.1, by cDNA: gi_14488062 [Arabidopsis thaliana] gene_id:K1F13.21~unknown protein [Arabidopsis thaliana]
  misc_feature (1)..(323): Homolog of NCBI NO: 34856326 NR Description: similar to U3 small nucleolar ribonucleoprotein
  misc_feature (1)..(326): Homolog of NCBI NO: 28175284 NR Description: Unknown (protein for IMAGE:5543289) [Xenopus
  misc_feature (1)..(317): Homolog of NCBI NO: 19920954 NR Description: CG13097-PA [Drosophila melanogaster]
  misc_feature (1)..(317): Homolog of NCBI NO: 19114546 NR Description: putative component of the U3 small nucleolar [Schizosaccharomyces pombe] >gi|3183346|sp|O13910|YDW3_SCHPO protein C23C11.03 in chromosome I >gi|7493124|pir||T38241
  misc_feature (3)..(313): Homolog of NCBI NO: 6322461 NR Description: part of small (ribosomal) subunit (SSU) (contains U3 snoRNA); Mpp10p [Saccharomyces cerevisiae] U3 small nucleolar ribonucleoprotein protein MPP10
  misc_feature (1)..(323): Homolog of NCBI NO: 2230873 NR Description: M phase phosphoprotein 10 [Homo sapiens]
  misc_feature (1)..(323): Homolog of NCBI NO: 29351667 NR Description: similar to U3 small nucleolar ribonucleoprotein
  misc_feature (1)..(298): Homolog of NCBI NO: 40740848 NR Description: hypothetical protein AN4298.2 [Aspergillus

SEQ ID NO: 19690 - DNA, 958 bp, Zea mays subsp. mays; identical to SEQ ID NO: 4183
  misc_feature (1)..(958): Ceres Seq. ID no. 13571162
  misc_feature: MA Experiment ID: 108529 Result: Down-regulated in Transcription
  misc_feature: MA Experiment 108529 PARAMETER Experiment Name: Zm_Imbibed_Seeds_P Parameter: Age (day) Value: 5 vs. 2
  misc_feature: MA Experiment 108529 PARAMETER Experiment Name: Zm_Imbibed_Seeds_P Parameter: Organism Value: Zea mays
  misc_feature: MA Experiment 108529 PARAMETER Experiment Name: Zm_Imbibed_Seeds_P Parameter: Plant Line Value: 35A19
  misc_feature: MA Experiment 108529 PARAMETER Experiment Name: Zm_Imbibed_Seeds_P Parameter: Tissue Value: Roots vs. Embryo
  misc_feature: MA Experiment ID: 108535 Result: Up-regulated in Transcription
  misc_feature: MA Experiment 108535 PARAMETER Experiment Name: Zm_Meristem_P Parameter: Age (day) Value: 8
  misc_feature: MA Experiment 108535 PARAMETER Experiment Name: Zm_Meristem_P Parameter: Organism Value: Zea mays
  misc_feature: MA Experiment 108535 PARAMETER Experiment Name: Zm_Meristem_P Parameter: Plant Line Value: 35A19
  misc_feature: MA Experiment 108535 PARAMETER Experiment Name: Zm_Meristem_P Parameter: Tissue Value: Root Meristem vs. Above Root Meristem
  misc_feature: MA Experiment ID: 108556 Result: Down-regulated in Transcription
  misc_feature: MA Experiment 108556 PARAMETER Experiment Name: Zm_Drought_P Parameter: Age (day) Value: 9
  misc_feature: MA Experiment 108556 PARAMETER Experiment Name: Zm_Drought_P Parameter: Organism Value: Zea mays
  misc_feature: MA Experiment 108556 PARAMETER Experiment Name: Zm_Drought_P Parameter: Plant Line Value: 35A19
  misc_feature: MA Experiment 108556 PARAMETER Experiment Name: Zm_Drought_P Parameter: Timepoint (hr) Value: 24
  misc_feature: MA Experiment 108556 PARAMETER Experiment Name: Zm_Drought_P Parameter: Tissue Value: Aerial
  misc_feature: MA Experiment 108556 PARAMETER Experiment Name: Zm_Drought_P Parameter: Treatment Value: Drought vs. No Drought
  misc_feature: MA Experiment ID: 20000478 Result: Down-regulated in Transcription
  misc_feature: MA Experiment 20000478 PARAMETER Experiment Name: Zm_5mM_SA_P Parameter: Age (day) Value: 11
  misc_feature: MA Experiment 20000478 PARAMETER Experiment Name: Zm_5mM_SA_P Parameter: Organism Value: Zea mays
  misc_feature: MA Experiment 20000478 PARAMETER Experiment Name: Zm_5mM_SA_P Parameter: Plant Line Value: 35A19
  misc_feature: MA Experiment 20000478 PARAMETER Experiment Name: Zm_5mM_SA_P Parameter: Timepoint (hr) Value: 72
  misc_feature: MA Experiment 20000478 PARAMETER Experiment Name: Zm_5mM_SA_P Parameter: Tissue Value: Aerial
  misc_feature: MA Experiment 20000478 PARAMETER Experiment Name: Zm_5mM_SA_P Parameter: Treatment Value: 5mM SA vs. No Treatment
  misc_feature: MA Experiment ID: 20000492 Result: Up-regulated in Transcription
  misc_feature: MA Experiment 20000492 PARAMETER Experiment Name: Zm_Hybrid_Seed_Dev_P Parameter: DAP Value: 12
  misc_feature: MA Experiment 20000492 PARAMETER Experiment Name: Zm_Hybrid_Seed_Dev_P Parameter: Organism Value: Zea mays
  misc_feature: MA Experiment 20000492 PARAMETER Experiment Name: Zm_Hybrid_Seed_Dev_P Parameter: Plant Line Value: 35A19
  misc_feature: MA Experiment 20000492 PARAMETER Experiment Name: Zm_Hybrid_Seed_Dev_P Parameter: Tissue Value: Fert Kernel vs. Unfert Floret
  misc_feature: MA Experiment ID: 20000535 Result: Up-regulated in Transcription
  misc_feature: MA Experiment 20000535 PARAMETER Experiment Name: Zm_Hybrid_Seed_Dev_P Parameter: DAP Value: 30 vs. 12
  misc_feature: MA Experiment 20000535 PARAMETER Experiment Name: Zm_Hybrid_Seed_Dev_P Parameter: Organism Value: Zea mays
  misc_feature: MA Experiment 20000535 PARAMETER Experiment Name: Zm_Hybrid_Seed_Dev_P Parameter: Plant Line Value: 35A19
  misc_feature: MA Experiment 20000535 PARAMETER Experiment Name: Zm_Hybrid_Seed_Dev_P Parameter: Tissue Value: Embryo vs. Unfert Floret
  misc_feature: MA Experiment ID: 20000626 Result: Up-regulated in Transcription
  misc_feature: MA Experiment 20000626 PARAMETER Experiment Name: Zm_Herbicide-Treatments_P Parameter: Timepoint (hr) Value: 12
  misc_feature: MA Experiment 20000626 PARAMETER Experiment Name: Zm_Herbicide-Treatments_P Parameter: Tissue Value: Aerial
  misc_feature: MA Experiment 20000626 PARAMETER Experiment Name: Zm_Herbicide-Treatments_P Parameter: Treatment Value: Roundup vs. No Treatment
  misc_feature: MA Experiment ID: 20000627 Result: Up-regulated in Transcription
  misc_feature: MA Experiment 20000627 PARAMETER Experiment Name: Zm_Herbicide-Treatments_P Parameter: Timepoint (hr) Value: 12
  misc_feature: MA Experiment 20000627 PARAMETER Experiment Name: Zm_Herbicide-Treatments_P Parameter: Tissue Value: Aerial
  misc_feature: MA Experiment 20000627 PARAMETER Experiment Name: Zm_Herbicide-Treatments_P Parameter: Treatment Value: Finale vs. No Treatment
  misc_feature: MA Experiment ID: 20000632 Result: Down-regulated in Transcription
  misc_feature: MA Experiment 20000632 PARAMETER Experiment Name: Zm_Herbicide-Treatments_P Parameter: Timepoint (hr) Value: 4
  misc_feature: MA Experiment 20000632 PARAMETER Experiment Name: Zm_Herbicide-Treatments_P Parameter: Tissue Value: Aerial
  misc_feature: MA Experiment 20000632 PARAMETER Experiment Name: Zm_Herbicide-Treatments_P Parameter: Treatment Value: Glean vs. No Treatment

SEQ ID NO: 19691 - protein, 231 aa, Zea mays subsp. mays; identical to SEQ ID NO: 4184
  peptide (1)..(231): Ceres Seq. ID no. 13571163
  misc_feature (45)..(211): Pfam Name: Chromadorea ALT protein Pfam Description: Chromadorea ALT protein
  misc_feature (21)..(224): Homolog of NCBI NO: 34894890 NR Description: B1140D12.10 [Oryza sativa (japonica
  misc_feature (25)..(230): Homolog of NCBI NO: 18401985 NR Description: expressed protein [Arabidopsis thaliana]
  misc_feature (59)..(224): Homolog of NCBI NO: 35210494 NR Description: aspartic acid-rich protein aspolin2 [Theragra
  misc_feature (59)..(224): Homolog of NCBI NO: 35210492 NR Description: aspartic acid-rich protein aspolin1 [Theragra
  misc_feature (59)..(224): Homolog of NCBI NO: 35210494 NR Description: aspartic acid-rich protein aspolin2 [Theragra
  misc_feature (50)..(224): Homolog of NCBI NO: 33284873 NR Description: SI:bZ1G18.2 (novel protein similar to human
  misc_feature (52)..(224): Homolog of NCBI NO: 35210492 NR Description: aspartic acid-rich protein aspolin1 [Theragra
  misc_feature (52)..(224): Homolog of NCBI NO: 35210494 NR Description: aspartic acid-rich protein aspolin2 [Theragra
  misc_feature (59)..(224): Homolog of NCBI NO: 35210494 NR Description: aspartic acid-rich protein aspolin2 [Theragra
  misc_feature (59)..(224): Homolog of NCBI NO: 35210492 NR Description: aspartic acid-rich protein aspolin1 [Theragra

SEQ ID NO: 19692 - protein, 211 aa, Zea mays subsp. mays; identical to SEQ ID NO: 4185
  peptide (1)..(211): Ceres Seq. ID no. 13571164
  misc_feature (25)..(191): Pfam Name: Chromadorea ALT protein Pfam Description: Chromadorea ALT protein
  misc_feature (1)..(204): Homolog of NCBI NO: 34894890 NR Description: B1140D12.10 [Oryza sativa (japonica
  misc_feature (5)..(210): Homolog of NCBI NO: 18401985 NR Description: expressed protein [Arabidopsis thaliana]
  misc_feature (39)..(204): Homolog of NCBI NO: 35210494 NR Description: aspartic acid-rich protein aspolin2 [Theragra
  misc_feature (39)..(204): Homolog of NCBI NO: 35210492 NR Description: aspartic acid-rich protein aspolin1 [Theragra
  misc_feature (39)..(204): Homolog of NCBI NO: 35210494 NR Description: aspartic acid-rich protein aspolin2 [Theragra
  misc_feature (30)..(204): Homolog of NCBI NO: 33284873 NR Description: SI:bZ1G18.2 (novel protein similar to human
  misc_feature (32)..(204): Homolog of NCBI NO: 35210492 NR Description: aspartic acid-rich protein aspolin1 [Theragra
  misc_feature (32)..(204): Homolog of NCBI NO: 35210494 NR Description: aspartic acid-rich protein aspolin2 [Theragra
  misc_feature (39)..(204): Homolog of NCBI NO: 35210494 NR Description: aspartic acid-rich protein aspolin2 [Theragra
  misc_feature (39)..(204): Homolog of NCBI NO: 35210492 NR Description: aspartic acid-rich protein aspolin1 [Theragra

SEQ ID NO: 19693 - protein, 195 aa, Zea mays subsp. mays; identical to SEQ ID NO: 4186
  peptide (1)..(195): Ceres Seq. ID no. 13571165
  misc_feature (9)..(175): Pfam Name: Chromadorea ALT protein Pfam Description: Chromadorea ALT protein
  misc_feature (1)..(188): Homolog of NCBI NO: 34894890 NR Description: B1140D12.10 [Oryza sativa (japonica
  misc_feature (1)..(194): Homolog of NCBI NO: 18401985 NR Description: expressed protein [Arabidopsis thaliana]
  misc_feature (23)..(188): Homolog of NCBI NO: 35210494 NR Description: aspartic acid-rich protein aspolin2 [Theragra
  misc_feature (23)..(188): Homolog of NCBI NO: 35210492 NR Description: aspartic acid-rich protein aspolin1 [Theragra
  misc_feature (23)..(188): Homolog of NCBI NO: 35210494 NR Description: aspartic acid-rich protein aspolin2 [Theragra
  misc_feature (14)..(188): Homolog of NCBI NO: 33284873 NR Description: SI:bZ1G18.2 (novel protein similar to human
  misc_feature (16)..(188): Homolog of NCBI NO: 35210492 NR Description: aspartic acid-rich protein aspolin1 [Theragra
  misc_feature (16)..(188): Homolog of NCBI NO: 35210494 NR Description: aspartic acid-rich protein aspolin2 [Theragra
  misc_feature (23)..(188): Homolog of NCBI NO: 35210494 NR Description: aspartic acid-rich protein aspolin2 [Theragra
  misc_feature (23)..(188): Homolog of NCBI NO: 35210492 NR Description: aspartic acid-rich protein aspolin1 [Theragra

SEQ ID NO: 19694 - DNA, 1088 bp, Zea mays subsp. mays
  misc_feature (1)..(1088): Ceres Seq. ID no. 12377821
  misc_feature: MA Experiment ID: 108535 Result: Down-regulated in Transcription
  misc_feature: MA Experiment 108535 PARAMETER Experiment Name: Zm_Meristem_P Parameter: Age (day) Value: 8
  misc_feature: MA Experiment 108535 PARAMETER Experiment Name: Zm_Meristem_P Parameter: Organism Value: Zea mays
  misc_feature: MA Experiment 108535 PARAMETER Experiment Name: Zm_Meristem_P Parameter: Plant Line Value: 35A19
  misc_feature: MA Experiment 108535 PARAMETER Experiment Name: Zm_Meristem_P Parameter: Tissue Value: Root Meristem vs. Above Root Meristem
  misc_feature: MA Experiment ID: 108556 Result: Up-regulated in Transcription
  misc_feature: MA Experiment 108556 PARAMETER Experiment Name: Zm_Drought_P Parameter: Age (day) Value: 9
  misc_feature: MA Experiment 108556 PARAMETER Experiment Name: Zm_Drought_P Parameter: Organism Value: Zea mays
  misc_feature: MA Experiment 108556 PARAMETER Experiment Name: Zm_Drought_P Parameter: Plant Line Value: 35A19
  misc_feature: MA Experiment 108556 PARAMETER Experiment Name: Zm_Drought_P Parameter: Timepoint (hr) Value: 24
  misc_feature: MA Experiment 108556 PARAMETER Experiment Name: Zm_Drought_P Parameter: Tissue Value: Aerial
  misc_feature: MA Experiment 108556 PARAMETER Experiment Name: Zm_Drought_P Parameter: Treatment Value: Drought vs. No Drought
  misc_feature: MA Experiment ID: 108689 Result: Up-regulated in Transcription
  misc_feature: MA Experiment 108689 PARAMETER Experiment Name: Zm_Drought_Roots_P Parameter: Age (day) Value: 9
  misc_feature: MA Experiment 108689 PARAMETER Experiment Name: Zm_Drought_Roots_P Parameter: Organism Value: Zea mays
  misc_feature: MA Experiment 108689 PARAMETER Experiment Name: Zm_Drought_Roots_P Parameter: Plant Line Value: 35A19
  misc_feature: MA Experiment 108689 PARAMETER Experiment Name: Zm_Drought_Roots_P Parameter: Timepoint (hr) Value: 24
  misc_feature: MA Experiment 108689 PARAMETER Experiment Name: Zm_Drought_Roots_P Parameter: Tissue Value: Roots
  misc_feature: MA Experiment 108689 PARAMETER Experiment Name: Zm_Drought_Roots_P Parameter: Treatment Value: Drought vs. No Drought
  misc_feature: MA Experiment ID: 20000477 Result: Up-regulated in Transcription
  misc_feature: MA Experiment 20000477 PARAMETER Experiment Name: Zm_5mM_SA_P Parameter: Age (day) Value: 10
  misc_feature: MA Experiment 20000477 PARAMETER Experiment Name: Zm_5mM_SA_P Parameter: Organism Value: Zea mays
  misc_feature: MA Experiment 20000477 PARAMETER Experiment Name: Zm_5mM_SA_P Parameter: Plant Line Value: 35A19
  misc_feature: MA Experiment 20000477 PARAMETER Experiment Name: Zm_5mM_SA_P Parameter: Timepoint (hr) Value: 48
  misc_feature: MA Experiment 20000477 PARAMETER Experiment Name: Zm_5mM_SA_P Parameter: Tissue Value: Aerial
  misc_feature: MA Experiment 20000477 PARAMETER Experiment Name: Zm_5mM_SA_P Parameter: Treatment Value: 5mM SA vs. No Treatment
  misc_feature: MA Experiment ID: 20000478 Result: Up-regulated in Transcription
  misc_feature: MA Experiment 20000478 PARAMETER Experiment Name: Zm_5mM_SA_P Parameter: Age (day) Value: 11
  misc_feature: MA Experiment 20000478 PARAMETER Experiment Name: Zm_5mM_SA_P Parameter: Organism Value: Zea mays
  misc_feature: MA Experiment 20000478 PARAMETER Experiment Name: Zm_5mM_SA_P Parameter: Plant Line Value: 35A19
  misc_feature: MA Experiment 20000478 PARAMETER Experiment Name: Zm_5mM_SA_P Parameter: Timepoint (hr) Value: 72
  misc_feature: MA Experiment 20000478 PARAMETER Experiment Name: Zm_5mM_SA_P Parameter: Tissue Value: Aerial
  misc_feature: MA Experiment 20000478 PARAMETER Experiment Name: Zm_5mM_SA_P Parameter: Treatment Value: 5mM SA vs. No Treatment
  misc_feature: MA Experiment ID: 20000480 Result: Up-regulated in Transcription
  misc_feature: MA Experiment 20000480 PARAMETER Experiment Name: Zm_Drought_P Parameter: Age (day) Value: 11
  misc_feature: MA Experiment 20000480 PARAMETER Experiment Name: Zm_Drought_P Parameter: Organism Value: Zea mays
  misc_feature: MA Experiment 20000480 PARAMETER Experiment Name: Zm_Drought_P Parameter: Plant Line Value: 35A19
  misc_feature: MA Experiment 20000480 PARAMETER Experiment Name: Zm_Drought_P Parameter: Timepoint (hr) Value: 72
  misc_feature: MA Experiment 20000480 PARAMETER Experiment Name: Zm_Drought_P Parameter: Tissue Value: Aerial
  misc_feature: MA Experiment 20000480 PARAMETER Experiment Name: Zm_Drought_P Parameter: Treatment Value: Drought vs. No Drought
  misc_feature: MA Experiment ID: 20000534 Result: Down-regulated in Transcription
  misc_feature: MA Experiment 20000534 PARAMETER Experiment Name: Zm_Hybrid_Pollen_P Parameter: Age (day) Value: 8
  misc_feature: MA Experiment 20000534 PARAMETER Experiment Name: Zm_Hybrid_Pollen_P Parameter: Organism Value: Zea mays
  misc_feature: MA Experiment 20000534 PARAMETER Experiment Name: Zm_Hybrid_Pollen_P Parameter: Plant Line Value: 35A19
  misc_feature: MA Experiment 20000534 PARAMETER Experiment Name: Zm_Hybrid_Pollen_P Parameter: Tissue Value: Pollen vs. Aerial
tacgccaagcccgcaattaaccctcactaaagggaacaaaagctggagctccaccgcggtggcggccgctctagaactagtggatcccccgggctgcaggaattcgcacgagaccattacctagaacatcctaatcgaaaattatccgaggttccgtgcagcagtggaaaagagcagattttagcagagcagcgagggtcggagaagcctccccaagcttcgaatcgctatgcagcccgtcaaggtgtacgccgaccggcggtcgcaaccctcccgagctgtcatcatcttctgcagggtgaaccagatcgatttcgaggaggtcacggtggatctgttcaagtctcagcacctcacacccgaattcaaaaaaataaacccaatgggacaggtacctgcaattgttgatggaagattcaaactatttgaaagtcatgcgattttgaggtatcttgcatcggttttccctggagtagctgaccactggtatccttctgacttgttcaccagagccaaaattgagtcaatcttggattggcatcactcaaatttgcggcgtggtgcagcaacccttgtaatgcacactgcattggctcccttccttggtcttacgacaagtcatgaggctgtgaaacaagcagagaagcttgtgatgcagtcactgggggtgatcgaatccgtatggctgaaaggcgatgccaagttcttgctaggtatcccccagccatcgattgcagatctgagccttgtctgtgagataatgcagttggagatccttggcgatgaggtccgtgaccgattcctgggagctcatgagaggatccttgtctggatggacaaggtgaagaaagccacgagccctcattttgaggaagcccacgagctccttttccaagtgaagaaggcacgcatggtgcaaggcagcagcagcaaggcttttgagtcgagcacaaagctcaaaacagcatcaaagctctgacgaccaaaggcagaataagcgacagacagatccatcttgtgatataatataataaacgggaactattattaattactgttggtattaattacacttattccagaaggcc

SEQ ID NO: 19695 - protein, 249 aa, Zea mays subsp. mays
  peptide (1)..(249): Ceres Seq. ID no. 12377822
  misc_feature (95)..(209): Pfam Name: Glutathione S-transferase, C-terminal domain Pfam Description: Glutathione S-transferase, C-terminal domain
  misc_feature (1)..(249): Homolog of NCBI NO: 15430709 NR Description: putative glutathione S-transferase OsGSTT1
MQPVKVYADRRSQPSRAVIIFCRVNQIDFEEVTVDLFKSQHLTPEFKKINPMGQVPAIVDGRFKLFESHAILRYLASVFPGVADHWYPSDLFTRAKIESILDWHHSNLRRGAATLVMHTALAPFLGLTTSHEAVKQAEKLVMQSLGVIESVWLKGDAKFLLGIPQPSIADLSLVCEIMQLEILGDEVRDRFLGAHERILVWMDKVKKATSPHFEEAHELLFQVKKARMVQGSSSKAFESSTKLKTASKL

SEQ ID NO: 19696 - protein, 198 aa, Zea mays subsp. mays
  peptide (1)..(198): Ceres Seq. ID no. 12377823
  misc_feature (44)..(158): Pfam Name: Glutathione S-transferase, C-terminal domain Pfam Description: Glutathione S-transferase, C-terminal domain
  misc_feature (1)..(198): Homolog of NCBI NO: 15430709 NR Description: putative glutathione S-transferase OsGSTT1
MGQVPAIVDGRFKLFESHAILRYLASVFPGVADHWYPSDLFTRAKIESILDWHHSNLRRGAATLVMHTALAPFLGLTTSHEAVKQAEKLVMQSLGVIESVWLKGDAKFLLGIPQPSIADLSLVCEIMQLEILGDEVRDRFLGAHERILVWMDKVKKATSPHFEEAHELLFQVKKARMVQGSSSKAFESSTKLKTASKL

SEQ ID NO: 19697 - protein, 133 aa, Zea mays subsp. mays
  peptide (1)..(133): Ceres Seq. ID no. 12377824
  misc_feature (1)..(93): Pfam Name: Glutathione S-transferase, C-terminal domain Pfam Description: Glutathione S-transferase, C-terminal domain
  misc_feature (1)..(133): Homolog of NCBI NO: 15430709 NR Description: putative glutathione S-transferase OsGSTT1
MHTALAPFLGLTTSHEAVKQAEKLVMQSLGVIESVWLKGDAKFLLGIPQPSIADLSLVCEIMQLEILGDEVRDRFLGAHERILVWMDKVKKATSPHFEEAHELLFQVKKARMVQGSSSKAFESSTKLKTASKL

SEQ ID NO: 19698 - DNA, 1968 bp, Zea mays subsp. mays; identical to SEQ ID NO: 5815
  misc_feature (1)..(1968): Ceres Seq. ID no. 12362596
  misc_feature: MA Experiment ID: 108523 Result: Up-regulated in Transcription
  misc_feature: MA Experiment 108523 PARAMETER Experiment Name: Zm_42deg_Heat_P Parameter: Age (day) Value: 8
  misc_feature: MA Experiment 108523 PARAMETER Experiment Name: Zm_42deg_Heat_P Parameter: Organism Value: Zea mays
  misc_feature: MA Experiment 108523 PARAMETER Experiment Name: Zm_42deg_Heat_P Parameter: Plant Line Value: 35A19
  misc_feature: MA Experiment 108523 PARAMETER Experiment Name: Zm_42deg_Heat_P Parameter: Temperature (deg C) Value: 42 vs. 22
  misc_feature: MA Experiment 108523 PARAMETER Experiment Name: Zm_42deg_Heat_P Parameter: Timepoint (hr) Value: 6
  misc_feature: MA Experiment 108523 PARAMETER Experiment Name: Zm_42deg_Heat_P Parameter: Tissue Value: Aerial
  misc_feature: MA Experiment ID: 108543 Result: Down-regulated in Transcription
  misc_feature: MA Experiment ID: 20000479 Result: Up-regulated in Transcription
  misc_feature: MA Experiment 20000479 PARAMETER Experiment Name: Zm_Drought_P Parameter: Age (day) Value: 10
  misc_feature: MA Experiment 20000479 PARAMETER Experiment Name: Zm_Drought_P Parameter: Organism Value: Zea mays
  misc_feature: MA Experiment 20000479 PARAMETER Experiment Name: Zm_Drought_P Parameter: Plant Line Value: 35A19
  misc_feature: MA Experiment 20000479 PARAMETER Experiment Name: Zm_Drought_P Parameter: Timepoint (hr) Value: 48
  misc_feature: MA Experiment 20000479 PARAMETER Experiment Name: Zm_Drought_P Parameter: Tissue Value: Aerial
  misc_feature: MA Experiment 20000479 PARAMETER Experiment Name: Zm_Drought_P Parameter: Treatment Value: Drought vs. No Drought
  misc_feature: MA Experiment ID: 20000480 Result: Up-regulated in Transcription
  misc_feature: MA Experiment 20000480 PARAMETER Experiment Name: Zm_Drought_P Parameter: Age (day) Value: 11
  misc_feature: MA Experiment 20000480 PARAMETER Experiment Name: Zm_Drought_P Parameter: Organism Value: Zea mays
  misc_feature: MA Experiment 20000480 PARAMETER Experiment Name: Zm_Drought_P Parameter: Plant Line Value: 35A19
  misc_feature: MA Experiment 20000480 PARAMETER Experiment Name: Zm_Drought_P Parameter: Timepoint (hr) Value: 72
  misc_feature: MA Experiment 20000480 PARAMETER Experiment Name: Zm_Drought_P Parameter: Tissue Value: Aerial
  misc_feature: MA Experiment 20000480 PARAMETER Experiment Name: Zm_Drought_P Parameter: Treatment Value: Drought vs. No Drought
  misc_feature: MA Experiment ID: 20000535 Result: Up-regulated in Transcription
  misc_feature: MA Experiment 20000535 PARAMETER Experiment Name: Zm_Hybrid_Seed_Dev_P Parameter: DAP Value: 30 vs. 12
  misc_feature: MA Experiment 20000535 PARAMETER Experiment Name: Zm_Hybrid_Seed_Dev_P Parameter: Organism Value: Zea mays
  misc_feature: MA Experiment 20000535 PARAMETER Experiment Name: Zm_Hybrid_Seed_Dev_P Parameter: Plant Line Value: 35A19
  misc_feature: MA Experiment 20000535 PARAMETER Experiment Name: Zm_Hybrid_Seed_Dev_P Parameter: Tissue Value: Embryo vs. Unfert Floret

SEQ ID NO: 19699 - protein, 488 aa, Zea mays subsp. mays; identical to SEQ ID NO: 5816
  peptide (1)..(488): Ceres Seq. ID no. 12362597
  misc_feature (1)..(359): Homolog of NCBI NO: 18400970 NR Description: expressed protein; protein id: At3g15970.1, by cDNA: 108414. [Arabidopsis thaliana]
  misc_feature (1)..(359): Homolog of NCBI NO: 21536684 NR Description: unknown [Arabidopsis thaliana]
  misc_feature (197)..(359): Homolog of NCBI NO: 22655290 NR Description: unknown protein [Arabidopsis thaliana]
  misc_feature (1)..(310): Homolog of NCBI NO: 18403992 NR Description: expressed protein; protein id: At1g52380.1, by cDNA: 25703., supported by cDNA: gi_14335001, supported by gi_16323321 [Arabidopsis thaliana] >gi|25405545|pir||A96564
  misc_feature (117)..(359): Homolog of NCBI NO: 18403992 NR Description: expressed protein; protein id: At1g52380.1, by cDNA: 25703., supported by cDNA: gi_14335001, supported by gi_16323321 [Arabidopsis thaliana] >gi|25405545|pir||A96564
  misc_feature (1)..(360): Homolog of NCBI NO: 40747404 NR Description: hypothetical protein AN0461.2 [Aspergillus

SEQ ID NO: 19700 - protein, 454 aa, Zea mays subsp. mays; identical to SEQ ID NO: 5817
  peptide (1)..(454): Ceres Seq. ID no. 12362598
  misc_feature (1)..(325): Homolog of NCBI NO: 18400970 NR Description: expressed protein; protein id: At3g15970.1, by cDNA: 108414. [Arabidopsis thaliana]
  misc_feature (1)..(325): Homolog of NCBI NO: 21536684 NR Description: unknown [Arabidopsis thaliana]
  misc_feature (163)..(325): Homolog of NCBI NO: 22655290 NR Description: unknown protein [Arabidopsis thaliana]
  misc_feature (1)..(276): Homolog of NCBI NO: 18403992 NR Description: expressed protein; protein id: At1g52380.1, by cDNA: 25703., supported by cDNA: gi_14335001, supported by gi_16323321 [Arabidopsis thaliana] >gi|25405545|pir||A96564
  misc_feature (83)..(325): Homolog of NCBI NO: 18403992 NR Description: expressed protein; protein id: At1g52380.1, by cDNA: 25703., supported by cDNA: gi_14335001, supported by gi_16323321 [Arabidopsis thaliana] >gi|25405545|pir||A96564
  misc_feature (1)..(326): Homolog of NCBI NO: 40747404 NR Description: hypothetical protein AN0461.2 [Aspergillus

SEQ ID NO: 19701 - protein, 443 aa, Zea mays subsp. mays; identical to SEQ ID NO: 5818
  peptide (1)..(443): Ceres Seq. ID no. 12362599
  misc_feature (1)..(314): Homolog of NCBI NO: 18400970 NR Description: expressed protein; protein id: At3g15970.1, by cDNA: 108414. [Arabidopsis thaliana]
  misc_feature (1)..(314): Homolog of NCBI NO: 21536684 NR Description: unknown [Arabidopsis thaliana]
  misc_feature (152)..(314): Homolog of NCBI NO: 22655290 NR Description: unknown protein [Arabidopsis thaliana]
  misc_feature (1)..(265): Homolog of NCBI NO: 18403992 NR Description: expressed protein; protein id: At1g52380.1, by cDNA: 25703., supported by cDNA: gi_14335001, supported by gi_16323321 [Arabidopsis thaliana] >gi|25405545|pir||A96564
  misc_feature (72)..(314): Homolog of NCBI NO: 18403992 NR Description: expressed protein; protein id: At1g52380.1, by cDNA: 25703., supported by cDNA: gi_14335001, supported by gi_16323321 [Arabidopsis thaliana] >gi|25405545|pir||A96564
  misc_feature (1)..(315): Homolog of NCBI NO: 40747404 NR Description: hypothetical protein AN0461.2 [Aspergillus

SEQ ID NO: 19702 - DNA, 468 bp, Zea mays subsp. mays
  misc_feature (1)..(468): Ceres Seq. ID no. 13622586
  misc_feature: MA Experiment ID: 108527 Result: Up-regulated in Transcription
  misc_feature: MA Experiment 108527 PARAMETER Experiment Name: Zm_5mM_NO_P Parameter: Age (day) Value: 8
  misc_feature: MA Experiment 108527 PARAMETER Experiment Name: Zm_5mM_NO_P Parameter: Organism Value: Zea mays
  misc_feature: MA Experiment 108527 PARAMETER Experiment Name: Zm_5mM_NO_P Parameter: Plant Line Value: 35A19
  misc_feature: MA Experiment 108527 PARAMETER Experiment Name: Zm_5mM_NO_P Parameter: Timepoint (hr) Value: 6
  misc_feature: MA Experiment 108527 PARAMETER Experiment Name: Zm_5mM_NO_P Parameter: Tissue Value: Aerial
  misc_feature: MA Experiment 108527 PARAMETER Experiment Name: Zm_5mM_NO_P Parameter: Treatment Value: 5mM NO vs. No Treatment
  misc_feature: MA Experiment ID: 108535 Result: Down-regulated in Transcription
  misc_feature: MA Experiment 108535 PARAMETER Experiment Name: Zm_Meristem_P Parameter: Age (day) Value: 8
  misc_feature: MA Experiment 108535 PARAMETER Experiment Name: Zm_Meristem_P Parameter: Organism Value: Zea mays
  misc_feature: MA Experiment 108535 PARAMETER Experiment Name: Zm_Meristem_P Parameter: Plant Line Value: 35A19
  misc_feature: MA Experiment 108535 PARAMETER Experiment Name: Zm_Meristem_P Parameter: Tissue Value: Root Meristem vs. Above Root Meristem
  misc_feature: MA Experiment ID: 108543 Result: Up-regulated in Transcription
  misc_feature: MA Experiment ID: 108689 Result: Down-regulated in Transcription
  misc_feature: MA Experiment 108689 PARAMETER Experiment Name: Zm_Drought_Roots_P Parameter: Age (day) Value: 9
  misc_feature: MA Experiment 108689 PARAMETER Experiment Name: Zm_Drought_Roots_P Parameter: Organism Value: Zea mays
  misc_feature: MA Experiment 108689 PARAMETER Experiment Name: Zm_Drought_Roots_P Parameter: Plant Line Value: 35A19
  misc_feature: MA Experiment 108689 PARAMETER Experiment Name: Zm_Drought_Roots_P Parameter: Timepoint (hr) Value: 24
  misc_feature: MA Experiment 108689 PARAMETER Experiment Name: Zm_Drought_Roots_P Parameter: Tissue Value: Roots
  misc_feature: MA Experiment 108689 PARAMETER Experiment Name: Zm_Drought_Roots_P Parameter: Treatment Value: Drought vs. No Drought
acctacagtcactcgaattctacttgcagtgcaaagaagccaatctcttccaacctgcttgcgagtttctccctatgattaatgaggtgtgttttatcttacagctactgcactaacaaactgcatttcttagtcgcagtacctcaacttgatatatctggaactctgttactgttcctagcgggtttccaagtgcctcgtggaggtcacgagttcaattgaaggtgcaagagttgagaacaacaagttctgtgtatctgtacattaccgcaacgtagcagagaaggactggaaagtggtcgcaggactcgtgaaacaagtcttggaggccttccctcgtctcaaagtaaccaacgggcgaatggttttagaggttcgcccggtgatcgactgggacaagggaaaggctgtcgagttcctgcttcggtcgctcggcctaagcgactccgaagawgtgggttcctatct

SEQ ID NO: 19703 - protein, 46 aa, Zea mays subsp. mays
  peptide (1)..(46): Ceres Seq. ID no. 13622587
MRCVLSYSYCTNKLHFLVAVPQLDISGTLLLFLAGFQVPRGGHEFN

SEQ ID NO: 19704 - protein, 37 aa, Zea mays subsp. mays
  peptide (1)..(37): Ceres Seq. ID no. 13622588
  misc_feature (11)..(29): Homolog of NCBI NO: 37536726 NR Description: putative trehalose-6-phosphate phosphatase
  misc_feature (9)..(29): Homolog of NCBI NO: 15234552 NR Description: trehalose-6-phosphate phosphatase, putative
  misc_feature (2)..(34): Homolog of NCBI NO: 30696058 NR Description: trehalose-6-phosphate phosphatase (TPPA)
  misc_feature (2)..(34): Homolog of NCBI NO: 30696054 NR Description: trehalose-6-phosphate phosphatase (TPPA)
LQSLEFYLQCKEANLFQPACEFLPMINEVCFILQLLH

SEQ ID NO: 19705 - protein, 35 aa, Zea mays subsp. mays
  peptide (1)..(35): Ceres Seq. ID no. 13622589
  misc_feature (1)..(32): Homolog of NCBI NO: 21554408 NR Description: trehalose-phosphatase, putative [Arabidopsis
  misc_feature (1)..(30): Homolog of NCBI NO: 15235713 NR Description: trehalose-6-phosphate phosphatase, putative
  misc_feature (1)..(32): Homolog of NCBI NO: 25354597 NR Description: probable trehalose-phosphatase [imported] -
  misc_feature (1)..(32): Homolog of NCBI NO: 18399940 NR Description: trehalose-6-phosphate phosphatase, putative
  misc_feature (1)..(32): Homolog of NCBI NO: 37536726 NR Description: putative trehalose-6-phosphate phosphatase
  misc_feature (1)..(32): Homolog of NCBI NO: 38345480 NR Description: OSJNBa0010H02.18 [Oryza sativa (japonica
  misc_feature (1)..(30): Homolog of NCBI NO: 15234552 NR Description: trehalose-6-phosphate phosphatase, putative
  misc_feature (1)..(32): Homolog of NCBI NO: 30696058 NR Description: trehalose-6-phosphate phosphatase (TPPA)
  misc_feature (1)..(32): Homolog of NCBI NO: 30696054 NR Description: trehalose-6-phosphate phosphatase (TPPA)
  misc_feature (1)..(32): Homolog of NCBI NO: 7487212 NR Description: hypothetical protein T19P19.160 - Arabidopsis
  misc_feature (31)..(31): Xaa is any aa, unknown or other
MVLEVRPVIDWDKGKAVEFLLRSLGLSDSEXVGSY

SEQ ID NO: 19706 - DNA, 487 bp, Zea mays subsp. mays
  misc_feature (1)..(487): Ceres Seq. ID no. 4254698
  misc_feature: MA Experiment ID: 108544 Result: Up-regulated in Transcription
  misc_feature: MA Experiment ID: 20000534 Result: Down-regulated in Transcription
  misc_feature: MA Experiment 20000534 PARAMETER Experiment Name: Zm_Hybrid_Pollen_P Parameter: Age (day) Value: 8
  misc_feature: MA Experiment 20000534 PARAMETER Experiment Name: Zm_Hybrid_Pollen_P Parameter: Organism Value: Zea mays
  misc_feature: MA Experiment 20000534 PARAMETER Experiment Name: Zm_Hybrid_Pollen_P Parameter: Plant Line Value: 35A19
  misc_feature: MA Experiment 20000534 PARAMETER Experiment Name: Zm_Hybrid_Pollen_P Parameter: Tissue Value: Pollen vs. Aerial
tattcgcgaagacatcagcataaatcttggtcctctggaggagctatcgaacttgtacaaagctgatttgctactctgtgaatctggaggagataacttggcagctaacttcagcagagaattagcagactacataatctacattatcgatgtctctggtggggacaagataccaagaaaaggtggccctgggataacccaggccgatctgttggtaataaacaagacagacctagcacctgctgttggagctgatctgtctgtaatggagcgagacgcacttcgcatgcgcgaaggagggccctttgtgtttgcacaggtgaaacatggagtgggcgtggaggggatcgtgaaccatattctgcaggcgtgggagatcgcgactggtaataagcggcgataagatctcacgacttggggccatatgttggatgcagatttgattcagtcggcacttccacatgcatgtgtcatctgttcgtttctc

SEQ ID NO: 19707 - protein, 133 aa, Zea mays subsp. mays
  peptide (1)..(133): Ceres Seq. ID no. 4254699
  misc_feature (1)..(57): Pfam Name: HypB/UreG nucleotide-binding domain Pfam Description: HypB/UreG nucleotide-binding domain
  misc_feature (1)..(133): Homolog of NCBI NO: 25313831 NR Description: urease accessory protein UREG [imported] -
  misc_feature (1)..(133): Homolog of NCBI NO: 15226754 NR Description: putative urease accessory protein
  misc_feature (1)..(133): Homolog of NCBI NO: 13161904 NR Description: urease accessory protein G [Solanum tuberosum]
  misc_feature (1)..(133): Homolog of NCBI NO: 13161910 NR Description: urease accessory protein G [Solanum tuberosum]
  misc_feature (1)..(133): Homolog of NCBI NO: 13161912 NR Description: urease accessory protein G [Solanum tuberosum]
  misc_feature (1)..(133): Homolog of NCBI NO: 13161908 NR Description: urease accessory protein G [Solanum tuberosum]
  misc_feature (1)..(133): Homolog of NCBI NO: 13161906 NR Description: urease accessory protein G [Solanum tuberosum]
IREDISINLGPLEELSNLYKADLLLCESGGDNLAANFSRELADYIIYIIDVSGGDKIPRKGGPGITQADLLVINKTDLAPAVGADLSVMERDALRMREGGPFVFAQVKHGVGVEGIVNHILQAWEIATGNKRR

SEQ ID NO: 19708 - protein, 45 aa, Zea mays subsp. mays; identical to SEQ ID NO: 8480
  peptide (1)..(45): Ceres Seq. ID no. 4254700
  misc_feature (1)..(45): Homolog of NCBI NO: 25313831 NR Description: urease accessory protein UREG [imported] -
  misc_feature (1)..(45): Homolog of NCBI NO: 15226754 NR Description: putative urease accessory protein
  misc_feature (1)..(45): Homolog of NCBI NO: 13161904 NR Description: urease accessory protein G [Solanum tuberosum]
  misc_feature (1)..(45): Homolog of NCBI NO: 13161910 NR Description: urease accessory protein G [Solanum tuberosum]
  misc_feature (1)..(45): Homolog of NCBI NO: 13161912 NR Description: urease accessory protein G [Solanum tuberosum]
  misc_feature (1)..(45): Homolog of NCBI NO: 13161908 NR Description: urease accessory protein G [Solanum tuberosum]
  misc_feature (1)..(45): Homolog of NCBI NO: 13161906 NR Description: urease accessory protein G [Solanum tuberosum]

SEQ ID NO: 19709 - DNA, 431 bp, Zea mays subsp. mays
  misc_feature (1)..(431): Ceres Seq. ID no. 11403618
  misc_feature: MA Experiment ID: 108535 Result: Up-regulated in Transcription
  misc_feature: MA Experiment 108535 PARAMETER Experiment Name: Zm_Meristem_P Parameter: Age (day) Value: 8
  misc_feature: MA Experiment 108535 PARAMETER Experiment Name: Zm_Meristem_P Parameter: Organism Value: Zea mays
  misc_feature: MA Experiment 108535 PARAMETER Experiment Name: Zm_Meristem_P Parameter: Plant Line Value: 35A19
  misc_feature: MA Experiment 108535 PARAMETER Experiment Name: Zm_Meristem_P Parameter: Tissue Value: Root Meristem vs. Above Root Meristem
  misc_feature: MA Experiment ID: 20000492 Result: Up-regulated in Transcription
  misc_feature: MA Experiment 20000492 PARAMETER Experiment Name: Zm_Hybrid_Seed_Dev_P Parameter: DAP Value: 12
  misc_feature: MA Experiment 20000492 PARAMETER Experiment Name: Zm_Hybrid_Seed_Dev_P Parameter: Organism Value: Zea mays
  misc_feature: MA Experiment 20000492 PARAMETER Experiment Name: Zm_Hybrid_Seed_Dev_P Parameter: Plant Line Value: 35A19
  misc_feature: MA Experiment 20000492 PARAMETER Experiment Name: Zm_Hybrid_Seed_Dev_P Parameter: Tissue Value: Fert Kernel vs. Unfert Floret
tgattacgagaaccgataaagtccgtgctcttcgtgaggctttctaccgccagaaccttccaaatgtgaccaatttgcttgccacagtcttggtcttcctcatagttatctatttccgaggcttccgtgttgtgcttccagtgagatcaaagtaatgctcgtggccagcaaggctcatatccaattaagctwattctacacttcaaacatgcccatcattctgcactctgcactgattaccaacctctatttcatatcccagcttctctacaggaagtacagtggaaacttccttgttaaccttcttgggatgtggaaggagtctgaatactctggccattcttcttcctgttggtggtcttgcttactatgtaactgccccatcaagtttggctgatgtccttgcaaatccattccatgcactgttttat

SEQ ID NO: 19710 - protein, 80 aa, Zea mays subsp. mays
  peptide (1)..(80): Ceres Seq. ID no. 11403619
  misc_feature (11)..(65): Pfam Name: eubacterial secY protein Pfam Description: eubacterial secY protein
  misc_feature (11)..(65): Homolog of NCBI NO: 10946604 NR Description: SEC61, alpha subunit 2 (S. cerevisiae); Sec61
  misc_feature (11)..(65): Homolog of NCBI NO: 19335712 NR Description: probable transport protein Sec61 alpha subunit
  misc_feature (11)..(65): Homolog of NCBI NO: 10434149 NR Description: unnamed protein product [Homo sapiens]
  misc_feature (11)..(65): Homolog of NCBI NO: 12230618 NR Description: Protein transport protein Sec61 alpha subunit
  misc_feature (11)..(65): Homolog of NCBI NO: 20071555 NR Description: Similar to Sec61 alpha form 2 [Homo sapiens]
  misc_feature (11)..(65): Homolog of NCBI NO: 14861602 NR Description: probable transport protein Sec61 alpha subunit
  misc_feature (11)..(65): Homolog of NCBI NO: 13173171 NR Description: putative transport protein Sec61 alpha subunit
  misc_feature (11)..(65): Homolog of NCBI NO: 19920826 NR Description: CG9539-PA [Drosophila melanogaster]
  misc_feature (11)..(65): Homolog of NCBI NO: 19335714 NR Description: probable transport protein Sec61 alpha subunit
  misc_feature (11)..(65): Homolog of NCBI NO: 6581004 NR Description: putative integral membrane protein [Phaseolus
  misc_feature (13)..(13): Xaa is any aa, unknown or other
MLVASKAHIQLSXFYTSNMPIILHSALITNLYFISQLLYRKYSGNFLVNLLGMWKESEYSGHSSSCWWSCLLCNCPIKFG

SEQ ID NO: 19711 - protein, 62 aa, Zea mays subsp. mays
  peptide (1)..(62): Ceres Seq. ID no. 11403620
  misc_feature (1)..(47): Homolog of NCBI NO: 10946604 NR Description: SEC61, alpha subunit 2 (S. cerevisiae); Sec61
  misc_feature (1)..(47): Homolog of NCBI NO: 19335712 NR Description: probable transport protein Sec61 alpha subunit
  misc_feature (1)..(47): Homolog of NCBI NO: 10434149 NR Description: unnamed protein product [Homo sapiens]
  misc_feature (1)..(47): Homolog of NCBI NO: 12230618 NR Description: Protein transport protein Sec61 alpha subunit
  misc_feature (1)..(47): Homolog of NCBI NO: 20071555 NR Description: Similar to Sec61 alpha form 2 [Homo sapiens]
  misc_feature (1)..(47): Homolog of NCBI NO: 14861602 NR Description: probable transport protein Sec61 alpha subunit
  misc_feature (1)..(47): Homolog of NCBI NO: 13173171 NR Description: putative transport protein Sec61 alpha subunit
  misc_feature (1)..(47): Homolog of NCBI NO: 19920826 NR Description: CG9539-PA [Drosophila melanogaster]
  misc_feature (1)..(47): Homolog of NCBI NO: 19335714 NR Description: probable transport protein Sec61 alpha subunit
  misc_feature (1)..(47): Homolog of NCBI NO: 6581004 NR Description: putative integral membrane protein [Phaseolus
MPIILHSALITNLYFISQLLYRKYSGNFLVNLLGMWKESEYSGHSSSCWWSCLLCNCPIKFG

SEQ ID NO: 19712 - protein, 50 aa, Zea mays subsp. mays
  peptide (1)..(50): Ceres Seq. ID no. 11403621
  misc_feature (2)..(49): Homolog of NCBI NO: 10946604 NR Description: SEC61, alpha subunit 2 (S. cerevisiae); Sec61
  misc_feature (2)..(49): Homolog of NCBI NO: 19335712 NR Description: probable transport protein Sec61 alpha subunit
  misc_feature (2)..(49): Homolog of NCBI NO: 10434149 NR Description: unnamed protein product [Homo sapiens]
  misc_feature (2)..(49): Homolog of NCBI NO: 12230618 NR Description: Protein transport protein Sec61 alpha subunit
  misc_feature (2)..(49): Homolog of NCBI NO: 20071555 NR Description: Similar to Sec61 alpha form 2 [Homo sapiens]
  misc_feature (2)..(49): Homolog of NCBI NO: 14861602 NR Description: probable transport protein Sec61 alpha subunit
  misc_feature (2)..(49): Homolog of NCBI NO: 13173171 NR Description: putative transport protein Sec61 alpha subunit
  misc_feature (2)..(49): Homolog of NCBI NO: 19920826 NR Description: CG9539-PA [Drosophila melanogaster]
  misc_feature (2)..(49): Homolog of NCBI NO: 19335714 NR Description: probable transport protein Sec61 alpha subunit
  misc_feature (1)..(50): Homolog of NCBI NO: 6581004 NR Description: putative integral membrane protein [Phaseolus
ITRTDKVRALREAFYRQNLPNVTNLLATVLVFLIVIYFRGFRVVLPVRSK

SEQ ID NO: 19713 - DNA, 550 bp, Zea mays subsp. mays
  misc_feature (1)..(550): Ceres Seq. ID no. 13492331
  misc_feature: MA Experiment ID: 108543 Result: Up-regulated in Transcription
  misc_feature: MA Experiment ID: 108544 Result: Up-regulated in Transcription
  misc_feature: MA Experiment ID: 20000488 Result: Down-regulated in Transcription
  misc_feature: MA Experiment 20000488 PARAMETER Experiment Name: Zm_50mM_NH4NO3_L_to_H_P Parameter: Organism Value: Zea mays
  misc_feature: MA Experiment 20000488 PARAMETER Experiment Name: Zm_50mM_NH4NO3_L_to_H_P Parameter: Timepoint (hr) Value: 8
  misc_feature: MA Experiment 20000488 PARAMETER Experiment Name: Zm_50mM_NH4NO3_L_to_H_P Parameter: Tissue Value: Leaves
  misc_feature: MA Experiment 20000488 PARAMETER Experiment Name: Zm_50mM_NH4NO3_L_to_H_P Parameter: Treatment Value: 50mM NH4NO3 vs. 100mM Mannitol
gtctttgatgacattggtgacattgacaaagctgttgaatggaccatgtttgggatcttcgcgaatgctggtcaagtctgcagtgctacttctcgtttactgctgcatgagaaaattgcaaagaaattcttggatagattggttgcatgggcaaagaatataaaagtctcagatccactggaggaaggctgcagactgggttcagttatcagtgaaggacagtatgagaagataaagaaattcatctcgactgcaagaagtgaaggtgccacaattctgtatggaggtggccgaccacagcatctcagaagagggttctttcttgaacctacaattataacagatgttagtacgtcaatgcaaatttggcaagaggaagtctttggaccagtcatctgtgttaaggagtttaggacagagagtgaagctgtggaacttgcaaatgatactcactatggtttagctggtgccgtgatctccaatgatcaagagaggtgtgagcgcatttcaaaggctcttcactctggtattatttggataaattgctcgc

SEQ ID NO: 19714 - protein, 183 aa, Zea mays subsp. mays
  peptide (1)..(183): Ceres Seq. ID no. 13492332
  misc_feature (1)..(182): Homolog of NCBI NO: 40850676 NR Description: betaine-aldehyde dehydrogenase [Gossypium
  misc_feature (1)..(182): Homolog of NCBI NO: 15147871 NR Description: betaine aldehyde dehydrogenase [Hordeum vulgare
  misc_feature (1)..(182): Homolog of NCBI NO: 34904988 NR Description: P0456B03.1 [Oryza sativa (japonica
  misc_feature (1)..(182): Homolog of NCBI NO: 30698520 NR Description: betaine aldehyde dehydrogenase
  misc_feature (1)..(182): Homolog of NCBI NO: 21747870 NR Description: betaine-aldehyde dehydrogenase [Triticum aestivum]
  misc_feature (2)..(182): Homolog of NCBI NO: 2494073 NR Description: Betaine-aldehyde dehydrogenase (BADH)
  misc_feature (1)..(182): Homolog of NCBI NO: 7431476 NR Description: betaine-aldehyde dehydrogenase (EC 1.2.1.8) -
  misc_feature (1)..(182): Homolog of NCBI NO: 15147873 NR Description: betaine aldehyde dehydrogenase [Hordeum vulgare
  misc_feature (1)..(182): Homolog of NCBI NO: 3913464 NR Description: Betaine-aldehyde dehydrogenase (BADH)
  misc_feature (1)..(182): Homolog of NCBI NO: 17017285 NR Description: betaine aldehyde dehydrogenase [Zea mays]
VFDDIGDIDKAVEWTMFGIFANAGQVCSATSRLLLHEKIAKKFLDRLVAWAKNIKVSDPLEEGCRLGSVISEGQYEKIKKFISTARSEGATILYGGGRPQHLRRGFFLEPTIITDVSTSMQIWQEEVFGPVICVKEFRTESEAVELANDTHYGLAGAVISNDQERCERISKALHSGIIWINCS

SEQ ID NO: 19715 - protein, 168 aa, Zea mays subsp. mays
  peptide (1)..(168): Ceres Seq. ID no. 13492333
  misc_feature (1)..(167): Homolog of NCBI NO: 40850676 NR Description: betaine-aldehyde dehydrogenase [Gossypium
  misc_feature (1)..(167): Homolog of NCBI NO: 15147871 NR Description: betaine aldehyde dehydrogenase [Hordeum vulgare
  misc_feature (1)..(167): Homolog of NCBI NO: 34904988 NR Description: P0456B03.1 [Oryza sativa (japonica
  misc_feature (1)..(167): Homolog of NCBI NO: 30698520 NR Description: betaine aldehyde dehydrogenase
  misc_feature (1)..(167): Homolog of NCBI NO: 21747870 NR Description: betaine-aldehyde dehydrogenase [Triticum aestivum]
  misc_feature (1)..(167): Homolog of NCBI NO: 2494073 NR Description: Betaine-aldehyde dehydrogenase (BADH)
  misc_feature (1)..(167): Homolog of NCBI NO: 7431476 NR Description: betaine-aldehyde dehydrogenase (EC 1.2.1.8) -
  misc_feature (1)..(167): Homolog of NCBI NO: 15147873 NR Description: betaine aldehyde dehydrogenase [Hordeum vulgare
  misc_feature (1)..(167): Homolog of NCBI NO: 3913464 NR Description: Betaine-aldehyde dehydrogenase (BADH)
  misc_feature (1)..(167): Homolog of NCBI NO: 17017285 NR Description: betaine aldehyde dehydrogenase [Zea mays]
MFGIFANAGQVCSATSRLLLHEKIAKKFLDRLVAWAKNIKVSDPLEEGCRLGSVISEGQYEKIKKFISTARSEGATILYGGGRPQHLRRGFFLEPTIITDVSTSMQIWQEEVFGPVICVKEFRTESEAVELANDTHYGLAGAVISNDQERCERISKALHSGIIWINCS

SEQ ID NO: 19716 - DNA, 947 bp, Zea mays subsp. mays; identical to SEQ ID NO: 18797
  misc_feature (1)..(947): Ceres Seq. ID no. 12633396
  misc_feature: MA Experiment ID: 108544 Result: Down-regulated in Transcription
  misc_feature: MA Experiment ID: 20000477 Result: Down-regulated in Transcription
  misc_feature: MA Experiment 20000477 PARAMETER Experiment Name: Zm_5mM_SA_P Parameter: Age (day) Value: 10
  misc_feature: MA Experiment 20000477 PARAMETER Experiment Name: Zm_5mM_SA_P Parameter: Organism Value: Zea mays
  misc_feature: MA Experiment 20000477 PARAMETER Experiment Name: Zm_5mM_SA_P Parameter: Plant Line Value: 35A19
  misc_feature: MA Experiment 20000477 PARAMETER Experiment Name: Zm_5mM_SA_P Parameter: Timepoint (hr) Value: 48
  misc_feature: MA Experiment 20000477 PARAMETER Experiment Name: Zm_5mM_SA_P Parameter: Tissue Value: Aerial
  misc_feature: MA Experiment 20000477 PARAMETER Experiment Name: Zm_5mM_SA_P Parameter: Treatment Value: 5mM SA vs. No Treatment
  misc_feature: MA Experiment ID: 20000478 Result: Down-regulated in Transcription
  misc_feature: MA Experiment 20000478 PARAMETER Experiment Name: Zm_5mM_SA_P Parameter: Age (day) Value: 11
  misc_feature: MA Experiment 20000478 PARAMETER Experiment Name: Zm_5mM_SA_P Parameter: Organism Value: Zea mays
  misc_feature: MA Experiment 20000478 PARAMETER Experiment Name: Zm_5mM_SA_P Parameter: Plant Line Value: 35A19
  misc_feature: MA Experiment 20000478 PARAMETER Experiment Name: Zm_5mM_SA_P Parameter: Timepoint (hr) Value: 72
  misc_feature: MA Experiment 20000478 PARAMETER Experiment Name: Zm_5mM_SA_P Parameter: Tissue Value: Aerial
  misc_feature: MA Experiment 20000478 PARAMETER Experiment Name: Zm_5mM_SA_P Parameter: Treatment Value: 5mM SA vs. No Treatment
  misc_feature: MA Experiment ID: 20000487 Result: Down-regulated in Transcription
  misc_feature: MA Experiment 20000487 PARAMETER Experiment Name: Zm_50mM_NH4NO3_L_to_H_P Parameter: Organism Value: Zea mays
  misc_feature: MA Experiment 20000487 PARAMETER Experiment Name: Zm_50mM_NH4NO3_L_to_H_P Parameter: Timepoint (hr) Value: 4
  misc_feature: MA Experiment 20000487 PARAMETER Experiment Name: Zm_50mM_NH4NO3_L_to_H_P Parameter: Tissue Value: Leaves
  misc_feature: MA Experiment 20000487 PARAMETER Experiment Name: Zm_50mM_NH4NO3_L_to_H_P Parameter: Treatment Value: 50mM NH4NO3 vs. 100mM Mannitol
  misc_feature: MA Experiment ID: 20000632 Result: Down-regulated in Transcription
  misc_feature: MA Experiment 20000632 PARAMETER Experiment Name: Zm_Herbicide-Treatments_P Parameter: Timepoint (hr) Value: 4
  misc_feature: MA Experiment 20000632 PARAMETER Experiment Name: Zm_Herbicide-Treatments_P Parameter: Tissue Value: Aerial
  misc_feature: MA Experiment 20000632 PARAMETER Experiment Name: Zm_Herbicide-Treatments_P Parameter: Treatment Value: Glean vs. No Treatment

SEQ ID NO: 19717 - protein, 86 aa, Zea mays subsp. mays; identical to SEQ ID NO: 18798
  peptide (1)..(86): Ceres Seq. ID no. 12633397
  misc_feature (1)..(75): Homolog of NCBI NO: 18424054 NR Description: ubiquitin-specific protease 23 (UBP23), putative
  misc_feature (1)..(75): Homolog of NCBI NO: 11993486 NR Description: ubiquitin-specific protease 23 [Arabidopsis
  misc_feature (1)..(75): Homolog of NCBI NO: 9758368 NR Description: contains similarity to deubiquitinating
  misc_feature (1)..(86): Homolog of NCBI NO: 29367503 NR Description: putative ubiquitin-specific protease
  misc_feature (1)..(75): Homolog of NCBI NO: 18424054 NR Description: ubiquitin-specific protease 23 (UBP23), putative
  misc_feature (1)..(75): Homolog of NCBI NO: 11993486 NR Description: ubiquitin-specific protease 23 [Arabidopsis
  misc_feature (1)..(75): Homolog of NCBI NO: 9758368 NR Description: contains similarity to deubiquitinating
  misc_feature (1)..(86): Homolog of NCBI NO: 29367503 NR Description: putative ubiquitin-specific protease

SEQ ID NO: 19718 - protein, 82 aa, Zea mays subsp. mays; identical to SEQ ID NO: 18799
  peptide (1)..(82): Ceres Seq. ID no. 12633398

SEQ ID NO: 19719 - protein, 50 aa, Zea mays subsp. mays; identical to SEQ ID NO: 18800
  peptide (1)..(50): Ceres Seq. ID no. 12633399

SEQ ID NO: 19720 - DNA, 1283 bp, Zea mays subsp. mays; identical to SEQ ID NO: 9558
  misc_feature (1)..(1283): Ceres Seq. ID no. 13494816
  misc_feature: MA Experiment ID: 108504 Result: Down-regulated in Transcription
  misc_feature: MA Experiment 108504 PARAMETER Experiment Name: Zm_Drought_P Parameter: Age (day) Value: 8
  misc_feature: MA Experiment 108504 PARAMETER Experiment Name: Zm_Drought_P Parameter: Organism Value: Zea mays
  misc_feature: MA Experiment 108504 PARAMETER Experiment Name: Zm_Drought_P Parameter: Plant Line Value: 35A19
  misc_feature: MA Experiment 108504 PARAMETER Experiment Name: Zm_Drought_P Parameter: Timepoint (hr) Value: 12
  misc_feature: MA Experiment 108504 PARAMETER Experiment Name: Zm_Drought_P Parameter: Tissue Value: Aerial
  misc_feature: MA Experiment 108504 PARAMETER Experiment Name: Zm_Drought_P Parameter: Treatment Value: Drought vs. No Drought
  misc_feature: MA Experiment ID: 108527 Result: Down-regulated in Transcription
  misc_feature: MA Experiment 108527 PARAMETER Experiment Name: Zm_5mM_NO_P Parameter: Age (day) Value: 8
  misc_feature: MA Experiment 108527 PARAMETER Experiment Name: Zm_5mM_NO_P Parameter: Organism Value: Zea mays
  misc_feature: MA Experiment 108527 PARAMETER Experiment Name: Zm_5mM_NO_P Parameter: Plant Line Value: 35A19
  misc_feature: MA Experiment 108527 PARAMETER Experiment Name: Zm_5mM_NO_P Parameter: Timepoint (hr) Value: 6
  misc_feature: MA Experiment 108527 PARAMETER Experiment Name: Zm_5mM_NO_P Parameter: Tissue Value: Aerial
  misc_feature: MA Experiment 108527 PARAMETER Experiment Name: Zm_5mM_NO_P Parameter: Treatment Value: 5mM NO vs. No Treatment
  misc_feature: MA Experiment ID: 20000480 Result: Down-regulated in Transcription
  misc_feature: MA Experiment 20000480 PARAMETER Experiment Name: Zm_Drought_P Parameter: Age (day) Value: 11
  misc_feature: MA Experiment 20000480 PARAMETER Experiment Name: Zm_Drought_P Parameter: Organism Value: Zea mays
  misc_feature: MA Experiment 20000480 PARAMETER Experiment Name: Zm_Drought_P Parameter: Plant Line Value: 35A19
  misc_feature: MA Experiment 20000480 PARAMETER Experiment Name: Zm_Drought_P Parameter: Timepoint (hr) Value: 72
  misc_feature: MA Experiment 20000480 PARAMETER Experiment Name: Zm_Drought_P Parameter: Tissue Value: Aerial
  misc_feature: MA Experiment 20000480 PARAMETER Experiment Name: Zm_Drought_P Parameter: Treatment Value: Drought vs. No Drought

SEQ ID NO: 19721 - protein, 234 aa, Zea mays subsp. mays; identical to SEQ ID NO: 9559
  peptide (1)..(234): Ceres Seq. ID no. 13494817
  misc_feature (9)..(84): Pfam Name: Uncharacterized protein family UPF0016 Pfam Description: Uncharacterized protein family UPF0016
  misc_feature (4)..(228): Homolog of NCBI NO: 15221462 NR Description: transmembrane protein -related [Arabidopsis
  misc_feature (4)..(231): Homolog of NCBI NO: 15222613 NR Description: transmembrane protein -related [Arabidopsis
  misc_feature (4)..(231): Homolog of NCBI NO: 21593636 NR Description: transmembrane protein, putative [Arabidopsis
  misc_feature (1)..(231): Homolog of NCBI NO: 6755853 NR Description: TPA regulated locus [Mus musculus]
  misc_feature (1)..(231): Homolog of NCBI NO: 7684611 NR Description: TPARDL [Mus musculus]
  misc_feature (1)..(231): Homolog of NCBI NO: 21357589 NR Description: CG4196-PC [Drosophila melanogaster]
  misc_feature (1)..(174): Homolog of NCBI NO: 34877387 NR Description: similar to probable transmembrane protein FT27 -
  misc_feature (170)..(231): Homolog of NCBI NO: 34877387 NR Description: similar to probable transmembrane protein FT27 -
  misc_feature (4)..(226): Homolog of NCBI NO: 17556152 NR Description: Uncharacterized protein family UPF0016 (32.1 kD) elegans] >gi|13491294|gb|AAK27882.1| Hypothetical protein
  misc_feature (2)..(230): Homolog of NCBI NO: 18421551 NR Description: transmembrane protein FT27/PFT27-related

SEQ ID NO: 19722 - protein, 220 aa, Zea mays subsp. mays; identical to SEQ ID NO: 9560
  peptide (1)..(220): Ceres Seq. ID no. 13494818
  misc_feature (1)..(70): Pfam Name: Uncharacterized protein family UPF0016 Pfam Description: Uncharacterized protein family UPF0016
  misc_feature (1)..(214): Homolog of NCBI NO: 15221462 NR Description: transmembrane protein -related [Arabidopsis
  misc_feature (1)..(217): Homolog of NCBI NO: 15222613 NR Description: transmembrane protein -related [Arabidopsis
  misc_feature (1)..(217): Homolog of NCBI NO: 21593636 NR Description: transmembrane protein, putative [Arabidopsis
  misc_feature (1)..(217): Homolog of NCBI NO: 6755853 NR Description: TPA regulated locus [Mus musculus]
  misc_feature (1)..(217): Homolog of NCBI NO: 7684611 NR Description: TPARDL [Mus musculus]
  misc_feature (1)..(217): Homolog of NCBI NO: 21357589 NR Description: CG4196-PC [Drosophila melanogaster]
  misc_feature (1)..(160): Homolog of NCBI NO: 34877387 NR Description: similar to probable transmembrane protein FT27 -
  misc_feature (156)..(217): Homolog of NCBI NO: 34877387 NR Description: similar to probable transmembrane protein FT27 -
  misc_feature (1)..(212): Homolog of NCBI NO: 17556152 NR Description: Uncharacterized protein family UPF0016 (32.1 kD) elegans] >gi|13491294|gb|AAK27882.1| Hypothetical protein
  misc_feature (1)..(216): Homolog of NCBI NO: 18421551 NR Description: transmembrane protein FT27/PFT27-related

SEQ ID NO: 19723 - protein, 201 aa, Zea mays subsp. mays; identical to SEQ ID NO: 9561
  peptide (1)..(201): Ceres Seq. ID no. 13494819
  misc_feature (1)..(51): Pfam Name: Uncharacterized protein family UPF0016 Pfam Description: Uncharacterized protein family UPF0016
  misc_feature (1)..(195): Homolog of NCBI NO: 15221462 NR Description: transmembrane protein -related [Arabidopsis
  misc_feature (1)..(198): Homolog of NCBI NO: 15222613 NR Description: transmembrane protein -related [Arabidopsis
  misc_feature (1)..(198): Homolog of NCBI NO: 21593636 NR Description: transmembrane protein, putative [Arabidopsis
  misc_feature (1)..(198): Homolog of NCBI NO: 6755853 NR Description: TPA regulated locus [Mus musculus]
  misc_feature (1)..(198): Homolog of NCBI NO: 7684611 NR Description: TPARDL [Mus musculus]
  misc_feature (1)..(198): Homolog of NCBI NO: 21357589 NR Description: CG4196-PC [Drosophila melanogaster]
  misc_feature (1)..(141): Homolog of NCBI NO: 34877387 NR Description: similar to probable transmembrane protein FT27 -
  misc_feature (137)..(198): Homolog of NCBI NO: 34877387 NR Description: similar to probable transmembrane protein FT27 -
  misc_feature (1)..(193): Homolog of NCBI NO: 17556152 NR Description: Uncharacterized protein family UPF0016 (32.1 kD) elegans] >gi|13491294|gb|AAK27882.1| Hypothetical protein
  misc_feature (1)..(197): Homolog of NCBI NO: 18421551 NR Description: transmembrane protein FT27/PFT27-related

SEQ ID NO: 19724 - DNA, 477 bp, Zea mays subsp. mays
  misc_feature (1)..(477): Ceres Seq. ID no. 2084255
  misc_feature: MA Experiment ID: 108528 Result: Down-regulated in Transcription
  misc_feature: MA Experiment 108528 PARAMETER Experiment Name: Zm_Imbibed_Seeds_P Parameter: Age (day) Value: 5 vs. 2
  misc_feature: MA Experiment 108528 PARAMETER Experiment Name: Zm_Imbibed_Seeds_P Parameter: Organism Value: Zea mays
  misc_feature: MA Experiment 108528 PARAMETER Experiment Name: Zm_Imbibed_Seeds_P Parameter: Plant Line Value: 35A19
  misc_feature: MA Experiment 108528 PARAMETER Experiment Name: Zm_Imbibed_Seeds_P Parameter: Tissue Value: Aerial vs. Embryo
  misc_feature: MA Experiment ID: 108597 Result: Up-regulated in Transcription
  misc_feature: MA Experiment 108597 PARAMETER Experiment Name: Zm_100uM_ABA_P Parameter: Age (day) Value: 9
  misc_feature: MA Experiment 108597 PARAMETER Experiment Name: Zm_100uM_ABA_P Parameter: Organism Value: Zea mays
  misc_feature: MA Experiment 108597 PARAMETER Experiment Name: Zm_100uM_ABA_P Parameter: Plant Line Value: 35A19
  misc_feature: MA Experiment 108597 PARAMETER Experiment Name: Zm_100uM_ABA_P Parameter: Timepoint (hr) Value: 24
  misc_feature: MA Experiment 108597 PARAMETER Experiment Name: Zm_100uM_ABA_P Parameter: Tissue Value: Aerial
  misc_feature: MA Experiment 108597 PARAMETER Experiment Name: Zm_100uM_ABA_P Parameter: Treatment Value: 100uM ABA vs. No Treatment
aaaaaaattcggtcccttcgtcctctactcctctagtcctctcggctcctcgcagtcgctcactgcgtgcgccaaaagcagcagcagctccagccgtcgccgtctccactctccagtctccaccactgctccgcccgcgccggatcgagggagggcaggcggacgaggaggagggatgagtctcttcgggcttggacgaaaccagaagacattccgccccaagaagagcgctccatcaggtagcaagggagcacagctccgaaagcacatagatgccactctcggcagtggaaaccttagggaagctgtgaggttgcctcctggagaggatatcaatgaatggcttgcggtgaatactgtggatttctttaaccaagttaatatgctgtatggcacactcacagaattttgcacacctgagagctgtccgacaatgacagctggcccaaagtacgagtacagatgggctgatgggtg

SEQ ID NO: 19725 - protein, 158 aa, Zea mays subsp. mays
  peptide (1)..(158): Ceres Seq. ID no. 2084256
  misc_feature (87)..(157): Pfam Name: Mob1/phocein family Pfam Description: Mob1/phocein family
  misc_feature (61)..(157): Homolog of NCBI NO: 28277885 NR Description: Similar to hypothetical protein LOC92597 [Danio
  misc_feature (61)..(157): Homolog of NCBI NO: 27735029 NR Description: hypothetical protein LOC92597 [Homo sapiens]
  misc_feature (81)..(157): Homolog of NCBI NO: 10800806 NR Description: hypothetical protein [Cicer arietinum]
  misc_feature (66)..(157): Homolog of NCBI NO: 37534032 NR Description: putative F-box protein family
  misc_feature (67)..(157): Homolog of NCBI NO: 15234110 NR Description: putative protein; protein id: At4g19050.1
  misc_feature (59)..(157): Homolog of NCBI NO: 19309913 NR Description: Mob1-like protein [Medicago sativa subsp. falcata]
  misc_feature (59)..(157): Homolog of NCBI NO: 26449776 NR Description: unknown protein [Arabidopsis thaliana]
  misc_feature (59)..(157): Homolog of NCBI NO: 32470654 NR Description: unknown [Solanum bulbocastanum]
  misc_feature (59)..(157): Homolog of NCBI NO: 15242430 NR Description: putative protein
  misc_feature (59)..(157): Homolog of NCBI NO: 32470635 NR Description: putative Mob1/phocein family protein [Solanum
KKFGPFVLYSSSPLGSSQSLTACAKSSSSSSRRRLHSPVSTTAPPAPDRGRAGGRGGGMSLFGLGRNQKTFRPKKSAPSGSKGAQLRKHIDATLGSGNLREAVRLPPGEDINEWLAVNTVDFFNQVNMLYGTLTEFCTPESCPTMTAGPKYEYRWADG

SEQ ID NO: 19726 - protein, 100 aa, Zea mays subsp. mays
  peptide (1)..(100): Ceres Seq. ID no. 2084257
  misc_feature (29)..(99): Pfam Name: Mob1/phocein family Pfam Description: Mob1/phocein family
  misc_feature (3)..(99): Homolog of NCBI NO: 28277885 NR Description: Similar to hypothetical protein LOC92597 [Danio
  misc_feature (3)..(99): Homolog of NCBI NO: 27735029 NR Description: hypothetical protein LOC92597 [Homo sapiens]
  misc_feature (23)..(99): Homolog of NCBI NO: 10800806 NR Description: hypothetical protein [Cicer arietinum]
  misc_feature (8)..(99): Homolog of NCBI NO: 37534032 NR Description: putative F-box protein family
  misc_feature (9)..(99): Homolog of NCBI NO: 15234110 NR Description: putative protein; protein id: At4g19050.1
  misc_feature (1)..(99): Homolog of NCBI NO: 19309913 NR Description: Mob1-like protein [Medicago sativa subsp. falcata]
  misc_feature (1)..(99): Homolog of NCBI NO: 26449776 NR Description: unknown protein [Arabidopsis thaliana]
  misc_feature (1)..(99): Homolog of NCBI NO: 32470654 NR Description: unknown [Solanum bulbocastanum]
  misc_feature (1)..(99): Homolog of NCBI NO: 15242430 NR Description: putative protein
  misc_feature (1)..(99): Homolog of NCBI NO: 32470635 NR Description: putative Mob1/phocein family protein [Solanum
MSLFGLGRNQKTFRPKKSAPSGSKGAQLRKHIDATLGSGNLREAVRLPPGEDINEWLAVNTVDFFNQVNMLYGTLTEFCTPESCPTMTAGPKYEYRWADG

SEQ ID NO: 19727 - DNA, 730 bp, Zea mays subsp. mays
  misc_feature (1)..(730): Ceres Seq. ID no. 13492334
  misc_feature: MA Experiment ID: 108522 Result: Up-regulated in Transcription
  misc_feature: MA Experiment 108522 PARAMETER Experiment Name: Zm_42deg_Heat_P Parameter: Age (day) Value: 8
  misc_feature: MA Experiment 108522 PARAMETER Experiment Name: Zm_42deg_Heat_P Parameter: Organism Value: Zea mays
  misc_feature: MA Experiment 108522 PARAMETER Experiment Name: Zm_42deg_Heat_P Parameter: Plant Line Value: 35A19
  misc_feature: MA Experiment 108522 PARAMETER Experiment Name: Zm_42deg_Heat_P Parameter: Temperature (deg C) Value: 42 vs. 22
  misc_feature: MA Experiment 108522 PARAMETER Experiment Name: Zm_42deg_Heat_P Parameter: Timepoint (hr) Value: 1
  misc_feature: MA Experiment 108522 PARAMETER Experiment Name: Zm_42deg_Heat_P Parameter: Tissue Value: Aerial
  misc_feature: MA Experiment ID: 108523 Result: Up-regulated in Transcription
  misc_feature: MA Experiment 108523 PARAMETER Experiment Name: Zm_42deg_Heat_P Parameter: Age (day) Value: 8
  misc_feature: MA Experiment 108523 PARAMETER Experiment Name: Zm_42deg_Heat_P Parameter: Organism Value: Zea mays
  misc_feature: MA Experiment 108523 PARAMETER Experiment Name: Zm_42deg_Heat_P Parameter: Plant Line Value: 35A19
  misc_feature: MA Experiment 108523 PARAMETER Experiment Name: Zm_42deg_Heat_P Parameter: Temperature (deg C) Value: 42 vs. 22
  misc_feature: MA Experiment 108523 PARAMETER Experiment Name: Zm_42deg_Heat_P Parameter: Timepoint (hr) Value: 6
  misc_feature: MA Experiment 108523 PARAMETER Experiment Name: Zm_42deg_Heat_P Parameter: Tissue Value: Aerial
cgaatgatcttaaaaccacagatgttctggatcgttgcttcatggagctgctgaaagccataaacagcagtctgaatgatttgaagaaactgcaacagaaaatagaacagcaaaagaagaaacagcaacagcagaagaagcagcaacagaagcaacagcaattgcaaaaacagccagaacattatattcaagctctgattgcactggaaatagaacttaaaaataaactgtctatacttggtctgatgccatcttcatctttggcagaggtactgaagcaattgaaggacaaagcactaaagagagcggggctgactgaagaaaaattgcaagagcagattgagcagagaaacgttgcaaggaagaataaacagtttgagatatctgatggaatcaggaaaaaccttgctaccaagggcatcgccctgatggatgaaccttctggtacagtgtggagaccatgcgaaccagaggggccgcacccactcaacaaatgatggtaaaatgagatttttgcctgagggcagctacacattttgaactaacaaaatcaccatctctggatgcagtattcttcactcaggggtagggggtccaggttgactcgccagtcgccagttgaaacttgcatttctggttgtgtaagaagcaatggaccccatatatatactttactccttgcgaggtttgagttttggttttggatataagacttggcaattccatttca

SEQ ID NO: 19728 - protein, 164 aa, Zea mays subsp. mays
  peptide (1)..(164): Ceres Seq. ID no. 13492335
  misc_feature (7)..(156): Homolog of NCBI NO: 15241557 NR Description: cysteine-tRNA ligase -related protein
  misc_feature (7)..(156): Homolog of NCBI NO: 9758060 NR Description: cysteine-tRNA ligase [Arabidopsis thaliana]
  misc_feature (26)..(156): Homolog of NCBI NO: 15228880 NR Description: cysteine-tRNA ligase-related protein [Arabidopsis
  misc_feature (63)..(156): Homolog of NCBI NO: 25293240 NR Description: probable cysteinyl-tRNA synthetase
  misc_feature (63)..(156): Homolog of NCBI NO: 18402580 NR Description: cysteinyl-tRNA synthetase -related [Arabidopsis
  misc_feature (22)..(157): Homolog of NCBI NO: 37535144 NR Description: putative cysteinyl-tRNA synthetase
NDLKTTDVLDRCFMELLKAINSSLNDLKKLQQKIEQQKKKQQQQKKQQQKQQQLQKQPEHYIQALIALEIELKNKLSILGLMPSSSLAEVLKQLKDKALKRAGLTEEKLQEQIEQRNVARKNKQFEISDGIRKNLATKGIALMDEPSGTVWRPCEPEGPHPLNK

SEQ ID NO: 19729 - protein, 151 aa, Zea mays subsp. mays
  peptide (1)..(151): Ceres Seq. ID no. 13492336
  misc_feature (1)..(143): Homolog of NCBI NO: 15241557 NR Description: cysteine-tRNA ligase -related protein
  misc_feature (1)..(143): Homolog of NCBI NO: 9758060 NR Description: cysteine-tRNA ligase [Arabidopsis thaliana]
  misc_feature (13)..(143): Homolog of NCBI NO: 15228880 NR Description: cysteine-tRNA ligase-related protein [Arabidopsis
  misc_feature (50)..(143): Homolog of NCBI NO: 25293240 NR Description: probable cysteinyl-tRNA synthetase
  misc_feature (50)..(143): Homolog of NCBI NO: 18402580 NR Description: cysteinyl-tRNA synthetase -related [Arabidopsis
  misc_feature (9)..(144): Homolog of NCBI NO: 37535144 NR Description: putative cysteinyl-tRNA synthetase
MELLKAINSSLNDLKKLQQKIEQQKKKQQQQKKQQQKQQQLQKQPEHYIQALIALEIELKNKLSILGLMPSSSLAEVLKQLKDKALKRAGLTEEKLQEQIEQRNVARKNKQFEISDGIRKNLATKGIALMDEPSGTVWRPCEPEGPHPLNK

SEQ ID NO: 19730 - protein, 83 aa, Zea mays subsp. mays
  peptide (1)..(83): Ceres Seq. ID no. 13492337
  misc_feature (1)..(75): Homolog of NCBI NO: 15241557 NR Description: cysteine-tRNA ligase -related protein
  misc_feature (1)..(75): Homolog of NCBI NO: 9758060 NR Description: cysteine-tRNA ligase [Arabidopsis thaliana]
  misc_feature (1)..(75): Homolog of NCBI NO: 15228880 NR Description: cysteine-tRNA ligase-related protein [Arabidopsis
  misc_feature (1)..(75): Homolog of NCBI NO: 25293240 NR Description: probable cysteinyl-tRNA synthetase
  misc_feature (1)..(75): Homolog of NCBI NO: 18402580 NR Description: cysteinyl-tRNA synthetase -related [Arabidopsis
  misc_feature (1)..(76): Homolog of NCBI NO: 37535144 NR Description: putative cysteinyl-tRNA synthetase
MPSSSLAEVLKQLKDKALKRAGLTEEKLQEQIEQRNVARKNKQFEISDGIRKNLATKGIALMDEPSGTVWRPCEPEGPHPLNK

SEQ ID NO: 19731 - DNA, 935 bp, Zea mays subsp. mays
  misc_feature (1)..(935): Ceres Seq. ID no. 12636872
  misc_feature: MA Experiment ID: 20000488 Result: Up-regulated in Transcription
  misc_feature: MA Experiment 20000488 PARAMETER Experiment Name: Zm_50mM_NH4NO3_L_to_H_P Parameter: Organism Value: Zea mays
  misc_feature: MA Experiment 20000488 PARAMETER Experiment Name: Zm_50mM_NH4NO3_L_to_H_P Parameter: Timepoint (hr) Value: 8
  misc_feature: MA Experiment 20000488 PARAMETER Experiment Name: Zm_50mM_NH4NO3_L_to_H_P Parameter: Tissue Value: Leaves
  misc_feature: MA Experiment 20000488 PARAMETER Experiment Name: Zm_50mM_NH4NO3_L_to_H_P Parameter: Treatment Value: 50mM NH4NO3 vs. 100mM Mannitol
aaaacttcgcagtcagcatctggactctggagtctgttgtctgcgtgtgtgcggctggttctctctgccaccgcacgagtcgcagcagagagggaaaaaccctagcagcctcccttcgtcccaactcccaaccccgcgaccccatggccgcatctaacggcggcggcggccccggcccgatctccgcagaggcggcgcttggagaggctatcaagctggtgttcgggcggtggacggcgctgcagatggcggtggagaaccagtggggcggccgcgactcccgcgccaaggccgaccagttgggcgagtccatcctattctggttctgccgcactaagggtccatattatttcgaagacttggttgatatgatgtatgacaaaatttctgaatcttttaatgcctactttgaggataatagtattgaggaggttgctgaacagtttttgatcatacatgaagaatgcctgcaaaacaacttttcgtctatagagaagctaaggaattctcgtgttccggggaatgctgtttctcaaagtagacagatagtgggcgatgacgacgatgacagtgatagctcagatgacggtgatgacacatcgatggtggctgatgaagaggctgggccagaagagatggcagtggacagaccaaggccccccaagcctactccagacgccgatgggtggactgttgtgcctcctaggcgtggtggtcgcagcaagaaatagagtacaatggtagctgctggctttctcgcggaatgtttgttgagtgctgcggttccatattcacttgtatcgctcgatatttgacacgacatggatgttgagtgtgtagtatgatgcttggtttgccaccgcccaccaatttggtgtaaacaaggtaattattatagatgcatcctgtgatcaggttttgagtgttgcagagtc

SEQ ID NO: 19732 - protein, 242 aa, Zea mays subsp. mays
  peptide (1)..(242): Ceres Seq. ID no. 12636873
  misc_feature (67)..(232): Homolog of NCBI NO: 27708338 NR Description: similar to hypothetical protein DT1P1A10
  misc_feature (67)..(232): Homolog of NCBI NO: 30424736 NR Description: RIKEN cDNA 2310007F12 [Mus musculus]
  misc_feature (67)..(232): Homolog of NCBI NO: 19483873 NR Description: Similar to hypothetical protein DT1P1A10 [Mus
  misc_feature (45)..(216): Homolog of NCBI NO: 40745755 NR Description: hypothetical protein AN2079.2 [Aspergillus
  misc_feature (77)..(232): Homolog of NCBI NO: 24308388 NR Description: hypothetical protein DT1P1A10 [Homo sapiens]
  misc_feature (61)..(232): Homolog of NCBI NO: 27545344 NR Description: hypothetical protein DT1P1A10 (human) - like
  misc_feature (64)..(211): Homolog of NCBI NO: 23613422 NR Description: hypothetical protein [Plasmodium falciparum 3D7]
  misc_feature (60)..(236): Homolog of NCBI NO: 15241108 NR Description: putative protein
  misc_feature (67)..(232): Homolog of NCBI NO: 27708338 NR Description: similar to hypothetical protein DT1P1A10
  misc_feature (67)..(232): Homolog of NCBI NO: 30424736 NR Description: RIKEN cDNA 2310007F12 [Mus musculus]
  misc_feature (67)..(232): Homolog of NCBI NO: 19483873 NR Description: Similar to hypothetical protein DT1P1A10 [Mus
  misc_feature (45)..(216): Homolog of NCBI NO: 40745755 NR Description: hypothetical protein AN2079.2 [Aspergillus
  misc_feature (77)..(232): Homolog of NCBI NO: 24308388 NR Description: hypothetical protein DT1P1A10 [Homo sapiens]
  misc_feature (61)..(232): Homolog of NCBI NO: 27545344 NR Description: hypothetical protein DT1P1A10 (human) - like
  misc_feature (64)..(211): Homolog of NCBI NO: 23613422 NR Description: hypothetical protein [Plasmodium falciparum 3D7]
  misc_feature (60)..(236): Homolog of NCBI NO: 15241108 NR Description: putative protein
NFAVSIWTLESVVCVCAAGSLCHRTSRSREGKTLAASLRPNSQPRDPMAASNGGGGPGPISAEAALGEAIKLVFGRWTALQMAVENQWGGRDSRAKADQLGESILFWFCRTKGPYYFEDLVDMMYDKISESFNAYFEDNSIEEVAEQFLIIHEECLQNNFSSIEKLRNSRVPGNAVSQSRQIVGDDDDDSDSSDDGDDTSMVADEEAGPEEMAVDRPRPPKPTPDADGWTVVPPRRGGRSKK

SEQ ID NO: 19733 - protein, 195 aa, Zea mays subsp. mays
  peptide (1)..(195): Ceres Seq. ID no. 12636874
  misc_feature (20)..(185): Homolog of NCBI NO: 27708338 NR Description: similar to hypothetical protein DT1P1A10
  misc_feature (20)..(185): Homolog of NCBI NO: 30424736 NR Description: RIKEN cDNA 2310007F12 [Mus musculus]
  misc_feature (20)..(185): Homolog of NCBI NO: 19483873 NR Description: Similar to hypothetical protein DT1P1A10 [Mus
  misc_feature (1)..(169): Homolog of NCBI NO: 40745755 NR Description: hypothetical protein AN2079.2 [Aspergillus
  misc_feature (30)..(185): Homolog of NCBI NO: 24308388 NR Description: hypothetical protein DT1P1A10 [Homo sapiens]
  misc_feature (14)..(185): Homolog of NCBI NO: 27545344 NR Description: hypothetical protein DT1P1A10 (human) - like
  misc_feature (17)..(164): Homolog of NCBI NO: 23613422 NR Description: hypothetical protein [Plasmodium falciparum 3D7]
  misc_feature (13)..(189): Homolog of NCBI NO: 15241108 NR Description: putative protein
  misc_feature (20)..(185): Homolog of NCBI NO: 27708338 NR Description: similar to hypothetical protein DT1P1A10
  misc_feature (20)..(185): Homolog of NCBI NO: 30424736 NR Description: RIKEN cDNA 2310007F12 [Mus musculus]
  misc_feature (20)..(185): Homolog of NCBI NO: 19483873 NR Description: Similar to hypothetical protein DT1P1A10 [Mus
  misc_feature (1)..(169): Homolog of NCBI NO: 40745755 NR Description: hypothetical protein AN2079.2 [Aspergillus
  misc_feature (30)..(185): Homolog of NCBI NO: 24308388 NR Description: hypothetical protein DT1P1A10 [Homo sapiens]
  misc_feature (14)..(185): Homolog of NCBI NO: 27545344 NR Description: hypothetical protein DT1P1A10 (human) - like
  misc_feature (17)..(164): Homolog of NCBI NO: 23613422 NR Description: hypothetical protein [Plasmodium falciparum 3D7]
  misc_feature (13)..(189): Homolog of NCBI NO: 15241108 NR Description: putative protein
MAASNGGGGPGPISAEAALGEAIKLVFGRWTALQMAVENQWGGRDSRAKADQLGESILFWFCRTKGPYYFEDLVDMMYDKISESFNAYFEDNSIEEVAEQFLIIHEECLQNNFSSIEKLRNSRVPGNAVSQSRQIVGDDDDDSDSSDDGDDTSMVADEEAGPEEMAVDRPRPPKPTPDADGWTVVPPRRGGRSKK

SEQ ID NO: 19734 - protein, 161 aa, Zea mays subsp. mays
  peptide (1)..(161): Ceres Seq. ID no. 12636875
  misc_feature (1)..(151): Homolog of NCBI NO: 27708338 NR Description: similar to hypothetical protein DT1P1A10
  misc_feature (1)..(151): Homolog of NCBI NO: 30424736 NR Description: RIKEN cDNA 2310007F12 [Mus musculus]
  misc_feature (1)..(151): Homolog of NCBI NO: 19483873 NR Description: Similar to hypothetical protein DT1P1A10 [Mus
  misc_feature (1)..(135): Homolog of NCBI NO: 40745755 NR Description: hypothetical protein AN2079.2 [Aspergillus
  misc_feature (1)..(151): Homolog of NCBI NO: 24308388 NR Description: hypothetical protein DT1P1A10 [Homo sapiens]
  misc_feature (1)..(151): Homolog of NCBI NO: 27545344 NR Description: hypothetical protein DT1P1A10 (human) - like
  misc_feature (1)..(130): Homolog of NCBI NO: 23613422 NR Description: hypothetical protein [Plasmodium falciparum 3D7]
  misc_feature (1)..(155): Homolog of NCBI NO: 15241108 NR Description: putative protein
  misc_feature (1)..(151): Homolog of NCBI NO: 27708338 NR Description: similar to hypothetical protein DT1P1A10
  misc_feature (1)..(151): Homolog of NCBI NO: 30424736 NR Description: RIKEN cDNA 2310007F12 [Mus musculus]
  misc_feature (1)..(151): Homolog of NCBI NO: 19483873 NR Description: Similar to hypothetical protein DT1P1A10 [Mus
  misc_feature (1)..(135): Homolog of NCBI NO: 40745755 NR Description: hypothetical protein AN2079.2 [Aspergillus
  misc_feature (1)..(151): Homolog of NCBI NO: 24308388 NR Description: hypothetical protein DT1P1A10 [Homo sapiens]
  misc_feature (1)..(151): Homolog of NCBI NO: 27545344 NR Description: hypothetical protein DT1P1A10 (human) - like
  misc_feature (1)..(130): Homolog of NCBI NO: 23613422 NR Description: hypothetical protein [Plasmodium falciparum 3D7]
  misc_feature (1)..(155): Homolog of NCBI NO: 15241108 NR Description: putative protein
MAVENQWGGRDSRAKADQLGESILFWFCRTKGPYYFEDLVDMMYDKISESFNAYFEDNSIEEVAEQFLIIHEECLQNNFSSIEKLRNSRVPGNAVSQSRQIVGDDDDDSDSSDDGDDTSMVADEEAGPEEMAVDRPRPPKPTPDADGWTVVPPRRGGRSKK

SEQ ID NO: 19735 - DNA, 457 bp, Zea mays subsp. mays
  misc_feature (1)..(457): Ceres Seq. ID no. 2085619
  misc_feature: MA Experiment ID: 108522 Result: Up-regulated in Transcription
  misc_feature: MA Experiment 108522 PARAMETER Experiment Name: Zm_42deg_Heat_P Parameter: Age (day) Value: 8
  misc_feature: MA Experiment 108522 PARAMETER Experiment Name: Zm_42deg_Heat_P Parameter: Organism Value: Zea mays
  misc_feature: MA Experiment 108522 PARAMETER Experiment Name: Zm_42deg_Heat_P Parameter: Plant Line Value: 35A19
  misc_feature: MA Experiment 108522 PARAMETER Experiment Name: Zm_42deg_Heat_P Parameter: Temperature (deg C) Value: 42 vs. 22
  misc_feature: MA Experiment 108522 PARAMETER Experiment Name: Zm_42deg_Heat_P Parameter: Timepoint (hr) Value: 1
  misc_feature: MA Experiment 108522 PARAMETER Experiment Name: Zm_42deg_Heat_P Parameter: Tissue Value: Aerial
  misc_feature: MA Experiment ID: 20000534 Result: Up-regulated in Transcription
  misc_feature: MA Experiment 20000534 PARAMETER Experiment Name: Zm_Hybrid_Pollen_P Parameter: Age (day) Value: 8
  misc_feature: MA Experiment 20000534 PARAMETER Experiment Name: Zm_Hybrid_Pollen_P Parameter: Organism Value: Zea mays
  misc_feature: MA Experiment 20000534 PARAMETER Experiment Name: Zm_Hybrid_Pollen_P Parameter: Plant Line Value: 35A19
  misc_feature: MA Experiment 20000534 PARAMETER Experiment Name: Zm_Hybrid_Pollen_P Parameter: Tissue Value: Pollen vs. Aerial
taagttgtatgcatatcagatgtgccgtgcgcttgcttacatccatcgagttgtcggtgtgtgtcatcgtgatattaaacctcaaaatctactggtcaatcctcatacacatcaacttaagatttgtgattttgggagcgctaaaaaattggtccctggtgagcctaacatatcgtacatttgctcgcggtattatagggctcctgaactaatatttggagctacggagtataccactgcgatcgatatctggtctgttggctgtgtagtggctgagcttctgattggtcagcctttgtttcctggtgaaagtggtgttgaccaactggtggaaataataaagattttgggtactccaacaagagaggagatcaggtgcatgaatccaaattattccgaattcaagttccctcagataaaagcccatccatggcacaagctttttggtaagcgcatg

SEQ ID NO: 19736 - protein, 152 aa, Zea mays subsp. mays
  peptide (1)..(152): Ceres Seq. ID no. 2085620
  misc_feature (1)..(151): Pfam Name: Protein kinase domain Pfam Description: Protein kinase domain
  misc_feature (1)..(151): Homolog of NCBI NO: 15236918 NR Description: Shaggy related protein kinase tetha
  misc_feature (1)..(151): Homolog of NCBI NO: 11132756 NR Description: Shaggy-related protein kinase theta (ASK-theta)
  misc_feature (1)..(151): Homolog of NCBI NO: 33591208 NR Description: shaggy-related protein kinase 3 [Physcomitrella
  misc_feature (1)..(151): Homolog of NCBI NO: 33591214 NR Description: shaggy-related protein kinase 1 [Physcomitrella
  misc_feature (1)..(151): Homolog of NCBI NO: 33591204 NR Description: shaggy-related protein kinase 1 [Physcomitrella
  misc_feature (1)..(151): Homolog of NCBI NO: 7434277 NR Description: shaggy protein kinase (EC 2.7.1.-) 91
  misc_feature (1)..(151): Homolog of NCBI NO: 11182434 NR Description: GLYCOGEN SYNTHASE KINASE-3 HOMOLOG MSK-3
  misc_feature (1)..(151): Homolog of NCBI NO: 7434282 NR Description: shaggy protein kinase (EC 2.7.1.-) 6 - common
  misc_feature (1)..(151): Homolog of NCBI NO: 481018 NR Description: protein kinase MSK-3 (EC 2.7.1.-) [similarity] -
  misc_feature (1)..(151): Homolog of NCBI NO: 37536168 NR Description: putative shaggy-like kinase
KLYAYQMCRALAYIHRVVGVCHRDIKPQNLLVNPHTHQLKICDFGSAKKLVPGEPNISYICSRYYRAPELIFGATEYTTAIDIWSVGCVVAELLIGQPLFPGESGVDQLVEIIKILGTPTREEIRCMNPNYSEFKFPQIKAHPWHKLFGKRM

SEQ ID NO: 19737 - protein, 146 aa, Zea mays subsp. mays
  peptide (1)..(146): Ceres Seq. ID no. 2085621
  misc_feature (1)..(145): Pfam Name: Protein kinase domain Pfam Description: Protein kinase domain
  misc_feature (1)..(145): Homolog of NCBI NO: 15236918 NR Description: Shaggy related protein kinase tetha
  misc_feature (1)..(145): Homolog of NCBI NO: 11132756 NR Description: Shaggy-related protein kinase theta (ASK-theta)
  misc_feature (1)..(145): Homolog of NCBI NO: 33591214 NR Description: shaggy-related protein kinase 1 [Physcomitrella
  misc_feature (1)..(145): Homolog of NCBI NO: 33591208 NR Description: shaggy-related protein kinase 3 [Physcomitrella
  misc_feature (1)..(145): Homolog of NCBI NO: 33591204 NR Description: shaggy-related protein kinase 1 [Physcomitrella
  misc_feature (1)..(145): Homolog of NCBI NO: 7434277 NR Description: shaggy protein kinase (EC 2.7.1.-) 91
  misc_feature (1)..(145): Homolog of NCBI NO: 7434282 NR Description: shaggy protein kinase (EC 2.7.1.-) 6 - common
  misc_feature (1)..(145): Homolog of NCBI NO: 11182434 NR Description: GLYCOGEN SYNTHASE KINASE-3 HOMOLOG MSK-3
  misc_feature (1)..(145): Homolog of NCBI NO: 481018 NR Description: protein kinase MSK-3 (EC 2.7.1.-) [similarity] -
  misc_feature (1)..(145): Homolog of NCBI NO: 37536168 NR Description: putative shaggy-like kinase
MCRALAYIHRVVGVCHRDIKPQNLLVNPHTHQLKICDFGSAKKLVPGEPNISYICSRYYRAPELIFGATEYTTAIDIWSVGCVVAELLIGQPLFPGESGVDQLVEIIKILGTPTREEIRCMNPNYSEFKFPQIKAHPWHKLFGKRM

SEQ ID NO: 19738 - DNA, 1341 bp, Zea mays subsp. mays
  misc_feature (1)..(1341): Ceres Seq. ID no. 12368476
  misc_feature: MA Experiment ID: 108522 Result: Down-regulated in Transcription
  misc_feature: MA Experiment 108522 PARAMETER Experiment Name: Zm_42deg_Heat_P Parameter: Age (day) Value: 8
  misc_feature: MA Experiment 108522 PARAMETER Experiment Name: Zm_42deg_Heat_P Parameter: Organism Value: Zea mays
  misc_feature: MA Experiment 108522 PARAMETER Experiment Name: Zm_42deg_Heat_P Parameter: Plant Line Value: 35A19
  misc_feature: MA Experiment 108522 PARAMETER Experiment Name: Zm_42deg_Heat_P Parameter: Temperature (deg C) Value: 42 vs. 22
  misc_feature: MA Experiment 108522 PARAMETER Experiment Name: Zm_42deg_Heat_P Parameter: Timepoint (hr) Value: 1
  misc_feature: MA Experiment 108522 PARAMETER Experiment Name: Zm_42deg_Heat_P Parameter: Tissue Value: Aerial
  misc_feature: MA Experiment ID: 108535 Result: Up-regulated in Transcription
  misc_feature: MA Experiment 108535 PARAMETER Experiment Name: Zm_Meristem_P Parameter: Age (day) Value: 8
  misc_feature: MA Experiment 108535 PARAMETER Experiment Name: Zm_Meristem_P Parameter: Organism Value: Zea mays
  misc_feature: MA Experiment 108535 PARAMETER Experiment Name: Zm_Meristem_P Parameter: Plant Line Value: 35A19
  misc_feature: MA Experiment 108535 PARAMETER Experiment Name: Zm_Meristem_P Parameter: Tissue Value: Root Meristem vs. Above Root Meristem
  misc_feature: MA Experiment ID: 20000479 Result: Down-regulated in Transcription
  misc_feature: MA Experiment 20000479 PARAMETER Experiment Name: Zm_Drought_P Parameter: Age (day) Value: 10
  misc_feature: MA Experiment 20000479 PARAMETER Experiment Name: Zm_Drought_P Parameter: Organism Value: Zea mays
  misc_feature: MA Experiment 20000479 PARAMETER Experiment Name: Zm_Drought_P Parameter: Plant Line Value: 35A19
  misc_feature: MA Experiment 20000479 PARAMETER Experiment Name: Zm_Drought_P Parameter: Timepoint (hr) Value: 48
  misc_feature: MA Experiment 20000479 PARAMETER Experiment Name: Zm_Drought_P Parameter: Tissue Value: Aerial
  misc_feature: MA Experiment 20000479 PARAMETER Experiment Name: Zm_Drought_P Parameter: Treatment Value: Drought vs. No Drought
  misc_feature: MA Experiment ID: 20000535 Result: Up-regulated in Transcription
  misc_feature: MA Experiment 20000535 PARAMETER Experiment Name: Zm_Hybrid_Seed_Dev_P Parameter: DAP Value: 30 vs. 12
  misc_feature: MA Experiment 20000535 PARAMETER Experiment Name: Zm_Hybrid_Seed_Dev_P Parameter: Organism Value: Zea mays
  misc_feature: MA Experiment 20000535 PARAMETER Experiment Name: Zm_Hybrid_Seed_Dev_P Parameter: Plant Line Value: 35A19
  misc_feature: MA Experiment 20000535 PARAMETER Experiment Name: Zm_Hybrid_Seed_Dev_P Parameter: Tissue Value: Embryo vs. Unfert Floret
gcacgagaccattacctagaacatcctaatcgaaaaaaagcggtgggccgcgcttccttcctcagtcctcactactcactcgtccccttccagttccgcttccgatctgcgcttcgatctccctcttcgcagagttgtagagcaatgcttatgaattttgacgagtccatatgtaagttgacaaaatttgctagggagagggactgcaggtgcttgtgagcatgtatctgctaggcaacaaaagtggaaagaagaaagtgtatgtcgattatatgaatgtccctctaccgtatgccatcgaagagaattacggtgggcgcttctttgacgacgacgacgatcttgcccaagttcttcaagatcaggaaatattgtatcatttaattcaaggaagtaatggtggtggttcatctagaactcattcgattccaagttctagctatggccatgatcggacatcaaatgcacaaaaattgtcaggagatgtaaactgtgagtgtgagttgcaactagcagttgatgaagctttagctagagagttgcatgaaatggagagcaaactagccaacacttcacttaatgacaataatcgaagaaagacaacatcatcttcagcatttgatagaggcaataattctgcaagtagacctcctcaggtattggaggaggatgtgattgatccagataatatgacgtatgaggaactgcaacagctaggggaagccattggtacccaaagcaaagggctgcctgaaagtgtcatagcactcttgccaacttcaacttacaaaactgggatattctccagaaaggaaaaacatgatgaatgtgtgatctgttgtatggcatacaagaaccgagataggctgactaaattgccatgtggacatcactaccatcaagcttgtgttgctaaatggttacagatcaataaggtatgccctgtttgcaataaggaggttttcagctagcagtatcaaacagtgcagattcgtctgatggccaactccagcaaccgtctgtagtactgcatagatgtgcattatttgtataagcatgctgccctgttgctggcaggtaatgcgccgcattgctcaaggaccatatcacggccaaattagtgatatctccagcgaaagcaataagatctctgcttttgaactttttgacattcagagtttcagacttggtgccacactacagtcctttttatcatcgcctgtatactattcatttcagtatcttgtctccagtccattcagcatactttctggaatgttgcaacttggattgaaacagcgagaaatgttgaaatttaggcactggtatttttttaaagtg

SEQ ID NO: 19739 - protein, 249 aa, Zea mays subsp. mays
  peptide (1)..(249): Ceres Seq. ID no. 12368477
  misc_feature (203)..(243): Pfam Name: Zinc finger, C3HC4 type (RING finger) Pfam Description: Zinc finger, C3HC4 type (RING finger)
  misc_feature (78)..(239): Homolog of NCBI NO: 15242286 NR Description: unknown protein; protein id: At5g52150.1
  misc_feature (148)..(246): Homolog of NCBI NO: 15232746 NR Description: zinc-finger protein-like protein; protein id:
  misc_feature (83)..(247): Homolog of NCBI NO: 21536693 NR Description: unknown [Arabidopsis thaliana]
  misc_feature (83)..(247): Homolog of NCBI NO: 18402411 NR Description: expressed protein
  misc_feature (100)..(247): Homolog of NCBI NO: 10334499 NR Description: hypothetical protein [Cicer arietinum]
  misc_feature (17)..(248): Homolog of NCBI NO: 22331928 NR Description: putative protein; protein id: At3g63530.1
  misc_feature (1)..(248): Homolog of NCBI NO: 34898016 NR Description: ESTs C26000(C11448),AU082130(C11448) correspond a region of the predicted gene.~Similar to mRNA for zinc-finger
  misc_feature (1)..(248): Homolog of NCBI NO: 38567912 NR Description: OSJNBa0088I22.8 [Oryza sativa (japonica
MYLLGNKSGKKKVYVDYMNVPLPYAIEENYGGRFFDDDDDLAQVLQDQEILYHLIQGSNGGGSSRTHSIPSSSYGHDRTSNAQKLSGDVNCECELQLAVDEALARELHEMESKLANTSLNDNNRRKTTSSSAFDRGNNSASRPPQVLEEDVIDPDNMTYEELQQLGEAIGTQSKGLPESVIALLPTSTYKTGIFSRKEKHDECVICCMAYKNRDRLTKLPCGHHYHQACVAKWLQINKVCPVCNKEVFS

SEQ ID NO: 19740 - protein, 232 aa, Zea mays subsp. mays
  peptide (1)..(232): Ceres Seq. ID no. 12368478
  misc_feature (186)..(226): Pfam Name: Zinc finger, C3HC4 type (RING finger) Pfam Description: Zinc finger, C3HC4 type (RING finger)
  misc_feature (61)..(222): Homolog of NCBI NO: 15242286 NR Description: unknown protein; protein id: At5g52150.1
  misc_feature (131)..(229): Homolog of NCBI NO: 15232746 NR Description: zinc-finger protein-like protein; protein id:
  misc_feature (66)..(230): Homolog of NCBI NO: 21536693 NR Description: unknown [Arabidopsis thaliana]
  misc_feature (66)..(230): Homolog of NCBI NO: 18402411 NR Description: expressed protein
  misc_feature (83)..(230): Homolog of NCBI NO: 10334499 NR Description: hypothetical protein [Cicer arietinum]
  misc_feature (1)..(231): Homolog of NCBI NO: 22331928 NR Description: putative protein; protein id: At3g63530.1
  misc_feature (1)..(231): Homolog of NCBI NO: 34898016 NR Description: ESTs C26000(C11448),AU082130(C11448) correspond a region of the predicted gene.~Similar to mRNA for zinc-finger
  misc_feature (1)..(231): Homolog of NCBI NO: 38567912 NR Description: OSJNBa0088I22.8 [Oryza sativa (japonica
MNVPLPYAIEENYGGRFFDDDDDLAQVLQDQEILYHLIQGSNGGGSSRTHSIPSSSYGHDRTSNAQKLSGDVNCECELQLAVDEALARELHEMESKLANTSLNDNNRRKTTSSSAFDRGNNSASRPPQVLEEDVIDPDNMTYEELQQLGEAIGTQSKGLPESVIALLPTSTYKTGIFSRKEKHDECVICCMAYKNRDRLTKLPCGHHYHQACVAKWLQINKVCPVCNKEVFS

SEQ ID NO: 19741 - protein, 140 aa, Zea mays subsp. mays
  peptide (1)..(140): Ceres Seq. ID no. 12368479
  misc_feature (94)..(134): Pfam Name: Zinc finger, C3HC4 type (RING finger) Pfam Description: Zinc finger, C3HC4 type (RING finger)
  misc_feature (1)..(130): Homolog of NCBI NO: 15242286 NR Description: unknown protein; protein id: At5g52150.1
  misc_feature (39)..(137): Homolog of NCBI NO: 15232746 NR Description: zinc-finger protein-like protein; protein id:
  misc_feature (1)..(138): Homolog of NCBI NO: 21536693 NR Description: unknown [Arabidopsis thaliana]
  misc_feature (1)..(138): Homolog of NCBI NO: 18402411 NR Description: expressed protein
  misc_feature (1)..(138): Homolog of NCBI NO: 10334499 NR Description: hypothetical protein [Cicer arietinum]
  misc_feature (1)..(139): Homolog of NCBI NO: 22331928 NR Description: putative protein; protein id: At3g63530.1
  misc_feature (1)..(139): Homolog of NCBI NO: 34898016 NR Description: ESTs C26000(C11448),AU082130(C11448) correspond a region of the predicted gene.~Similar to mRNA for zinc-finger
  misc_feature (1)..(139): Homolog of NCBI NO: 38567912 NR Description: OSJNBa0088I22.8 [Oryza sativa (japonica
MESKLANTSLNDNNRRKTTSSSAFDRGNNSASRPPQVLEEDVIDPDNMTYEELQQLGEAIGTQSKGLPESVIALLPTSTYKTGIFSRKEKHDECVICCMAYKNRDRLTKLPCGHHYHQACVAKWLQINKVCPVCNKEVFS

SEQ ID NO: 19742 - DNA, 1473 bp, Zea mays subsp. mays; identical to SEQ ID NO: 9657
  misc_feature (1)..(1473): Ceres Seq. ID no. 12347344
  misc_feature: MA Experiment ID: 20000534 Result: Down-regulated in Transcription
  misc_feature: MA Experiment 20000534 PARAMETER Experiment Name: Zm_Hybrid_Pollen_P Parameter: Age (day) Value: 8
  misc_feature: MA Experiment 20000534 PARAMETER Experiment Name: Zm_Hybrid_Pollen_P Parameter: Organism Value: Zea mays
  misc_feature: MA Experiment 20000534 PARAMETER Experiment Name: Zm_Hybrid_Pollen_P Parameter: Plant Line Value: 35A19
  misc_feature: MA Experiment 20000534 PARAMETER Experiment Name: Zm_Hybrid_Pollen_P Parameter: Tissue Value: Pollen vs. Aerial

SEQ ID NO: 19743 - protein, 389 aa, Zea mays subsp. mays; identical to SEQ ID NO: 9658
  peptide (1)..(389): Ceres Seq. ID no. 12347345
  misc_feature (105)..(166): Pfam Name: Dof domain, zinc finger Pfam Description: Dof domain, zinc finger
  misc_feature (31)..(291): Homolog of NCBI NO: 20372847 NR Description: dof zinc finger protein [Hordeum vulgare subsp.
  misc_feature (31)..(291): Homolog of NCBI NO: 20372895 NR Description: dof zinc finger protein [Hordeum vulgare subsp.
  misc_feature (289)..(389): Homolog of NCBI NO: 20372847 NR Description: dof zinc finger protein [Hordeum vulgare subsp.
  misc_feature (289)..(389): Homolog of NCBI NO: 20372895 NR Description: dof zinc finger protein [Hordeum vulgare subsp.
  misc_feature (36)..(311): Homolog of NCBI NO: 4996642 NR Description: Dof zinc finger protein [Oryza sativa]
  misc_feature (36)..(388): Homolog of NCBI NO: 4996640 NR Description: Dof zinc finger protein [Oryza sativa]
  misc_feature (45)..(388): Homolog of NCBI NO: 38344272 NR Description: OSJNBa0005N02.10 [Oryza sativa (japonica
  misc_feature (49)..(387): Homolog of NCBI NO: 4996642 NR Description: Dof zinc finger protein [Oryza sativa]
  misc_feature (140)..(381): Homolog of NCBI NO: 4996640 NR Description: Dof zinc finger protein [Oryza sativa]
  misc_feature (140)..(381): Homolog of NCBI NO: 38344272 NR Description: OSJNBa0005N02.10 [Oryza sativa (japonica

SEQ ID NO: 19744 - protein, 348 aa, Zea mays subsp. mays; identical to SEQ ID NO: 9659
  peptide (1)..(348): Ceres Seq. ID no. 12347346
  misc_feature (64)..(125): Pfam Name: Dof domain, zinc finger Pfam Description: Dof domain, zinc finger
  misc_feature (1)..(250): Homolog of NCBI NO: 20372847 NR Description: dof zinc finger protein [Hordeum vulgare subsp.
  misc_feature (1)..(250): Homolog of NCBI NO: 20372895 NR Description: dof zinc finger protein [Hordeum vulgare subsp.
  misc_feature (248)..(348): Homolog of NCBI NO: 20372847 NR Description: dof zinc finger protein [Hordeum vulgare subsp.
  misc_feature (248)..(348): Homolog of NCBI NO: 20372895 NR Description: dof zinc finger protein [Hordeum vulgare subsp.
  misc_feature (1)..(270): Homolog of NCBI NO: 4996642 NR Description: Dof zinc finger protein [Oryza sativa]
  misc_feature (1)..(347): Homolog of NCBI NO: 4996640 NR Description: Dof zinc finger protein [Oryza sativa]
  misc_feature (4)..(347): Homolog of NCBI NO: 38344272 NR Description: OSJNBa0005N02.10 [Oryza sativa (japonica
  misc_feature (8)..(346): Homolog of NCBI NO: 4996642 NR Description: Dof zinc finger protein [Oryza sativa]
  misc_feature (99)..(340): Homolog of NCBI NO: 4996640 NR Description: Dof zinc finger protein [Oryza sativa]
  misc_feature (99)..(340): Homolog of NCBI NO: 38344272 NR Description: OSJNBa0005N02.10 [Oryza sativa (japonica

SEQ ID NO: 19745 - protein, 345 aa, Zea mays subsp. mays; identical to SEQ ID NO: 9660
  peptide (1)..(345): Ceres Seq. ID no. 12347347
  misc_feature (61)..(122): Pfam Name: Dof domain, zinc finger Pfam Description: Dof domain, zinc finger
  misc_feature (1)..(247): Homolog of NCBI NO: 20372847 NR Description: dof zinc finger protein [Hordeum vulgare subsp.
  misc_feature (1)..(247): Homolog of NCBI NO: 20372895 NR Description: dof zinc finger protein [Hordeum vulgare subsp.
  misc_feature (245)..(345): Homolog of NCBI NO: 20372847 NR Description: dof zinc finger protein [Hordeum vulgare subsp.
  misc_feature (245)..(345): Homolog of NCBI NO: 20372895 NR Description: dof zinc finger protein [Hordeum vulgare subsp.
  misc_feature (1)..(267): Homolog of NCBI NO: 4996642 NR Description: Dof zinc finger protein [Oryza sativa]
  misc_feature (1)..(344): Homolog of NCBI NO: 4996640 NR Description: Dof zinc finger protein [Oryza sativa]
  misc_feature (1)..(344): Homolog of NCBI NO: 38344272 NR Description: OSJNBa0005N02.10 [Oryza sativa (japonica
  misc_feature (5)..(343): Homolog of NCBI NO: 4996642 NR Description: Dof zinc finger protein [Oryza sativa]
  misc_feature (96)..(337): Homolog of NCBI NO: 4996640 NR Description: Dof zinc finger protein [Oryza sativa]
  misc_feature (96)..(337): Homolog of NCBI NO: 38344272 NR Description: OSJNBa0005N02.10 [Oryza sativa (japonica

SEQ ID NO: 19746 - DNA, 447 bp, Zea mays subsp. mays
  misc_feature (1)..(447): Ceres Seq. ID no. 2121480
  misc_feature: MA Experiment ID: 20000487 Result: Up-regulated in Transcription
  misc_feature: MA Experiment 20000487 PARAMETER Experiment Name: Zm_50mM_NH4NO3_L_to_H_P Parameter: Organism Value: Zea mays
  misc_feature: MA Experiment 20000487 PARAMETER Experiment Name: Zm_50mM_NH4NO3_L_to_H_P Parameter: Timepoint (hr) Value: 4
  misc_feature: MA Experiment 20000487 PARAMETER Experiment Name: Zm_50mM_NH4NO3_L_to_H_P Parameter: Tissue Value: Leaves
  misc_feature: MA Experiment 20000487 PARAMETER Experiment Name: Zm_50mM_NH4NO3_L_to_H_P Parameter: Treatment Value: 50mM NH4NO3 vs. 100mM Mannitol
  misc_feature: MA Experiment ID: 20000534 Result: Down-regulated in Transcription
  misc_feature: MA Experiment 20000534 PARAMETER Experiment Name: Zm_Hybrid_Pollen_P Parameter: Age (day) Value: 8
  misc_feature: MA Experiment 20000534 PARAMETER Experiment Name: Zm_Hybrid_Pollen_P Parameter: Organism Value: Zea mays
  misc_feature: MA Experiment 20000534 PARAMETER Experiment Name: Zm_Hybrid_Pollen_P Parameter: Plant Line Value: 35A19
  misc_feature: MA Experiment 20000534 PARAMETER Experiment Name: Zm_Hybrid_Pollen_P Parameter: Tissue Value: Pollen vs. Aerial
ttgataaggaaaatctcatcaaatatgggaaccattcgttgacctatagaatagttgatagaattttcgcacagatcccaaggaaattcacaagcatgacagaaggaaagatgggttatgaagactttgtttactttatattatcagaggaagacaaatcatctgagcctagtcttgaatactggtttaagtgcatcgatcttgatggtaatggtattttaactttcaatgaaatgcaatttttctacgaggagcaattgcaccgaatggagtgcatggcacaagagcctgtgctttttctggacatattatgccagatgattgatatgattggaccagagaatgagagctatttaactctacgggacttaaaacggtgtaaactctcaggaaacatattcaatattcttttcaatctcaacaagttcatggcgtttgaaactcgtg

SEQ ID NO: 19747 - protein, 148 aa, Zea mays subsp. mays
  peptide (1)..(148): Ceres Seq. ID no. 2121481
  misc_feature (57)..(85): Pfam Name: EF hand Pfam Description: EF hand
  misc_feature (4)..(147): Homolog of NCBI NO: 34865818 NR Description: similar to alpha isoform of regulatory subunit B,
  misc_feature (1)..(147): Homolog of NCBI NO: 28393301 NR Description: putative protein phosphatase 2A [Arabidopsis
  misc_feature (1)..(147): Homolog of NCBI NO: 15219596 NR Description: putative protein phosphatase 2A; protein id:
  misc_feature (1)..(147): Homolog of NCBI NO: 15240089 NR Description: protein phosphatase 2A 62 kDa B regulatory
  misc_feature (1)..(147): Homolog of NCBI NO: 15221817 NR Description: protein phosphatase 2A 72 kDa regulatory subunit,
  misc_feature (1)..(147): Homolog of NCBI NO: 15241978 NR Description: protein phosphatase 2A regulatory subunit B-like
  misc_feature (1)..(147): Homolog of NCBI NO: 30692025 NR Description: protein phosphatase 2A regulatory subunit
  misc_feature (1)..(147): Homolog of NCBI NO: 18421273 NR Description: protein phosphatase 2A regulatory subunit B-like
  misc_feature (1)..(147): Homolog of NCBI NO: 37535364 NR Description: putative protein phosphatase 2A regulatory
  misc_feature (1)..(147): Homolog of NCBI NO: 16905168 NR Description: putative phosphatase subunit, 3'-partial [Oryza
DKENLIKYGNHSLTYRIVDRIFAQIPRKFTSMTEGKMGYEDFVYFILSEEDKSSEPSLEYWFKCIDLDGNGILTFNEMQFFYEEQLHRMECMAQEPVLFLDILCQMIDMIGPENESYLTLRDLKRCKLSGNIFNILFNLNKFMAFETR

SEQ ID NO: 19748 - protein, 117 aa, Zea mays subsp. mays
  peptide (1)..(117): Ceres Seq. ID no. 2121482
  misc_feature (26)..(54): Pfam Name: EF hand Pfam Description: EF hand
  misc_feature (1)..(116): Homolog of NCBI NO: 34865818 NR Description: similar to alpha isoform of regulatory subunit B,
  misc_feature (1)..(116): Homolog of NCBI NO: 28393301 NR Description: putative protein phosphatase 2A [Arabidopsis
  misc_feature (1)..(116): Homolog of NCBI NO: 15219596 NR Description: putative protein phosphatase 2A; protein id:
  misc_feature (1)..(116): Homolog of NCBI NO: 15240089 NR Description: protein phosphatase 2A 62 kDa B regulatory
  misc_feature (1)..(116): Homolog of NCBI NO: 15221817 NR Description: protein phosphatase 2A 72 kDa regulatory subunit,
  misc_feature (1)..(116): Homolog of NCBI NO: 15241978 NR Description: protein phosphatase 2A regulatory subunit B-like
  misc_feature (1)..(116): Homolog of NCBI NO: 30692025 NR Description: protein phosphatase 2A regulatory subunit
  misc_feature (1)..(116): Homolog of NCBI NO: 18421273 NR Description: protein phosphatase 2A regulatory subunit B-like
  misc_feature (1)..(116): Homolog of NCBI NO: 37535364 NR Description: putative protein phosphatase 2A regulatory
  misc_feature (1)..(116): Homolog of NCBI NO: 16905168 NR Description: putative phosphatase subunit, 3'-partial [Oryza
MTEGKMGYEDFVYFILSEEDKSSEPSLEYWFKCIDLDGNGILTFNEMQFFYEEQLHRMECMAQEPVLFLDILCQMIDMIGPENESYLTLRDLKRCKLSGNIFNILFNLNKFMAFETR

SEQ ID NO: 19749 - protein, 112 aa, Zea mays subsp. mays
  peptide (1)..(112): Ceres Seq. ID no. 2121483
  misc_feature (21)..(49): Pfam Name: EF hand Pfam Description: EF hand
  misc_feature (1)..(111): Homolog of NCBI NO: 34865818 NR Description: similar to alpha isoform of regulatory subunit B,
  misc_feature (1)..(111): Homolog of NCBI NO: 28393301 NR Description: putative protein phosphatase 2A [Arabidopsis
  misc_feature (1)..(111): Homolog of NCBI NO: 15219596 NR Description: putative protein phosphatase 2A; protein id:
  misc_feature (1)..(111): Homolog of NCBI NO: 15240089 NR Description: protein phosphatase 2A 62 kDa B regulatory
  misc_feature (1)..(111): Homolog of NCBI NO: 15221817 NR Description: protein phosphatase 2A 72 kDa regulatory subunit,
  misc_feature (1)..(111): Homolog of NCBI NO: 15241978 NR Description: protein phosphatase 2A regulatory subunit B-like
  misc_feature (1)..(111): Homolog of NCBI NO: 30692025 NR Description: protein phosphatase 2A regulatory subunit
  misc_feature (1)..(111): Homolog of NCBI NO: 18421273 NR Description: protein phosphatase 2A regulatory subunit B-like
  misc_feature (1)..(111): Homolog of NCBI NO: 37535364 NR Description: putative protein phosphatase 2A regulatory
  misc_feature (1)..(111): Homolog of NCBI NO: 16905168 NR Description: putative phosphatase subunit, 3'-partial [Oryza
MGYEDFVYFILSEEDKSSEPSLEYWFKCIDLDGNGILTFNEMQFFYEEQLHRMECMAQEPVLFLDILCQMIDMIGPENESYLTLRDLKRCKLSGNIFNILFNLNKFMAFETR

SEQ ID NO: 19750 - DNA, 1483 bp, Zea mays subsp. mays; identical to SEQ ID NO: 11161
  misc_feature (1)..(1483): Ceres Seq. ID no. 13492502
  misc_feature: MA Experiment ID: 108529 Result: Up-regulated in Transcription
  misc_feature: MA Experiment 108529 PARAMETER Experiment Name: Zm_Imbibed_Seeds_P Parameter: Age (day) Value: 5 vs. 2
  misc_feature: MA Experiment 108529 PARAMETER Experiment Name: Zm_Imbibed_Seeds_P Parameter: Organism Value: Zea mays
  misc_feature: MA Experiment 108529 PARAMETER Experiment Name: Zm_Imbibed_Seeds_P Parameter: Plant Line Value: 35A19
  misc_feature: MA Experiment 108529 PARAMETER Experiment Name: Zm_Imbibed_Seeds_P Parameter: Tissue Value: Roots vs. Embryo
  misc_feature: MA Experiment ID: 108535 Result: Down-regulated in Transcription
  misc_feature: MA Experiment 108535 PARAMETER Experiment Name: Zm_Meristem_P Parameter: Age (day) Value: 8
  misc_feature: MA Experiment 108535 PARAMETER Experiment Name: Zm_Meristem_P Parameter: Organism Value: Zea mays
  misc_feature: MA Experiment 108535 PARAMETER Experiment Name: Zm_Meristem_P Parameter: Plant Line Value: 35A19
  misc_feature: MA Experiment 108535 PARAMETER Experiment Name: Zm_Meristem_P Parameter: Tissue Value: Root Meristem vs. Above Root Meristem
  misc_feature: MA Experiment ID: 108546 Result: Up-regulated in Transcription
  misc_feature: MA Experiment 108546 PARAMETER Experiment Name: Zm_Imbibed_Seeds_P Parameter: Age (day) Value: 3 vs. 2
  misc_feature: MA Experiment 108546 PARAMETER Experiment Name: Zm_Imbibed_Seeds_P Parameter: Organism Value: Zea mays
  misc_feature: MA Experiment 108546 PARAMETER Experiment Name: Zm_Imbibed_Seeds_P Parameter: Plant Line Value: 35A19
  misc_feature: MA Experiment 108546 PARAMETER Experiment Name: Zm_Imbibed_Seeds_P Parameter: Tissue Value: Roots vs. Embryo

SEQ ID NO: 19751 - protein, 432 aa, Zea mays subsp. mays; identical to SEQ ID NO: 11162
  peptide (1)..(432): Ceres Seq. ID no. 13492503
  misc_feature (2)..(396): Pfam Name: Mlo family Pfam Description: Mlo family
  misc_feature (1)..(396): Homolog of NCBI NO: 13784979 NR Description: seven transmembrane protein Mlo3 [Zea mays]
  misc_feature (5)..(385): Homolog of NCBI NO: 34907492 NR Description: putative seven transmembrane protein [Oryza
  misc_feature (1)..(377): Homolog of NCBI NO: 13784989 NR Description: seven transmembrane protein Mlo8 [Zea mays]
  misc_feature (3)..(401): Homolog of NCBI NO: 15235429 NR Description: seven transmembrane MLO protein family (MLO1)
  misc_feature (6)..(385): Homolog of NCBI NO: 15224823 NR Description: seven transmembrane MLO protein family (MLO15)
  misc_feature (1)..(385): Homolog of NCBI NO: 18416311 NR Description: seven transmembrane MLO protein family (MLO13) thaliana] >gi|14091596|gb|AAK53806.1|AF369574_1 membrane protein
  misc_feature (119)..(385): Homolog of NCBI NO: 7487333 NR Description: hypothetical protein T22A6.80 - Arabidopsis
  misc_feature (1)..(84): Homolog of NCBI NO: 7487333 NR Description: hypothetical protein T22A6.80 - Arabidopsis
  misc_feature (1)..(385): Homolog of NCBI NO: 13784987 NR Description: seven transmembrane protein Mlo7 [Zea mays]
  misc_feature (95)..(377): Homolog of NCBI NO: 13784985 NR Description: seven transmembrane protein Mlo6 [Zea mays]

SEQ ID NO: 19752 - protein, 374 aa, Zea mays subsp. mays; identical to SEQ ID NO: 11163
  peptide (1)..(374): Ceres Seq. ID no. 13492504
  misc_feature (1)..(338): Pfam Name: Mlo family Pfam Description: Mlo family
  misc_feature (1)..(338): Homolog of NCBI NO: 13784979 NR Description: seven transmembrane protein Mlo3 [Zea mays]
  misc_feature (1)..(327): Homolog of NCBI NO: 34907492 NR Description: putative seven transmembrane protein [Oryza
  misc_feature (1)..(319): Homolog of NCBI NO: 13784989 NR Description: seven transmembrane protein Mlo8 [Zea mays]
  misc_feature (1)..(343): Homolog of NCBI NO: 15235429 NR Description: seven transmembrane MLO protein family (MLO1)
  misc_feature (1)..(327): Homolog of NCBI NO: 15224823 NR Description: seven transmembrane MLO protein family (MLO15)
  misc_feature (1)..(327): Homolog of NCBI NO: 18416311 NR Description: seven transmembrane MLO protein family (MLO13) thaliana] >gi|14091596|gb|AAK53806.1|AF369574_1 membrane protein
  misc_feature (61)..(327): Homolog of NCBI NO: 7487333 NR Description: hypothetical protein T22A6.80 - Arabidopsis
  misc_feature (1)..(26): Homolog of NCBI NO: 7487333 NR Description: hypothetical protein T22A6.80 - Arabidopsis
  misc_feature (1)..(327): Homolog of NCBI NO: 13784987 NR Description: seven transmembrane protein Mlo7 [Zea mays]
  misc_feature (37)..(319): Homolog of NCBI NO: 13784985 NR Description: seven transmembrane protein Mlo6 [Zea mays]

SEQ ID NO: 19753 - protein, 348 aa, Zea mays subsp. mays; identical to SEQ ID NO: 11164
  peptide (1)..(348): Ceres Seq. ID no. 13492505
  misc_feature (1)..(312): Pfam Name: Mlo family Pfam Description: Mlo family
  misc_feature (1)..(312): Homolog of NCBI NO: 13784979 NR Description: seven transmembrane protein Mlo3 [Zea mays]
  misc_feature (1)..(301): Homolog of NCBI NO: 34907492 NR Description: putative seven transmembrane protein [Oryza
  misc_feature (1)..(293): Homolog of NCBI NO: 13784989 NR Description: seven transmembrane protein Mlo8 [Zea mays]
  misc_feature (1)..(317): Homolog of NCBI NO: 15235429 NR Description: seven transmembrane MLO protein family (MLO1)
  misc_feature (1)..(301): Homolog of NCBI NO: 15224823 NR Description: seven transmembrane MLO protein family (MLO15)
  misc_feature (1)..(301): Homolog of NCBI NO: 18416311 NR Description: seven transmembrane MLO protein family (MLO13) thaliana] >gi|14091596|gb|AAK53806.1|AF369574_1 membrane protein
  misc_feature (35)..(301): Homolog of NCBI NO: 7487333 NR Description: hypothetical protein T22A6.80 - Arabidopsis
  misc_feature (1)..(301): Homolog of NCBI NO: 13784987 NR Description: seven transmembrane protein Mlo7 [Zea mays]
  misc_feature (11)..(293): Homolog of NCBI NO: 13784985 NR Description: seven transmembrane protein Mlo6 [Zea mays]
  misc_feature (1)..(35): Homolog of NCBI NO: 13784985 NR Description: seven transmembrane protein Mlo6 [Zea mays]

SEQ ID NO: 19754 - DNA, 487 bp, Zea mays subsp. mays
  misc_feature (1)..(487): Ceres Seq. ID no. 4613497
  misc_feature: MA Experiment ID: 20000534 Result: Up-regulated in Transcription
  misc_feature: MA Experiment 20000534 PARAMETER Experiment Name: Zm_Hybrid_Pollen_P Parameter: Age (day) Value: 8
  misc_feature: MA Experiment 20000534 PARAMETER Experiment Name: Zm_Hybrid_Pollen_P Parameter: Organism Value: Zea mays
  misc_feature: MA Experiment 20000534 PARAMETER Experiment Name: Zm_Hybrid_Pollen_P Parameter: Plant Line Value: 35A19
  misc_feature: MA Experiment 20000534 PARAMETER Experiment Name: Zm_Hybrid_Pollen_P Parameter: Tissue Value: Pollen vs. Aerial
aagttaggaggggaacccatcagccaagagctacgcaaacgcacagcgatgcacaagcacgagataccagccaccatgcgcctgtccctcctcctcgtcgtcgtggccgccctctcggcgcgcaccgcggcgcagctgccgctggcgggcggcggcggcggcgccctgaagccggacttctatagccagtcgtgcccgcgcgcggagcggatcattgcggaggtgatgcagacgaagcagatggcgaacccgacgacggccgcgggcctgctccgcgtcttcttccacgactgcttcgtcagcgggtgcgacgcgtcggtgctgatcgcgtccacccagttccagaagttcggagcacgacgcggagatcaaccactccctccccggggacgccttcgacgccgtggtgcgcgccaagctggccctggagctggagtgcccggggtggtgtcctgcgccgacatcctcgcactggcgtcgggcgtgc

SEQ ID NO: 19755 - protein, 162 aa, Zea mays subsp. mays
  peptide (1)..(162): Ceres Seq. ID no. 4613498
  misc_feature (56)..(159): Homolog of NCBI NO: 15242580 NR Description: peroxidase, putative; protein id: At5g40150.1
  misc_feature (26)..(160): Homolog of NCBI NO: 34394026 NR Description: putative peroxidase [Oryza sativa (japonica
  misc_feature (53)..(160): Homolog of NCBI NO: 7433065 NR Description: peroxidase (EC 1.11.1.7) precursor,
  misc_feature (48)..(160): Homolog of NCBI NO: 7433064 NR Description: peroxidase (EC 1.11.1.7) TPX2 precursor - tomato
  misc_feature (28)..(160): Homolog of NCBI NO: 14702035 NR Description: putative peroxidase [Oryza sativa (japonica
  misc_feature (56)..(160): Homolog of NCBI NO: 15236620 NR Description: peroxidase, putative; protein id: At4g17690.1
  misc_feature (43)..(160): Homolog of NCBI NO: 21593687 NR Description: peroxidase [Arabidopsis thaliana]
  misc_feature (43)..(160): Homolog of NCBI NO: 18422742 NR Description: peroxidase, putative
  misc_feature (43)..(160): Homolog of NCBI NO: 9759442 NR Description: peroxidase [Arabidopsis thaliana]
  misc_feature (30)..(160): Homolog of NCBI NO: 32489883 NR Description: OSJNBa0060P14.16 [Oryza sativa (japonica
KLGGEPISQELRKRTAMHKHEIPATMRLSLLLVVVAALSARTAAQLPLAGGGGGALKPDFYSQSCPRAERIIAEVMQTKQMANPTTAAGLLRVFFHDCFVSGCDASVLIASTQFQKFGARRGDQPLPPRGRLRRRGARQAGPGAGVPGVVSCADILALASGV

SEQ ID NO: 19756 - protein, 146 aa, Zea mays subsp. mays
  peptide (1)..(146): Ceres Seq. ID no. 4613499
  misc_feature (40)..(143): Homolog of NCBI NO: 15242580 NR Description: peroxidase, putative; protein id: At5g40150.1
  misc_feature (10)..(144): Homolog of NCBI NO: 34394026 NR Description: putative peroxidase [Oryza sativa (japonica
  misc_feature (37)..(144): Homolog of NCBI NO: 7433065 NR Description: peroxidase (EC 1.11.1.7) precursor,
  misc_feature (32)..(144): Homolog of NCBI NO: 7433064 NR Description: peroxidase (EC 1.11.1.7) TPX2 precursor - tomato
  misc_feature (12)..(144): Homolog of NCBI NO: 14702035 NR Description: putative peroxidase [Oryza sativa (japonica
  misc_feature (40)..(144): Homolog of NCBI NO: 15236620 NR Description: peroxidase, putative; protein id: At4g17690.1
  misc_feature (27)..(144): Homolog of NCBI NO: 18422742 NR Description: peroxidase, putative
  misc_feature (27)..(144): Homolog of NCBI NO: 21593687 NR Description: peroxidase [Arabidopsis thaliana]
  misc_feature (27)..(144): Homolog of NCBI NO: 9759442 NR Description: peroxidase [Arabidopsis thaliana]
  misc_feature (14)..(144): Homolog of NCBI NO: 32489883 NR Description: OSJNBa0060P14.16 [Oryza sativa (japonica
MHKHEIPATMRLSLLLVVVAALSARTAAQLPLAGGGGGALKPDFYSQSCPRAERIIAEVMQTKQMANPTTAAGLLRVFFHDCFVSGCDASVLIASTQFQKFGARRGDQPLPPRGRLRRRGARQAGPGAGVPGVVSCADILALASGV

SEQ ID NO: 19757 - protein, 137 aa, Zea mays subsp. mays
  peptide (1)..(137): Ceres Seq. ID no. 4613500
  misc_feature (31)..(134): Homolog of NCBI NO: 15242580 NR Description: peroxidase, putative; protein id: At5g40150.1
  misc_feature (1)..(135): Homolog of NCBI NO: 34394026 NR Description: putative peroxidase [Oryza sativa (japonica
  misc_feature (28)..(135): Homolog of NCBI NO: 7433065 NR Description: peroxidase (EC 1.11.1.7) precursor,
  misc_feature (23)..(135): Homolog of NCBI NO: 7433064 NR Description: peroxidase (EC 1.11.1.7) TPX2 precursor - tomato
  misc_feature (3)..(135): Homolog of NCBI NO: 14702035 NR Description: putative peroxidase [Oryza sativa (japonica
  misc_feature (31)..(135): Homolog of NCBI NO: 15236620 NR Description: peroxidase, putative; protein id: At4g17690.1
  misc_feature (18)..(135): Homolog of NCBI NO: 18422742 NR Description: peroxidase, putative
  misc_feature (18)..(135): Homolog of NCBI NO: 21593687 NR Description: peroxidase [Arabidopsis thaliana]
  misc_feature (18)..(135): Homolog of NCBI NO: 9759442 NR Description: peroxidase [Arabidopsis thaliana]
  misc_feature (5)..(135): Homolog of NCBI NO: 32489883 NR Description: OSJNBa0060P14.16 [Oryza sativa (japonica
MRLSLLLVVVAALSARTAAQLPLAGGGGGALKPDFYSQSCPRAERIIAEVMQTKQMANPTTAAGLLRVFFHDCFVSGCDASVLIASTQFQKFGARRGDQPLPPRGRLRRRGARQAGPGAGVPGVVSCADILALASGV

SEQ ID NO: 19758 - DNA, 1585 bp, Zea mays subsp. mays
  misc_feature (1)..(1585): Ceres Seq. ID no. 12418694
  misc_feature: MA Experiment ID: 108504 Result: Up-regulated in Transcription
  misc_feature: MA Experiment 108504 PARAMETER Experiment Name: Zm_Drought_P Parameter: Age (day) Value: 8
  misc_feature: MA Experiment 108504 PARAMETER Experiment Name: Zm_Drought_P Parameter: Organism Value: Zea mays
  misc_feature: MA Experiment 108504 PARAMETER Experiment Name: Zm_Drought_P Parameter: Plant Line Value: 35A19
  misc_feature: MA Experiment 108504 PARAMETER Experiment Name: Zm_Drought_P Parameter: Timepoint (hr) Value: 12
  misc_feature: MA Experiment 108504 PARAMETER Experiment Name: Zm_Drought_P Parameter: Tissue Value: Aerial
  misc_feature: MA Experiment 108504 PARAMETER Experiment Name: Zm_Drought_P Parameter: Treatment Value: Drought vs. No Drought
  misc_feature: MA Experiment ID: 108515 Result: Up-regulated in Transcription
  misc_feature: MA Experiment 108515 PARAMETER Experiment Name: Zm_2mM_SA_P Parameter: Age (day) Value: 8
  misc_feature: MA Experiment 108515 PARAMETER Experiment Name: Zm_2mM_SA_P Parameter: Organism Value: Zea mays
  misc_feature: MA Experiment 108515 PARAMETER Experiment Name: Zm_2mM_SA_P Parameter: Plant Line Value: 35A19
  misc_feature: MA Experiment 108515 PARAMETER Experiment Name: Zm_2mM_SA_P Parameter: Timepoint (hr) Value: 12
  misc_feature: MA Experiment 108515 PARAMETER Experiment Name: Zm_2mM_SA_P Parameter: Tissue Value: Aerial
  misc_feature: MA Experiment 108515 PARAMETER Experiment Name: Zm_2mM_SA_P Parameter: Treatment Value: 2mM SA vs. No Treatment
  misc_feature: MA Experiment ID: 108526 Result: Up-regulated in Transcription
  misc_feature: MA Experiment 108526 PARAMETER Experiment Name: Zm_5mM_NO_P Parameter: Age (day) Value: 8
  misc_feature: MA Experiment 108526 PARAMETER Experiment Name: Zm_5mM_NO_P Parameter: Organism Value: Zea mays
  misc_feature: MA Experiment 108526 PARAMETER Experiment Name: Zm_5mM_NO_P Parameter: Plant Line Value: 35A19
  misc_feature: MA Experiment 108526 PARAMETER Experiment Name: Zm_5mM_NO_P Parameter: Timepoint (hr) Value: 1
  misc_feature: MA Experiment 108526 PARAMETER Experiment Name: Zm_5mM_NO_P Parameter: Tissue Value: Aerial
  misc_feature: MA Experiment 108526 PARAMETER Experiment Name: Zm_5mM_NO_P Parameter: Treatment Value: 5mM NO vs. No Treatment
  misc_feature: MA Experiment ID: 108527 Result: Up-regulated in Transcription
  misc_feature: MA Experiment 108527 PARAMETER Experiment Name: Zm_5mM_NO_P Parameter: Age (day) Value: 8
  misc_feature: MA Experiment 108527 PARAMETER Experiment Name: Zm_5mM_NO_P Parameter: Organism Value: Zea mays
  misc_feature: MA Experiment 108527 PARAMETER Experiment Name: Zm_5mM_NO_P Parameter: Plant Line Value: 35A19
  misc_feature: MA Experiment 108527 PARAMETER Experiment Name: Zm_5mM_NO_P Parameter: Timepoint (hr) Value: 6
  misc_feature: MA Experiment 108527 PARAMETER Experiment Name: Zm_5mM_NO_P Parameter: Tissue Value: Aerial
  misc_feature: MA Experiment 108527 PARAMETER Experiment Name: Zm_5mM_NO_P Parameter: Treatment Value: 5mM NO vs. No Treatment
  misc_feature: MA Experiment ID: 108545 Result: Down-regulated in Transcription
  misc_feature: MA Experiment 108545 PARAMETER Experiment Name: Zm_Imbibed_Seeds_P Parameter: Age (day) Value: 3 vs. 2
  misc_feature: MA Experiment 108545 PARAMETER Experiment Name: Zm_Imbibed_Seeds_P Parameter: Organism Value: Zea mays
  misc_feature: MA Experiment 108545 PARAMETER Experiment Name: Zm_Imbibed_Seeds_P Parameter: Plant Line Value: 35A19
  misc_feature: MA Experiment 108545 PARAMETER Experiment Name: Zm_Imbibed_Seeds_P Parameter: Tissue Value: Aerial vs. Embryo
  misc_feature: MA Experiment ID: 108556 Result: Up-regulated in Transcription
  misc_feature: MA Experiment 108556 PARAMETER Experiment Name: Zm_Drought_P Parameter: Age (day) Value: 9
  misc_feature: MA Experiment 108556 PARAMETER Experiment Name: Zm_Drought_P Parameter: Organism Value: Zea mays
  misc_feature: MA Experiment 108556 PARAMETER Experiment Name: Zm_Drought_P Parameter: Plant Line Value: 35A19
  misc_feature: MA Experiment 108556 PARAMETER Experiment Name: Zm_Drought_P Parameter: Timepoint (hr) Value: 24
  misc_feature: MA Experiment 108556 PARAMETER Experiment Name: Zm_Drought_P Parameter: Tissue Value: Aerial
  misc_feature: MA Experiment 108556 PARAMETER Experiment Name: Zm_Drought_P Parameter: Treatment Value: Drought vs. No Drought
  misc_feature: MA Experiment ID: 108559 Result: Up-regulated in Transcription
  misc_feature: MA Experiment 108559 PARAMETER Experiment Name: Zm_5mM_NO_P Parameter: Age (day) Value: 8
  misc_feature: MA Experiment 108559 PARAMETER Experiment Name: Zm_5mM_NO_P Parameter: Organism Value: Zea mays
  misc_feature: MA Experiment 108559 PARAMETER Experiment Name: Zm_5mM_NO_P Parameter: Plant Line Value: 35A19
  misc_feature: MA Experiment 108559 PARAMETER Experiment Name: Zm_5mM_NO_P Parameter: Timepoint (hr) Value: 12
  misc_feature: MA Experiment 108559 PARAMETER Experiment Name: Zm_5mM_NO_P Parameter: Tissue Value: Aerial
  misc_feature: MA Experiment 108559 PARAMETER Experiment Name: Zm_5mM_NO_P Parameter: Treatment Value: 5mM NO vs. No Treatment
  misc_feature: MA Experiment ID: 108597 Result: Up-regulated in Transcription
  misc_feature: MA Experiment 108597 PARAMETER Experiment Name: Zm_100uM_ABA_P Parameter: Age (day) Value: 9
  misc_feature: MA Experiment 108597 PARAMETER Experiment Name: Zm_100uM_ABA_P Parameter: Organism Value: Zea mays
  misc_feature: MA Experiment 108597 PARAMETER Experiment Name: Zm_100uM_ABA_P Parameter: Plant Line Value: 35A19
  misc_feature: MA Experiment 108597 PARAMETER Experiment Name: Zm_100uM_ABA_P Parameter: Timepoint (hr) Value: 24
  misc_feature: MA Experiment 108597 PARAMETER Experiment Name: Zm_100uM_ABA_P Parameter: Tissue Value: Aerial
  misc_feature: MA Experiment 108597 PARAMETER Experiment Name: Zm_100uM_ABA_P Parameter: Treatment Value: 100uM ABA vs. No Treatment
  misc_feature: MA Experiment ID: 108689 Result: Up-regulated in Transcription
  misc_feature: MA Experiment 108689 PARAMETER Experiment Name: Zm_Drought_Roots_P Parameter: Age (day) Value: 9
  misc_feature: MA Experiment 108689 PARAMETER Experiment Name: Zm_Drought_Roots_P Parameter: Organism Value: Zea mays
  misc_feature: MA Experiment 108689 PARAMETER Experiment Name: Zm_Drought_Roots_P Parameter: Plant Line Value: 35A19
  misc_feature: MA Experiment 108689 PARAMETER Experiment Name: Zm_Drought_Roots_P Parameter: Timepoint (hr) Value: 24
  misc_feature: MA Experiment 108689 PARAMETER Experiment Name: Zm_Drought_Roots_P Parameter: Tissue Value: Roots
  misc_feature: MA Experiment 108689 PARAMETER Experiment Name: Zm_Drought_Roots_P Parameter: Treatment Value: Drought vs. No Drought
  misc_feature: MA Experiment ID: 20000478 Result: Up-regulated in Transcription
  misc_feature: MA Experiment 20000478 PARAMETER Experiment Name: Zm_5mM_SA_P Parameter: Age (day) Value: 11
  misc_feature: MA Experiment 20000478 PARAMETER Experiment Name: Zm_5mM_SA_P Parameter: Organism Value: Zea mays
  misc_feature: MA Experiment 20000478 PARAMETER Experiment Name: Zm_5mM_SA_P Parameter: Plant Line Value: 35A19
  misc_feature: MA Experiment 20000478 PARAMETER Experiment Name: Zm_5mM_SA_P Parameter: Timepoint (hr) Value: 72
  misc_feature: MA Experiment 20000478 PARAMETER Experiment Name: Zm_5mM_SA_P Parameter: Tissue Value: Aerial
  misc_feature: MA Experiment 20000478 PARAMETER Experiment Name: Zm_5mM_SA_P Parameter: Treatment Value: 5mM SA vs. No Treatment
  misc_feature: MA Experiment ID: 20000480 Result: Up-regulated in Transcription
  misc_feature: MA Experiment 20000480 PARAMETER Experiment Name: Zm_Drought_P Parameter: Age (day) Value: 11
  misc_feature: MA Experiment 20000480 PARAMETER Experiment Name: Zm_Drought_P Parameter: Organism Value: Zea mays
  misc_feature: MA Experiment 20000480 PARAMETER Experiment Name: Zm_Drought_P Parameter: Plant Line Value: 35A19
  misc_feature: MA Experiment 20000480 PARAMETER Experiment Name: Zm_Drought_P Parameter: Timepoint (hr) Value: 72
  misc_feature: MA Experiment 20000480 PARAMETER Experiment Name: Zm_Drought_P Parameter: Tissue Value: Aerial
  misc_feature: MA Experiment 20000480 PARAMETER Experiment Name: Zm_Drought_P Parameter: Treatment Value: Drought vs. No Drought
  misc_feature: MA Experiment ID: 20000626 Result: Up-regulated in Transcription
  misc_feature: MA Experiment 20000626 PARAMETER Experiment Name: Zm_Herbicide-Treatments_P Parameter: Timepoint (hr) Value: 12
  misc_feature: MA Experiment 20000626 PARAMETER Experiment Name: Zm_Herbicide-Treatments_P Parameter: Tissue Value: Aerial
  misc_feature: MA Experiment 20000626 PARAMETER Experiment Name: Zm_Herbicide-Treatments_P Parameter: Treatment Value: Roundup vs. No Treatment
  misc_feature: MA Experiment ID: 20000627 Result: Up-regulated in Transcription
  misc_feature: MA Experiment 20000627 PARAMETER Experiment Name: Zm_Herbicide-Treatments_P Parameter: Timepoint (hr) Value: 12
  misc_feature: MA Experiment 20000627 PARAMETER Experiment Name: Zm_Herbicide-Treatments_P Parameter: Tissue Value: Aerial
  misc_feature: MA Experiment 20000627 PARAMETER Experiment Name: Zm_Herbicide-Treatments_P Parameter: Treatment Value: Finale vs. No Treatment
gcacgagaccattacctagaacatcctaatcgaaaaacgtgaccccgaggcccgagcccgaagcggcggcgcgccgggcgtcttgacgtccccaatgacgccgcgcgtcgtggacggacctccgcagcttccctctcgtccgttccgcagtccgcacggggaggggagctacagcgacctaccgccgaggcgggccccaaccgcaccacgcctacttcaaaccctctcccacccccacctcctgccgttctcggaggggatcaagttcgcttctgcctgcgtgctctgctggagagctagatggcgatgccgtccgggtggaggggtatcctgggcttccactacggcatcgtgcaggcgccgttgggccccgacatctccggccccgagctcgtcgccgccgtggcgaacgccggcgccatcggcctcctccgcctccccgactggccggcgccggatcacgtcagagaactgatccggaagaccaggagcctcacgtccaagccgttcggggcggccatcgtgctggccttcccgcacgaggagaatctcagggtcgtcctggaggagaagctcgacgtgctgcaggtctactggggggacttccccaaccaccgggtccaagaggcgcatcgcgccggggttaaggtcttgcatcaggtcggcagccttgaggaggcagctaaagctaaagaagccggtgtagatgggatcattgttcagggacgtgaggcagggggtcatgtaattggtcaggaaggactgtttccactgttgccacgagtagtagatcttgtttcagactcgagcattccagttattgccgctggcggaattgtagatggacgtggctatgttgccgcattggcactcggtgcccaaggtgtttgtttaggaactaggtttgttgctaccgaggaaagctttgcacatcctattttataagcaaaagctaatcgagatgagtcacacagactacacaaatatattcggacgtgctagatggcctgatgctccacagcgggtcctggaaacacccttctatgatgagtggaagaataatttcccagaccaggaaacagaggaagatcaacccatcataggccactctatcatccatggtgtgcacaaggatattcgtcggtttgccggtactgttccaaacgcgacggcaacaggagatatcgacatcatggccatgtattcgggtcagggtgttgggctaatcacggaaatcataccagctgctcaagttgtcaaaagtctggtcgctgaagcgaaggaagtcatcagagaaaagctttctggttaccaatagaatccttcctgaactgcaaactagaagtatctgtgtgtgagtagtcaccaatcagaataatcggaagcaccaaggtttaggtttgattcttgtgctatttttaagtacaataaagtaaaaaatgatgaaaataaacgagactaacaaaggtattctgtcagacatttgtgtgcgtgtgtgcgcgctctgcatatctgtaatagttttggagtgtcttcacatagccctgaaggtcttcaaaagggtatttttggaggataggttgct

SEQ ID NO: 19759 - protein, 214 aa, Zea mays subsp. mays
  peptide (1)..(214): Ceres Seq. ID no. 12418695
  misc_feature (8)..(213): Pfam Name: 2-nitropropane dioxygenase Pfam Description: 2-nitropropane dioxygenase
  misc_feature (10)..(207): Homolog of NCBI NO: 23111355 NR Description: hypothetical protein [Desulfitobacterium
  misc_feature (10)..(211): Homolog of NCBI NO: 15896810 NR Description: Dioxygenase related to 2-nitropropane dioxygenase
  misc_feature (10)..(214): Homolog of NCBI NO: 27378254 NR Description: bll3143 [Bradyrhizobium japonicum]
  misc_feature (29)..(213): Homolog of NCBI NO: 15643563 NR Description: conserved hypothetical protein [Thermotoga
  misc_feature (10)..(212): Homolog of NCBI NO: 16799884 NR Description: similar to oxidoreductases [Listeria innocua]
  misc_feature (10)..(212): Homolog of NCBI NO: 16802856 NR Description: similar to oxidoreductases [Listeria
  misc_feature (10)..(212): Homolog of NCBI NO: 20807921 NR Description: Dioxygenases related to 2-nitropropane
  misc_feature (26)..(212): Homolog of NCBI NO: 38505809 NR Description: 2-nitropropane dioxygenase [Synechocystis sp. PCC
  misc_feature (52)..(213): Homolog of NCBI NO: 30697978 NR Description: 2-nitropropane dioxygenase-related protein
  misc_feature (8)..(213): Homolog of NCBI NO: 30697982 NR Description: 2-nitropropane dioxygenase-related protein
MAMPSGWRGILGFHYGIVQAPLGPDISGPELVAAVANAGAIGLLRLPDWPAPDHVRELIRKTRSLTSKPFGAAIVLAFPHEENLRVVLEEKLDVLQVYWGDFPNHRVQEAHRAGVKVLHQVGSLEEAAKAKEAGVDGIIVQGREAGGHVIGQEGLFPLLPRVVDLVSDSSIPVIAAGGIVDGRGYVAALALGAQGVCLGTRFVATEESFAHPIL

SEQ ID NO: 19760 - protein, 212 aa, Zea mays subsp. mays
  peptide (1)..(212): Ceres Seq. ID no. 12418696
  misc_feature (6)..(211): Pfam Name: 2-nitropropane dioxygenase Pfam Description: 2-nitropropane dioxygenase
  misc_feature (8)..(205): Homolog of NCBI NO: 23111355 NR Description: hypothetical protein [Desulfitobacterium
  misc_feature (8)..(209): Homolog of NCBI NO: 15896810 NR Description: Dioxygenase related to 2-nitropropane dioxygenase
  misc_feature (8)..(212): Homolog of NCBI NO: 27378254 NR Description: bll3143 [Bradyrhizobium japonicum]
  misc_feature (27)..(211): Homolog of NCBI NO: 15643563 NR Description: conserved hypothetical protein [Thermotoga
  misc_feature (8)..(210): Homolog of NCBI NO: 16799884 NR Description: similar to oxidoreductases [Listeria innocua]
  misc_feature (8)..(210): Homolog of NCBI NO: 16802856 NR Description: similar to oxidoreductases [Listeria
  misc_feature (8)..(210): Homolog of NCBI NO: 20807921 NR Description: Dioxygenases related to 2-nitropropane
  misc_feature (24)..(210): Homolog of NCBI NO: 38505809 NR Description: 2-nitropropane dioxygenase [Synechocystis sp. PCC
  misc_feature (50)..(211): Homolog of NCBI NO: 30697978 NR Description: 2-nitropropane dioxygenase-related protein
  misc_feature (6)..(211): Homolog of NCBI NO: 30697982 NR Description: 2-nitropropane dioxygenase-related protein
MPSGWRGILGFHYGIVQAPLGPDISGPELVAAVANAGAIGLLRLPDWPAPDHVRELIRKTRSLTSKPFGAAIVLAFPHEENLRVVLEEKLDVLQVYWGDFPNHRVQEAHRAGVKVLHQVGSLEEAAKAKEAGVDGIIVQGREAGGHVIGQEGLFPLLPRVVDLVSDSSIPVIAAGGIVDGRGYVAALALGAQGVCLGTRFVATEESFAHPIL

SEQ ID NO: 19761 - protein, 126 aa, Zea mays subsp. mays
  peptide (1)..(126): Ceres Seq. ID no. 12418697
MTPRVVDGPPQLPSRPFRSPHGEGSYSDLPPRRAPTAPRLLQTLSHPHLLPFSEGIKFASACVLCWRARWRCRPGGGVSWASTTASCRRRWAPTSPAPSSSPPWRTPAPSASSASPTGRRRITSEN

SEQ ID NO: 19762 - DNA, 1252 bp, Zea mays subsp. mays
  misc_feature (1)..(1252): Ceres Seq. ID no. 12364488
  misc_feature: MA Experiment ID: 108522 Result: Up-regulated in Transcription
  misc_feature: MA Experiment 108522 PARAMETER Experiment Name: Zm_42deg_Heat_P Parameter: Age (day) Value: 8
  misc_feature: MA Experiment 108522 PARAMETER Experiment Name: Zm_42deg_Heat_P Parameter: Organism Value: Zea mays
  misc_feature: MA Experiment 108522 PARAMETER Experiment Name: Zm_42deg_Heat_P Parameter: Plant Line Value: 35A19
  misc_feature: MA Experiment 108522 PARAMETER Experiment Name: Zm_42deg_Heat_P Parameter: Temperature (deg C) Value: 42 vs. 22
  misc_feature: MA Experiment 108522 PARAMETER Experiment Name: Zm_42deg_Heat_P Parameter: Timepoint (hr) Value: 1
  misc_feature: MA Experiment 108522 PARAMETER Experiment Name: Zm_42deg_Heat_P Parameter: Tissue Value: Aerial
  misc_feature: MA Experiment ID: 108523 Result: Up-regulated in Transcription
  misc_feature: MA Experiment 108523 PARAMETER Experiment Name: Zm_42deg_Heat_P Parameter: Age (day) Value: 8
  misc_feature: MA Experiment 108523 PARAMETER Experiment Name: Zm_42deg_Heat_P Parameter: Organism Value: Zea mays
  misc_feature: MA Experiment 108523 PARAMETER Experiment Name: Zm_42deg_Heat_P Parameter: Plant Line Value: 35A19
  misc_feature: MA Experiment 108523 PARAMETER Experiment Name: Zm_42deg_Heat_P Parameter: Temperature (deg C) Value: 42 vs. 22
  misc_feature: MA Experiment 108523 PARAMETER Experiment Name: Zm_42deg_Heat_P Parameter: Timepoint (hr) Value: 6
  misc_feature: MA Experiment 108523 PARAMETER Experiment Name: Zm_42deg_Heat_P Parameter: Tissue Value: Aerial
  misc_feature: MA Experiment ID: 108527 Result: Up-regulated in Transcription
  misc_feature: MA Experiment 108527 PARAMETER Experiment Name: Zm_5mM_NO_P Parameter: Age (day) Value: 8
  misc_feature: MA Experiment 108527 PARAMETER Experiment Name: Zm_5mM_NO_P Parameter: Organism Value: Zea mays
  misc_feature: MA Experiment 108527 PARAMETER Experiment Name: Zm_5mM_NO_P Parameter: Plant Line Value: 35A19
  misc_feature: MA Experiment 108527 PARAMETER Experiment Name: Zm_5mM_NO_P Parameter: Timepoint (hr) Value: 6
  misc_feature: MA Experiment 108527 PARAMETER Experiment Name: Zm_5mM_NO_P Parameter: Tissue Value: Aerial
  misc_feature: MA Experiment 108527 PARAMETER Experiment Name: Zm_5mM_NO_P Parameter: Treatment Value: 5mM NO vs. No Treatment
  misc_feature: MA Experiment ID: 108547 Result: Down-regulated in Transcription
  misc_feature: MA Experiment 108547 PARAMETER Experiment Name: Zm_Imbibed_Seeds_P Parameter: Age (day) Value: 4 vs. 2
  misc_feature: MA Experiment 108547 PARAMETER Experiment Name: Zm_Imbibed_Seeds_P Parameter: Organism Value: Zea mays
  misc_feature: MA Experiment 108547 PARAMETER Experiment Name: Zm_Imbibed_Seeds_P Parameter: Plant Line Value: 35A19
  misc_feature: MA Experiment 108547 PARAMETER Experiment Name: Zm_Imbibed_Seeds_P Parameter: Tissue Value: Aerial vs. Embryo
gcacgagaccattacctagaacatcctaatcgaaaaagcacagcagagcgccactcgactcgactcatcctttcggttcccctcccccctccgcgttccacaaccctcgagaagcttccaccctcccctcctgcgacgccgccagagccgcggaaaccctacccaccccggccgctcacgcaccgggcgcccgccgccgccggtcgcgtacctgccgccgacaccgcccaaagcgattggatctagagatcgtcagtagccacgatggaggactgggattctgaagaattccagccagttgtgcctgttgtgaaagccgagccacttaaaaatcagtgggctgatgaagatgttgaagaagatgatgtaaaagaatcatgggaagaagaggaggaggaggagaaacctaagccagcgccagtggaaaaggtcgctgcaaaacctagcactaaggctcctgctaaaaagggaaaacagcaagcattgacaagtgctgaagaaccagatgagcctcctcttagtcccacttcacagaaaattcgccaacaaagacttgtggaagaagctgacttcaagtctaccaccgagctttttgcaaagaagggcagtgagcaaaagtcactagatacttttattccaaagtccgagagtgactttgcggaatacgcggagcttattgcaaacaaactacgcccctatgagaaaagctttcactacatggctctgcttaagaatgtcatgagactttccatgacatcgttgaaaggtgcggacgccaaagatatatcttcttccgtgacggcaattgctaacgagaagatcaaggctgagaaggaggctgcagcaggcaaaaagaaacaaggagcgaaaaagaagcaactccacatcgagaaaggagacgacgacttcatccccggccggggtggtggctacgatgaccccgatgagtacgacttcatgtgatctggctgggagggatagtaggtttctgttatgtatacctttggcgggcagagaatatatcactagagtttgcggcatactattgcatggaacatgcgttatctattcgagaatgatttttgactctgcaggataagaagagcacttgtgatctggatgcatgggtgttttcttatttatccttgaatctttgggttatttttttttcaacattgcattttttgccaaatgtactatagtaccttgtactatctggttactccgtgagtcatgaaagcaattaaatccc

SEQ ID NO: 19763 - protein, 232 aa, Zea mays subsp. mays
  peptide (1)..(232): Ceres Seq. ID no. 12364489
  misc_feature (2)..(232): Homolog of NCBI NO: 27374242 NR Description: CG12131-PA [Drosophila erecta]
  misc_feature (2)..(232): Homolog of NCBI NO: 19921950 NR Description: CG12131-PA [Drosophila melanogaster]
  misc_feature (2)..(232): Homolog of NCBI NO: 34856798 NR Description: similar to Eukaryotic translation initiation
  misc_feature (2)..(232): Homolog of NCBI NO: 27374365 NR Description: Adam-PA [Drosophila willistoni]
  misc_feature (2)..(232): Homolog of NCBI NO: 23503065 NR Description: Eukaryotic translation initiation factor 3
  misc_feature (2)..(232): Homolog of NCBI NO: 10435304 NR Description: unnamed protein product [Homo sapiens]
  misc_feature (2)..(232): Homolog of NCBI NO: 4503511 NR Description: eukaryotic translation initiation factor 3,
  misc_feature (1)..(232): Homolog of NCBI NO: 32766433 NR Description: Unknown (protein for MGC:63801) [Danio rerio]
  misc_feature (1)..(232): Homolog of NCBI NO: 30693092 NR Description: expressed protein [Arabidopsis thaliana]
  misc_feature (1)..(232): Homolog of NCBI NO: 18408426 NR Description: expressed protein
MEDWDSEEFQPVVPVVKAEPLKNQWADEDVEEDDVKESWEEEEEEEKPKPAPVEKVAAKPSTKAPAKKGKQQALTSAEEPDEPPLSPTSQKIRQQRLVEEADFKSTTELFAKKGSEQKSLDTFIPKSESDFAEYAELIANKLRPYEKSFHYMALLKNVMRLSMTSLKGADAKDISSSVTAIANEKIKAEKEAAAGKKKQGAKKKQLHIEKGDDDFIPGRGGGYDDPDEYDFM

SEQ ID NO: 19764 - DNA, 767 bp, Zea mays subsp. mays; identical to SEQ ID NO: 15469
  misc_feature (1)..(767): Ceres Seq. ID no. 13635648
  misc_feature: MA Experiment ID: 108527 Result: Down-regulated in Transcription
  misc_feature: MA Experiment 108527 PARAMETER Experiment Name: Zm_5mM_NO_P Parameter: Age (day) Value: 8
  misc_feature: MA Experiment 108527 PARAMETER Experiment Name: Zm_5mM_NO_P Parameter: Organism Value: Zea mays
  misc_feature: MA Experiment 108527 PARAMETER Experiment Name: Zm_5mM_NO_P Parameter: Plant Line Value: 35A19
  misc_feature: MA Experiment 108527 PARAMETER Experiment Name: Zm_5mM_NO_P Parameter: Timepoint (hr) Value: 6
  misc_feature: MA Experiment 108527 PARAMETER Experiment Name: Zm_5mM_NO_P Parameter: Tissue Value: Aerial
  misc_feature: MA Experiment 108527 PARAMETER Experiment Name: Zm_5mM_NO_P Parameter: Treatment Value: 5mM NO vs. No Treatment

SEQ ID NO: 19765 - protein, 255 aa, Zea mays subsp. mays; identical to SEQ ID NO: 15470
  peptide (1)..(255): Ceres Seq. ID no. 13635649
  misc_feature (131)..(254): Pfam Name: Dynamin central region Pfam Description: Dynamin central region
  misc_feature (2)..(254): Homolog of NCBI NO: 18071348 NR Description: putative GTP-binding protein [Oryza sativa
  misc_feature (2)..(254): Homolog of NCBI NO: 37536976 NR Description: putative phragmoplastin [Oryza sativa (japonica group)] >gi|18854996|gb|AAL79688.1| putative phragmoplastin sativa] >gi|31433579|gb|AAP55077.1| putative phragmoplastin
  misc_feature (2)..(254): Homolog of NCBI NO: 6651403 NR Description: dynamin-like protein 5 [Arabidopsis thaliana]
  misc_feature (2)..(254): Homolog of NCBI NO: 19569772 NR Description: dynamin-like protein C [Arabidopsis thaliana]
  misc_feature (2)..(254): Homolog of NCBI NO: 21537304 NR Description: dynamin, putative [Arabidopsis thaliana]
  misc_feature (2)..(254): Homolog of NCBI NO: 15223914 NR Description: dynamin -related [Arabidopsis thaliana]
  misc_feature (2)..(254): Homolog of NCBI NO: 11357275 NR Description: dynamin-like protein 4 (ADL4) - Arabidopsis
  misc_feature (2)..(254): Homolog of NCBI NO: 18411520 NR Description: dynamin-related protein 4 (ADL4) [Arabidopsis
  misc_feature (2)..(254): Homolog of NCBI NO: 6651401 NR Description: dynamin-like protein 4 [Arabidopsis thaliana]
  misc_feature (4)..(254): Homolog of NCBI NO: 7484944 NR Description: probable phragmoplastin At2g44590 [imported] - thaliana >gi|3341679|gb|AAC27461.1| putative phragmoplastin

SEQ ID NO: 19766 - protein, 182 aa, Zea mays subsp. mays; identical to SEQ ID NO: 15471
  peptide (1)..(182): Ceres Seq. ID no. 13635650
  misc_feature (58)..(181): Pfam Name: Dynamin central region Pfam Description: Dynamin central region
  misc_feature (1)..(181): Homolog of NCBI NO: 18071348 NR Description: putative GTP-binding protein [Oryza sativa
  misc_feature (1)..(181): Homolog of NCBI NO: 37536976 NR Description: putative phragmoplastin [Oryza sativa (japonica group)] >gi|18854996|gb|AAL79688.1| putative phragmoplastin sativa] >gi|31433579|gb|AAP55077.1| putative phragmoplastin
  misc_feature (1)..(181): Homolog of NCBI NO: 6651403 NR Description: dynamin-like protein 5 [Arabidopsis thaliana]
  misc_feature (1)..(181): Homolog of NCBI NO: 19569772 NR Description: dynamin-like protein C [Arabidopsis thaliana]
  misc_feature (1)..(181): Homolog of NCBI NO: 21537304 NR Description: dynamin, putative [Arabidopsis thaliana]
  misc_feature (1)..(181): Homolog of NCBI NO: 15223914 NR Description: dynamin -related [Arabidopsis thaliana]
  misc_feature (1)..(181): Homolog of NCBI NO: 11357275 NR Description: dynamin-like protein 4 (ADL4) - Arabidopsis
  misc_feature (1)..(181): Homolog of NCBI NO: 18411520 NR Description: dynamin-related protein 4 (ADL4) [Arabidopsis
  misc_feature (1)..(181): Homolog of NCBI NO: 6651401 NR Description: dynamin-like protein 4 [Arabidopsis thaliana]
  misc_feature (1)..(181): Homolog of NCBI NO: 7484944 NR Description: probable phragmoplastin At2g44590 [imported] - thaliana >gi|3341679|gb|AAC27461.1| putative phragmoplastin

SEQ ID NO: 19767 - protein, 131 aa, Zea mays subsp. mays; identical to SEQ ID NO: 15472
  peptide (1)..(131): Ceres Seq. ID no. 13635651
  misc_feature (7)..(130): Pfam Name: Dynamin central region Pfam Description: Dynamin central region
  misc_feature (1)..(130): Homolog of NCBI NO: 18071348 NR Description: putative GTP-binding protein [Oryza sativa
  misc_feature (1)..(130): Homolog of NCBI NO: 37536976 NR Description: putative phragmoplastin [Oryza sativa (japonica group)] >gi|18854996|gb|AAL79688.1| putative phragmoplastin sativa] >gi|31433579|gb|AAP55077.1| putative phragmoplastin
  misc_feature (1)..(130): Homolog of NCBI NO: 6651403 NR Description: dynamin-like protein 5 [Arabidopsis thaliana]
  misc_feature (1)..(130): Homolog of NCBI NO: 21537304 NR Description: dynamin, putative [Arabidopsis thaliana]
  misc_feature (1)..(130): Homolog of NCBI NO: 19569772 NR Description: dynamin-like protein C [Arabidopsis thaliana]
  misc_feature (1)..(130): Homolog of NCBI NO: 15223914 NR Description: dynamin -related [Arabidopsis thaliana]
  misc_feature (1)..(130): Homolog of NCBI NO: 11357275 NR Description: dynamin-like protein 4 (ADL4) - Arabidopsis
  misc_feature (1)..(130): Homolog of NCBI NO: 18411520 NR Description: dynamin-related protein 4 (ADL4) [Arabidopsis
  misc_feature (1)..(130): Homolog of NCBI NO: 6651401 NR Description: dynamin-like protein 4 [Arabidopsis thaliana]
  misc_feature (1)..(130): Homolog of NCBI NO: 7484944 NR Description: probable phragmoplastin At2g44590 [imported] - thaliana >gi|3341679|gb|AAC27461.1| putative phragmoplastin

SEQ ID NO: 19768 - DNA, 1063 bp, Zea mays subsp. mays
  misc_feature (1)..(1063): Ceres Seq. ID no. 12418691
  misc_feature: MA Experiment ID: 108559 Result: Down-regulated in Transcription
  misc_feature: MA Experiment 108559 PARAMETER Experiment Name: Zm_5mM_NO_P Parameter: Age (day) Value: 8
  misc_feature: MA Experiment 108559 PARAMETER Experiment Name: Zm_5mM_NO_P Parameter: Organism Value: Zea mays
  misc_feature: MA Experiment 108559 PARAMETER Experiment Name: Zm_5mM_NO_P Parameter: Plant Line Value: 35A19
  misc_feature: MA Experiment 108559 PARAMETER Experiment Name: Zm_5mM_NO_P Parameter: Timepoint (hr) Value: 12
  misc_feature: MA Experiment 108559 PARAMETER Experiment Name: Zm_5mM_NO_P Parameter: Tissue Value: Aerial
  misc_feature: MA Experiment 108559 PARAMETER Experiment Name: Zm_5mM_NO_P Parameter: Treatment Value: 5mM NO vs. No Treatment
gcacgagaccattacctagaacatcctaatcaaaaatcccgcatccggcacaaaccaactgcatcaagctccaccagagaagacaggcccgccgacggccgcagccgcgggcggactcgtgagtcgcgactacgccgctgcagttcccaactcagggtgcctgcccgtaacctacccaagagcggccccgccatgcgcgcggaggtcacccagatcagcgccctaaccgccgtggccgcgcacgtgctctgctctgcgggccttgctgccgcccacgccctcgctggccgcggcgcgctcgtctccgaccccgcgctcgcccttcgccttctcgtggtctgtgaagcgcccatagtcatcgcagtgttcagctacctccggcgtgatgctaaaagttgctcgtttttcagggctgttgcaagaggattgatcggcttgcccgtgggagcgttccttaatgcatttggagcaatcattcttggggcacctgttggagtcaagtactggatagctactatttactggtcgcttgtcatgtccctgtttacgtttgttcccgcagcatgtgtctttggagcatccaggatcgattggcaggatgtgctttctcactccatttatttcacgccaactgatgttgagaactacatgatctctgcaccttgccatggagctgtgctaggagcgtggctcggtgcttggcctatgccacttgactgggagagaccatggcaggaatggccaatctgtgtcacttatggtgcagttgctgggtatttgttcggaatggcagtgtcattggtcctaacagcactttacaaaagaagggttcgtgcaaaagctgactagccgttcttcccacaaagcaatgtatttgctgataacatttcttgttcctgcgagtactcatcactttcagtagccttttcacccaggttcacattgttgtattcttttgaagcccccctcattttttttgcagttgtacattgttttcttgaatgtaatgtgaaggactcagtttattactgtaaaacacacgtttgttgagagagtgcgtgtt

SEQ ID NO: 19769 - protein, 282 aa, Zea mays subsp. mays
  peptide (1)..(282): Ceres Seq. ID no. 12418692
  misc_feature (143)..(268): Homolog of NCBI NO: 40742646 NR Description: hypothetical protein AN7650.2 [Aspergillus
  misc_feature (158)..(245): Homolog of NCBI NO: 27894291 NR Description: phosphatidylinositol glycan, class F isoform 2
  misc_feature (142)..(269): Homolog of NCBI NO: 19075814 NR Description: putative short-chain dehydrogenase
  misc_feature (158)..(266): Homolog of NCBI NO: 4505797 NR Description: phosphatidylinositol glycan, class F isoform 1
  misc_feature (108)..(266): Homolog of NCBI NO: 22135636 NR Description: phosphatidylinositol glycan, class F [Mus
  misc_feature (108)..(266): Homolog of NCBI NO: 6679315 NR Description: phosphatidylinositol glycan, class F [Mus
  misc_feature (60)..(270): Homolog of NCBI NO: 25518421 NR Description: hypothetical protein T24D18.15 - Arabidopsis
  misc_feature (60)..(276): Homolog of NCBI NO: 30684686 NR Description: expressed protein [Arabidopsis thaliana]
ARDHYLEHPNQKSRIRHKPTASSSTREDRPADGRSRGRTRESRLRRCSSQLRVPARNLPKSGPAMRAEVTQISALTAVAAHVLCSAGLAAAHALAGRGALVSDPALALRLLVVCEAPIVIAVFSYLRRDAKSCSFFRAVARGLIGLPVGAFLNAFGAIILGAPVGVKYWIATIYWSLVMSLFTFVPAACVFGASRIDWQDVLSHSIYFTPTDVENYMISAPCHGAVLGAWLGAWPMPLDWERPWQEWPICVTYGAVAGYLFGMAVSLVLTALYKRRVRAKAD

SEQ ID NO: 19770 - protein, 218 aa, Zea mays subsp. mays
  peptide (1)..(218): Ceres Seq. ID no. 12418693
  misc_feature (79)..(204): Homolog of NCBI NO: 40742646 NR Description: hypothetical protein AN7650.2 [Aspergillus
  misc_feature (94)..(181): Homolog of NCBI NO: 27894291 NR Description: phosphatidylinositol glycan, class F isoform 2
  misc_feature (78)..(205): Homolog of NCBI NO: 19075814 NR Description: putative short-chain dehydrogenase
  misc_feature (94)..(202): Homolog of NCBI NO: 4505797 NR Description: phosphatidylinositol glycan, class F isoform 1
  misc_feature (44)..(202): Homolog of NCBI NO: 22135636 NR Description: phosphatidylinositol glycan, class F [Mus
  misc_feature (44)..(202): Homolog of NCBI NO: 6679315 NR Description: phosphatidylinositol glycan, class F [Mus
  misc_feature (1)..(206): Homolog of NCBI NO: 25518421 NR Description: hypothetical protein T24D18.15 - Arabidopsis
  misc_feature (1)..(212): Homolog of NCBI NO: 30684686 NR Description: expressed protein [Arabidopsis thaliana]
MRAEVTQISALTAVAAHVLCSAGLAAAHALAGRGALVSDPALALRLLVVCEAPIVIAVFSYLRRDAKSCSFFRAVARGLIGLPVGAFLNAFGAIILGAPVGVKYWIATIYWSLVMSLFTFVPAACVFGASRIDWQDVLSHSIYFTPTDVENYMISAPCHGAVLGAWLGAWPMPLDWERPWQEWPICVTYGAVAGYLFGMAVSLVLTALYKRRVRAKAD

SEQ ID NO: 19771 - DNA, 1980 bp, Zea mays subsp. mays
  misc_feature (1)..(1980): Ceres Seq. ID no. 12418235
  misc_feature: MA Experiment ID: 108535 Result: Up-regulated in Transcription
  misc_feature: MA Experiment 108535 PARAMETER Experiment Name: Zm_Meristem_P Parameter: Age (day) Value: 8
  misc_feature: MA Experiment 108535 PARAMETER Experiment Name: Zm_Meristem_P Parameter: Organism Value: Zea mays
  misc_feature: MA Experiment 108535 PARAMETER Experiment Name: Zm_Meristem_P Parameter: Plant Line Value: 35A19
  misc_feature: MA Experiment 108535 PARAMETER Experiment Name: Zm_Meristem_P Parameter: Tissue Value: Root Meristem vs. Above Root Meristem
  misc_feature: MA Experiment ID: 20000108 Result: Up-regulated in Transcription
  misc_feature: MA Experiment 20000108 PARAMETER Experiment Name: Zm_Root-Tips_P Parameter: Age (day) Value: 12
  misc_feature: MA Experiment 20000108 PARAMETER Experiment Name: Zm_Root-Tips_P Parameter: Organism Value: Zea mays
  misc_feature: MA Experiment 20000108 PARAMETER Experiment Name: Zm_Root-Tips_P Parameter: Tissue Value: Root tips vs. Root mid region    35
  misc_feature: MA Experiment 20000108 PARAMETER Experiment Name: Zm_Root-Tips_P Parameter: Tissue Value: Root tips vs. Root mid region   Sequence Listing-Misc Features (4)
gtcggtccaagagcacgacgagcagacgacgctgccggcccggccgtgctgctcctctgagtccgagatctgaaggcgcggcaggaaggaaacgggcgggcgagaggatccagcagccctcccccacgcgcgcgcgacggttagcgcgtcccagatctcggtgcggcgcctcccgcccggccctgccggcgagagcgcggcccgatgaggcggcggccgttcctggagcagcggcggccttcgttcaagcgccggtggcagcagcgcccgtggtgggtgcgcctcgcgctttccctccttctcgccctcgcatgcgtcctcctcctcgccgtcctcctcggctcccccgaccccggcgcctcgccgtccacctccgccgcgtcctccggatctgagaccacctcctcacctctcctccgtcagagaacttacctggagggaatcacggatgcgctcaacatgactgacgaaatgctgagcgcccgctcgttctcgaggcagctcatggaccagatttatctagccaaaacatatgtcgtcgttgccaaggaggccaacaacctcagtttgtggcggagcttagtgcccaggtacggcgggcgcagagcatccttgcgcatgctgcagcctatgggggcacggtgatggagcaggaagcagagaaggcgatcagggatatgtcggtgctgctcttccaggcgcagcagcttcggtacgtagcagtatcacaatcatgaagttgaaaggccagattcagtccctagaggagaagtcaaaagttgaggtggagaaaagcacaaaatatggccagattgctgctgaggagctcccaaagggactttattgccttggtatccggttaaccatggaatggttcaagagtcccgagcttcagaggaagttttcggataggagcccagcagtgcagagcaatctgagtgataacagcctctaccatttttgtgtcttctcagacaacatccttgctgtttcagttgttgttaattctacggctataaactcgaggcaccctgacaaggttgtttttcacttagtgactgatgagttgaactatgctccgatgaaggcatggtttggcatgaatgactacagaggggtcaccgtggagatacaaaaggtggaggactttacctggctcaatgcatcgtatgttcccgttcttaaacagctacagaatgctgctacacagaagttctacttctctggcagtggtagtcgtggaacaccaattaaattcaggaacccaaagtacttatcaatgcttaaccacttgaggttttatattccagaaatatatcctgaattgcagaaggtggtatttcttgatgatgatatcgttgttcagaaggacctatcagaattgtttactatcaacctcaatggcaatgtgatgggtgctgtagagacttgcatggagacattccacagatttcataagtatcttaaccattcccatccgctaatccgtgctcattttgaccctgatgcttgcggctgggcatttggtatgaacgtgcttgatctggttgaatggaggaacaagaatgtgacaggcatatatcattattggcaggagcgcaatgctgatcatactctatggaagcttgggtctttaccacctggacttcttgctttctatggcttggttgaagcattggatcccaaatggcatgtcttgggacttggctacacaaatgtggatcttgctactatcaaggaaggtgcagtactgcactacaatggaaatatgaagccatggctcaaaatcggaatggagaagtacaagagcttttgggataactatgtggactattcacaccctttgattcagcagtgcttcatgcgttgattgatgtgtatcaacattagaatttttgtaagcttcatggtagatatgttccgagcacatgctccaactgccacacggaaacattgtagttaaatcagttggcttttctc

SEQ ID NO: 19772 - protein, 378 aa, Zea mays subsp. mays
  peptide (1)..(378): Ceres Seq. ID no. 12418236
  misc_feature (2)..(375): Homolog of NCBI NO: 7485958 NR Description: hypothetical protein F22I13.40 - Arabidopsis
  misc_feature (1)..(375): Homolog of NCBI NO: 38423965 NR Description: putative glycosyltransferase
  misc_feature (1)..(375): Homolog of NCBI NO: 18422837 NR Description: putative protein
  misc_feature (1)..(375): Homolog of NCBI NO: 10177914 NR Description: emb|CAB71043.1~gene_id:MCA23.10~strong similarity
  misc_feature (2)..(375): Homolog of NCBI NO: 7271113 NR Description: 68 kDa protein [Cicer arietinum]
  misc_feature (2)..(375): Homolog of NCBI NO: 15233046 NR Description: putative protein
  misc_feature (1)..(375): Homolog of NCBI NO: 15293067 NR Description: unknown protein [Arabidopsis thaliana]
  misc_feature (1)..(358): Homolog of NCBI NO: 25411994 NR Description: hypothetical protein At2g20810 [imported] -
  misc_feature (1)..(375): Homolog of NCBI NO: 18399484 NR Description: Expressed protein
  misc_feature (1)..(376): Homolog of NCBI NO: 32492171 NR Description: OSJNBb0034I13.1 [Oryza sativa (japonica
MKLKGQIQSLEEKSKVEVEKSTKYGQIAAEELPKGLYCLGIRLTMEWFKSPELQRKFSDRSPAVQSNLSDNSLYHFCVFSDNILAVSVVVNSTAINSRHPDKVVFHLVTDELNYAPMKAWFGMNDYRGVTVEIQKVEDFTWLNASYVPVLKQLQNAATQKFYFSGSGSRGTPIKFRNPKYLSMLNHLRFYIPEIYPELQKVVFLDDDIVVQKDLSELFTINLNGNVMGAVETCMETFHRFHKYLNHSHPLIRAHFDPDACGWAFGMNVLDLVEWRNKNVTGIYHYWQERNADHTLWKLGSLPPGLLAFYGLVEALDPKWHVLGLGYTNVDLATIKEGAVLHYNGNMKPWLKIGMEKYKSFWDNYVDYSHPLIQQCFMR

SEQ ID NO: 19773 - protein, 334 aa, Zea mays subsp. mays
  peptide (1)..(334): Ceres Seq. ID no. 12418237
  misc_feature (1)..(331): Homolog of NCBI NO: 7485958 NR Description: hypothetical protein F22I13.40 - Arabidopsis
  misc_feature (1)..(331): Homolog of NCBI NO: 38423965 NR Description: putative glycosyltransferase
  misc_feature (1)..(331): Homolog of NCBI NO: 18422837 NR Description: putative protein
  misc_feature (1)..(331): Homolog of NCBI NO: 10177914 NR Description: emb|CAB71043.1~gene_id:MCA23.10~strong similarity
  misc_feature (1)..(331): Homolog of NCBI NO: 7271113 NR Description: 68 kDa protein [Cicer arietinum]
  misc_feature (1)..(331): Homolog of NCBI NO: 15233046 NR Description: putative protein
  misc_feature (1)..(331): Homolog of NCBI NO: 15293067 NR Description: unknown protein [Arabidopsis thaliana]
  misc_feature (1)..(314): Homolog of NCBI NO: 25411994 NR Description: hypothetical protein At2g20810 [imported] -
  misc_feature (1)..(331): Homolog of NCBI NO: 18399484 NR Description: Expressed protein
  misc_feature (1)..(332): Homolog of NCBI NO: 32492171 NR Description: OSJNBb0034I13.1 [Oryza sativa (japonica
MEWFKSPELQRKFSDRSPAVQSNLSDNSLYHFCVFSDNILAVSVVVNSTAINSRHPDKVVFHLVTDELNYAPMKAWFGMNDYRGVTVEIQKVEDFTWLNASYVPVLKQLQNAATQKFYFSGSGSRGTPIKFRNPKYLSMLNHLRFYIPEIYPELQKVVFLDDDIVVQKDLSELFTINLNGNVMGAVETCMETFHRFHKYLNHSHPLIRAHFDPDACGWAFGMNVLDLVEWRNKNVTGIYHYWQERNADHTLWKLGSLPPGLLAFYGLVEALDPKWHVLGLGYTNVDLATIKEGAVLHYNGNMKPWLKIGMEKYKSFWDNYVDYSHPLIQQCFMR

SEQ ID NO: 19774 - protein, 262 aa, Zea mays subsp. mays
  peptide (1)..(262): Ceres Seq. ID no. 12418238
  misc_feature (1)..(259): Homolog of NCBI NO: 10177914 NR Description: emb|CAB71043.1~gene_id:MCA23.10~strong similarity
  misc_feature (1)..(259): Homolog of NCBI NO: 7271113 NR Description: 68 kDa protein [Cicer arietinum]
  misc_feature (1)..(259): Homolog of NCBI NO: 15233046 NR Description: putative protein
  misc_feature (1)..(259): Homolog of NCBI NO: 15293067 NR Description: unknown protein [Arabidopsis thaliana]
  misc_feature (1)..(242): Homolog of NCBI NO: 25411994 NR Description: hypothetical protein At2g20810 [imported] -
  misc_feature (1)..(259): Homolog of NCBI NO: 18399484 NR Description: Expressed protein
  misc_feature (1)..(260): Homolog of NCBI NO: 32492171 NR Description: OSJNBb0034I13.1 [Oryza sativa (japonica
  misc_feature (1)..(259): Homolog of NCBI NO: 7485958 NR Description: hypothetical protein F22I13.40 - Arabidopsis
  misc_feature (1)..(259): Homolog of NCBI NO: 38423965 NR Description: putative glycosyltransferase
  misc_feature (1)..(259): Homolog of NCBI NO: 18422837 NR Description: putative protein
MKAWFGMNDYRGVTVEIQKVEDFTWLNASYVPVLKQLQNAATQKFYFSGSGSRGTPIKFRNPKYLSMLNHLRFYIPEIYPELQKVVFLDDDIVVQKDLSELFTINLNGNVMGAVETCMETFHRFHKYLNHSHPLIRAHFDPDACGWAFGMNVLDLVEWRNKNVTGIYHYWQERNADHTLWKLGSLPPGLLAFYGLVEALDPKWHVLGLGYTNVDLATIKEGAVLHYNGNMKPWLKIGMEKYKSFWDNYVDYSHPLIQQCFMR

SEQ ID NO: 19775 - DNA, 1767 bp, Zea mays subsp. mays
  misc_feature (1)..(1767): Ceres Seq. ID no. 12454825
  misc_feature: MA Experiment ID: 108522 Result: Up-regulated in Transcription
  misc_feature: MA Experiment 108522 PARAMETER Experiment Name: Zm_42deg_Heat_P Parameter: Age (day) Value: 8
  misc_feature: MA Experiment 108522 PARAMETER Experiment Name: Zm_42deg_Heat_P Parameter: Organism Value: Zea mays
  misc_feature: MA Experiment 108522 PARAMETER Experiment Name: Zm_42deg_Heat_P Parameter: Plant Line Value: 35A19
  misc_feature: MA Experiment 108522 PARAMETER Experiment Name: Zm_42deg_Heat_P Parameter: Temperature (deg C) Value: 42 vs. 22
  misc_feature: MA Experiment 108522 PARAMETER Experiment Name: Zm_42deg_Heat_P Parameter: Timepoint (hr) Value: 1
  misc_feature: MA Experiment 108522 PARAMETER Experiment Name: Zm_42deg_Heat_P Parameter: Tissue Value: Aerial
  misc_feature: MA Experiment ID: 108523 Result: Up-regulated in Transcription
  misc_feature: MA Experiment 108523 PARAMETER Experiment Name: Zm_42deg_Heat_P Parameter: Age (day) Value: 8
  misc_feature: MA Experiment 108523 PARAMETER Experiment Name: Zm_42deg_Heat_P Parameter: Organism Value: Zea mays
  misc_feature: MA Experiment 108523 PARAMETER Experiment Name: Zm_42deg_Heat_P Parameter: Plant Line Value: 35A19
  misc_feature: MA Experiment 108523 PARAMETER Experiment Name: Zm_42deg_Heat_P Parameter: Temperature (deg C) Value: 42 vs. 22
  misc_feature: MA Experiment 108523 PARAMETER Experiment Name: Zm_42deg_Heat_P Parameter: Timepoint (hr) Value: 6
  misc_feature: MA Experiment 108523 PARAMETER Experiment Name: Zm_42deg_Heat_P Parameter: Tissue Value: Aerial
  misc_feature: MA Experiment ID: 108527 Result: Up-regulated in Transcription
  misc_feature: MA Experiment 108527 PARAMETER Experiment Name: Zm_5mM_NO_P Parameter: Age (day) Value: 8
  misc_feature: MA Experiment 108527 PARAMETER Experiment Name: Zm_5mM_NO_P Parameter: Organism Value: Zea mays
  misc_feature: MA Experiment 108527 PARAMETER Experiment Name: Zm_5mM_NO_P Parameter: Plant Line Value: 35A19
  misc_feature: MA Experiment 108527 PARAMETER Experiment Name: Zm_5mM_NO_P Parameter: Timepoint (hr) Value: 6
  misc_feature: MA Experiment 108527 PARAMETER Experiment Name: Zm_5mM_NO_P Parameter: Tissue Value: Aerial
  misc_feature: MA Experiment 108527 PARAMETER Experiment Name: Zm_5mM_NO_P Parameter: Treatment Value: 5mM NO vs. No Treatment
  misc_feature: MA Experiment ID: 108528 Result: Down-regulated in Transcription
  misc_feature: MA Experiment 108528 PARAMETER Experiment Name: Zm_Imbibed_Seeds_P Parameter: Age (day) Value: 5 vs. 2
  misc_feature: MA Experiment 108528 PARAMETER Experiment Name: Zm_Imbibed_Seeds_P Parameter: Organism Value: Zea mays
  misc_feature: MA Experiment 108528 PARAMETER Experiment Name: Zm_Imbibed_Seeds_P Parameter: Plant Line Value: 35A19
  misc_feature: MA Experiment 108528 PARAMETER Experiment Name: Zm_Imbibed_Seeds_P Parameter: Tissue Value: Aerial vs. Embryo
  misc_feature: MA Experiment ID: 108530 Result: Down-regulated in Transcription
  misc_feature: MA Experiment 108530 PARAMETER Experiment Name: Zm_Imbibed_Seeds_P Parameter: Age (day) Value: 6 vs. 2
  misc_feature: MA Experiment 108530 PARAMETER Experiment Name: Zm_Imbibed_Seeds_P Parameter: Organism Value: Zea mays
  misc_feature: MA Experiment 108530 PARAMETER Experiment Name: Zm_Imbibed_Seeds_P Parameter: Plant Line Value: 35A19
  misc_feature: MA Experiment 108530 PARAMETER Experiment Name: Zm_Imbibed_Seeds_P Parameter: Tissue Value: Aerial vs. Embryo
  misc_feature: MA Experiment ID: 108556 Result: Up-regulated in Transcription
  misc_feature: MA Experiment 108556 PARAMETER Experiment Name: Zm_Drought_P Parameter: Age (day) Value: 9
  misc_feature: MA Experiment 108556 PARAMETER Experiment Name: Zm_Drought_P Parameter: Organism Value: Zea mays
  misc_feature: MA Experiment 108556 PARAMETER Experiment Name: Zm_Drought_P Parameter: Plant Line Value: 35A19
  misc_feature: MA Experiment 108556 PARAMETER Experiment Name: Zm_Drought_P Parameter: Timepoint (hr) Value: 24
  misc_feature: MA Experiment 108556 PARAMETER Experiment Name: Zm_Drought_P Parameter: Tissue Value: Aerial
  misc_feature: MA Experiment 108556 PARAMETER Experiment Name: Zm_Drought_P Parameter: Treatment Value: Drought vs. No Drought
  misc_feature: MA Experiment ID: 20000478 Result: Up-regulated in Transcription
  misc_feature: MA Experiment 20000478 PARAMETER Experiment Name: Zm_5mM_SA_P Parameter: Age (day) Value: 11
  misc_feature: MA Experiment 20000478 PARAMETER Experiment Name: Zm_5mM_SA_P Parameter: Organism Value: Zea mays
  misc_feature: MA Experiment 20000478 PARAMETER Experiment Name: Zm_5mM_SA_P Parameter: Plant Line Value: 35A19
  misc_feature: MA Experiment 20000478 PARAMETER Experiment Name: Zm_5mM_SA_P Parameter: Timepoint (hr) Value: 72
  misc_feature: MA Experiment 20000478 PARAMETER Experiment Name: Zm_5mM_SA_P Parameter: Tissue Value: Aerial
  misc_feature: MA Experiment 20000478 PARAMETER Experiment Name: Zm_5mM_SA_P Parameter: Treatment Value: 5mM SA vs. No Treatment
  misc_feature: MA Experiment ID: 20000480 Result: Up-regulated in Transcription
  misc_feature: MA Experiment 20000480 PARAMETER Experiment Name: Zm_Drought_P Parameter: Age (day) Value: 11
  misc_feature: MA Experiment 20000480 PARAMETER Experiment Name: Zm_Drought_P Parameter: Organism Value: Zea mays
  misc_feature: MA Experiment 20000480 PARAMETER Experiment Name: Zm_Drought_P Parameter: Plant Line Value: 35A19
  misc_feature: MA Experiment 20000480 PARAMETER Experiment Name: Zm_Drought_P Parameter: Timepoint (hr) Value: 72
  misc_feature: MA Experiment 20000480 PARAMETER Experiment Name: Zm_Drought_P Parameter: Tissue Value: Aerial
  misc_feature: MA Experiment 20000480 PARAMETER Experiment Name: Zm_Drought_P Parameter: Treatment Value: Drought vs. No Drought
  misc_feature: MA Experiment ID: 20000626 Result: Up-regulated in Transcription
  misc_feature: MA Experiment 20000626 PARAMETER Experiment Name: Zm_Herbicide-Treatments_P Parameter: Timepoint (hr) Value: 12
  misc_feature: MA Experiment 20000626 PARAMETER Experiment Name: Zm_Herbicide-Treatments_P Parameter: Tissue Value: Aerial
  misc_feature: MA Experiment 20000626 PARAMETER Experiment Name: Zm_Herbicide-Treatments_P Parameter: Treatment Value: Roundup vs. No Treatment
cccccgtcgactcgcccgctccatcgcccccacgcacccgctgccggccaaaagccaattcgaatctccccgctgcgcggcggggcctctgcttccgcaatgcgggcctccgtcgaggaggcgggcgcgctcctggcgcggagcgactcagccggccgccgccgccgctccccgccgccggtgcagaccgcgtccccgaggcccggtagcctcaggcgccagtcgtcgtcgttccgcgaggacgtcgggcacgccgcctccgagacttacctcgtctcgcgcctcaccttcaccctcctccagtacctcgggttaggttaccgatggatgtcacaacttctttcactcacaatctatgcaattgtacttatgccaggatttatacaagttggatattactatttcttttcgagccaagtgcgtagaagtgtagtctatggagaccaacccagaaacaggttggatctatacataccagaagataatagtaggccctgtccagtggtggcctttgtgactggtggagcatggattattggttacaaggcatggggtgctcttctaggacgacgattggcagagcgaggaataatagttgcttgcattgattacagaaatttcccacaaggtacaataggggacatggttcatgatgcttctcaggggatttcttttgtgtgcaacaacatcgccagccatggaggagatcctaatcagatctacttgataggtcagtcagcaggtgcacatattgcagcgtgtgccctcatggagcaagcagtaaaagaatctggtgggaatcctgtttcttggagtcttacccaaatcaaagcatacttcggtttatctggagggtattaaattggatatctaatgaagtggtatctagtaacgattagatataacagtaaggattaatgatggatttgaagtacaatttcagcataatggaaggagaggaatcattgtcacgttattctcctgaaattgttgcaaagacgtcaagtgctgaaaccatagctcttctgcctcttgttgttcttatgcatggaactgaagattattcaataccatcatcttccagtcaaacttttgttgacgtcctccaacaagctggtgctcaagcaaggttactattgtacgaagggaaaacacatacagatatctttgtacaggaccctctaaggggtggaagagatccattggttgaagacgtgttgtctattattcatgctgatgatgcaaatgcatgtcaaaagattgctttagcaccaactcctaggagattagttttcgagtggcaattaaagttggcacgcaaaattagtccattctagcagtatgaaccatggagaagcttggagctatggattttgcaccttcatgaggaaagggtgctcgtctgctcggggagccgttgagctggattggatcaggcaagtaaaaggttctcgcgtcttctttacttgcacaacgttggtcaatgtgaaacttgtagctggtacgcaatacgagaggaagaagctaaatacacgactgggaatggaaaccacgtcatcttttttttgcaaggctgtatataatgttgcatattatattgtacaaaggcttgtactacgtttcttgtgcctctattctaaaatgtaagttttttttttaattttagccgaaatcaaactgactaaaggcttgtttcaaactgactaaaggcttgtttggaagcactcagtttttaagaaattagtttataaaaattgagttggttcc

SEQ ID NO: 19776 - protein, 286 aa, Zea mays subsp. mays
  peptide (1)..(286): Ceres Seq. ID no. 12454826
  misc_feature (143)..(286): Homolog of NCBI NO: 23470769 NR Description: hypothetical protein [Pseudomonas syringae pv.
  misc_feature (144)..(286): Homolog of NCBI NO: 28871958 NR Description: esterase/lipase/thioesterase family protein
  misc_feature (19)..(105): Homolog of NCBI NO: 15232904 NR Description: hypothetical protein; protein id: At3g02410.1
  misc_feature (154)..(286): Homolog of NCBI NO: 15232904 NR Description: hypothetical protein; protein id: At3g02410.1
  misc_feature (152)..(181): Homolog of NCBI NO: 11357218 NR Description: Carboxylesterase-like protein - Arabidopsis
  misc_feature (11)..(105): Homolog of NCBI NO: 11357218 NR Description: Carboxylesterase-like protein - Arabidopsis
  misc_feature (178)..(286): Homolog of NCBI NO: 11357218 NR Description: Carboxylesterase-like protein - Arabidopsis
  misc_feature (63)..(286): Homolog of NCBI NO: 25518434 NR Description: hypothetical protein F28B23.20 [imported] -
  misc_feature (63)..(286): Homolog of NCBI NO: 22329792 NR Description: hypothetical protein
  misc_feature (11)..(286): Homolog of NCBI NO: 22326830 NR Description: Carboxylesterase-like protein
PPSTRPLHRPHAPAAGQKPIRISPLRGGASASAMRASVEEAGALLARSDSAGRRRRSPPPVQTASPRPGSLRRQSSSFREDVGHAASETYLVSRLTFTLLQYLGLGYRWMSQLLSLTIYAIVLMPGFIQVGYYYFFSSQVRRSVVYGDQPRNRLDLYIPEDNSRPCPVVAFVTGGAWIIGYKAWGALLGRRLAERGIIVACIDYRNFPQGTIGDMVHDASQGISFVCNNIASHGGDPNQIYLIGQSAGAHIAACALMEQAVKESGGNPVSWSLTQIKAYFGLSGGY

SEQ ID NO: 19777 - protein, 253 aa, Zea mays subsp. mays
  peptide (1)..(253): Ceres Seq. ID no. 12454827
  misc_feature (110)..(253): Homolog of NCBI NO: 23470769 NR Description: hypothetical protein [Pseudomonas syringae pv.
  misc_feature (111)..(253): Homolog of NCBI NO: 28871958 NR Description: esterase/lipase/thioesterase family protein
  misc_feature (1)..(72): Homolog of NCBI NO: 15232904 NR Description: hypothetical protein; protein id: At3g02410.1
  misc_feature (121)..(253): Homolog of NCBI NO: 15232904 NR Description: hypothetical protein; protein id: At3g02410.1
  misc_feature (119)..(148): Homolog of NCBI NO: 11357218 NR Description: Carboxylesterase-like protein - Arabidopsis
  misc_feature (1)..(72): Homolog of NCBI NO: 11357218 NR Description: Carboxylesterase-like protein - Arabidopsis
  misc_feature (145)..(253): Homolog of NCBI NO: 11357218 NR Description: Carboxylesterase-like protein - Arabidopsis
  misc_feature (30)..(253): Homolog of NCBI NO: 25518434 NR Description: hypothetical protein F28B23.20 [imported] -
  misc_feature (30)..(253): Homolog of NCBI NO: 22329792 NR Description: hypothetical protein
  misc_feature (1)..(253): Homolog of NCBI NO: 22326830 NR Description: Carboxylesterase-like protein
MRASVEEAGALLARSDSAGRRRRSPPPVQTASPRPGSLRRQSSSFREDVGHAASETYLVSRLTFTLLQYLGLGYRWMSQLLSLTIYAIVLMPGFIQVGYYYFFSSQVRRSVVYGDQPRNRLDLYIPEDNSRPCPVVAFVTGGAWIIGYKAWGALLGRRLAERGIIVACIDYRNFPQGTIGDMVHDASQGISFVCNNIASHGGDPNQIYLIGQSAGAHIAACALMEQAVKESGGNPVSWSLTQIKAYFGLSGGY

SEQ ID NO: 19778 - protein, 177 aa, Zea mays subsp. mays
  peptide (1)..(177): Ceres Seq. ID no. 12454828
  misc_feature (34)..(156): Homolog of NCBI NO: 22981708 NR Description: hypothetical protein [Ralstonia metallidurans]
  misc_feature (37)..(177): Homolog of NCBI NO: 16126537 NR Description: carboxylesterase family protein [Caulobacter
  misc_feature (34)..(177): Homolog of NCBI NO: 23470769 NR Description: hypothetical protein [Pseudomonas syringae pv.
  misc_feature (35)..(177): Homolog of NCBI NO: 28871958 NR Description: esterase/lipase/thioesterase family protein
  misc_feature (45)..(177): Homolog of NCBI NO: 15232904 NR Description: hypothetical protein; protein id: At3g02410.1
  misc_feature (43)..(72): Homolog of NCBI NO: 11357218 NR Description: Carboxylesterase-like protein - Arabidopsis
  misc_feature (69)..(177): Homolog of NCBI NO: 11357218 NR Description: Carboxylesterase-like protein - Arabidopsis
  misc_feature (1)..(177): Homolog of NCBI NO: 25518434 NR Description: hypothetical protein F28B23.20 [imported] -
  misc_feature (1)..(177): Homolog of NCBI NO: 22329792 NR Description: hypothetical protein
  misc_feature (1)..(177): Homolog of NCBI NO: 22326830 NR Description: Carboxylesterase-like protein
MSQLLSLTIYAIVLMPGFIQVGYYYFFSSQVRRSVVYGDQPRNRLDLYIPEDNSRPCPVVAFVTGGAWIIGYKAWGALLGRRLAERGIIVACIDYRNFPQGTIGDMVHDASQGISFVCNNIASHGGDPNQIYLIGQSAGAHIAACALMEQAVKESGGNPVSWSLTQIKAYFGLSGGY

SEQ ID NO: 19779 - DNA, 1858 bp, Zea mays subsp. mays
  misc_feature (1)..(1858): Ceres Seq. ID no. 12376724
  misc_feature: MA Experiment ID: 108522 Result: Up-regulated in Transcription
  misc_feature: MA Experiment 108522 PARAMETER Experiment Name: Zm_42deg_Heat_P Parameter: Age (day) Value: 8
  misc_feature: MA Experiment 108522 PARAMETER Experiment Name: Zm_42deg_Heat_P Parameter: Organism Value: Zea mays
  misc_feature: MA Experiment 108522 PARAMETER Experiment Name: Zm_42deg_Heat_P Parameter: Plant Line Value: 35A19
  misc_feature: MA Experiment 108522 PARAMETER Experiment Name: Zm_42deg_Heat_P Parameter: Temperature (deg C) Value: 42 vs. 22
  misc_feature: MA Experiment 108522 PARAMETER Experiment Name: Zm_42deg_Heat_P Parameter: Timepoint (hr) Value: 1
  misc_feature: MA Experiment 108522 PARAMETER Experiment Name: Zm_42deg_Heat_P Parameter: Tissue Value: Aerial
  misc_feature: MA Experiment ID: 108527 Result: Up-regulated in Transcription
  misc_feature: MA Experiment 108527 PARAMETER Experiment Name: Zm_5mM_NO_P Parameter: Age (day) Value: 8
  misc_feature: MA Experiment 108527 PARAMETER Experiment Name: Zm_5mM_NO_P Parameter: Organism Value: Zea mays
  misc_feature: MA Experiment 108527 PARAMETER Experiment Name: Zm_5mM_NO_P Parameter: Plant Line Value: 35A19
  misc_feature: MA Experiment 108527 PARAMETER Experiment Name: Zm_5mM_NO_P Parameter: Timepoint (hr) Value: 6
  misc_feature: MA Experiment 108527 PARAMETER Experiment Name: Zm_5mM_NO_P Parameter: Tissue Value: Aerial
  misc_feature: MA Experiment 108527 PARAMETER Experiment Name: Zm_5mM_NO_P Parameter: Treatment Value: 5mM NO vs. No Treatment
attggaatctctgggcgactcgacctgaacaaccccgcccgccgtcctgcccttgtgctctagtcctcccgcgaccgttccaaattcttcctcgcgttcgtattccacgcggcgacgtcgccatcgccatcgcggccgccgctccgcccctcttccttcgcatatacgtaggtaggcgcctccccaaaccctaagcctttatctcccacgcgcgcggctcgctctgctgcgccgcggctcgctcgaccccgcagatcgccggcgatgggatccaaggaccaggacggaggggctgcatcctcgggaggcggcttcttctcgtcgttcgccgccggcatgcgcagctggggcaccgccgtgcataaatccgtcaacgggctgcttggttatgaaggccttgaagttattaaccccgatggaggcacagatgatgctgaagaagaagctttgaaggggagatggaagcaggaggaccgtgatagctactggaagatgatgcacaaatacataggatcagatgttacatcacttgtgacacttccagtcataatttttgagccaatgacaatgcttcagaaaatggccgagttgatggaatactgtgaattgttagacaaagcagatgaatgtgaggatccatacatgtgtatggtttatgcttctacatgggctgtttctgtgtactttgcatatcaacgcacatggaagccttttaatccgatccttggagagacttatgagatggttaaccaccagggcattacatttcttgctgagcaggtaagccatcatcccccaatgggtgttgctcactgcgagaatgaacattttacttacgatatcacgtctaagttgaagaccaagtttttgggaaattcagtggaaatttacccagttggaaggactcgagtgacactaaaaaaatctggtgtcgtgttggatttggtgccaccactaacaaaggttaacaacctgatatttgggcgcacttgggttgattctcctggagagatggtcatgacgaacctgacaactggagacaaagttgtgctatatttccagccatgcggctggtttggggctggccgttacgaggtggatgggtatgtgtacagtgcagcggaagaacccaaaatcatgattacagggaagtggaacaagtccctgagttgccaaccatgtgaccaagaaggcgatcctcttccaggcacggagctgaaggagatctggagagttgctcctgccccacagggcgacaagtatcagtacacacacttcgcacacaaaataaacagcttcgacacggcacctaagaagctgttggcatctgattcacggctgaggcctgatagatatgccctcgagaagggtgacatgtctaagtccggggcagagaagagcaggctcgaggaacaacagagagctgagaaacgaactcgagaggccaagggcgagcaatttactcctagatggttcaacctgacagatgtggtctcccctacaccgtggggtgacctggaaatttatgaatacaacggcaaatacacagagcaccgggctgccatagaccgctccgatgtcaccgacgagacagatgtcacttcagtcaagttcagcccatggcaatatggtagctcatcttcccaatgattctccgtggccagaagccgccatgcctacgcgcattgtgtaaaacacttccaggcctggctttgctggtttgttgtgccatcagcggtttccttgcccttgtagtattgtggccttcccccttttttcccttaaatgctacagttattcaggaagtggtgtagtccgtgtactgtcgcaagtctagcagagattgcagagttttgtt

SEQ ID NO: 19780 - protein, 461 aa, Zea mays subsp. mays
  peptide (1)..(461): Ceres Seq. ID no. 12376725
  misc_feature (29)..(432): Pfam Name: Oxysterol-binding protein Pfam Description: Oxysterol-binding protein
  misc_feature (313)..(427): Homolog of NCBI NO: 17529997 NR Description: oxysterol-binding protein-like protein OSBPL1A
  misc_feature (73)..(305): Homolog of NCBI NO: 17529997 NR Description: oxysterol-binding protein-like protein OSBPL1A
  misc_feature (313)..(439): Homolog of NCBI NO: 27469640 NR Description: Similar to oxysterol binding protein-like 2
  misc_feature (73)..(309): Homolog of NCBI NO: 27469640 NR Description: Similar to oxysterol binding protein-like 2
  misc_feature (82)..(300): Homolog of NCBI NO: 38639321 NR Description: putative oxysterol-binding protein [Solanum
  misc_feature (3)..(458): Homolog of NCBI NO: 38639323 NR Description: oxysterol-binding protein [Solanum tuberosum]
  misc_feature (16)..(461): Homolog of NCBI NO: 8885548 NR Description: oxysterol-binding protein [Arabidopsis thaliana]
  misc_feature (1)..(460): Homolog of NCBI NO: 15232633 NR Description: putative oxysterol-binding protein
  misc_feature (13)..(460): Homolog of NCBI NO: 15241681 NR Description: putative protein
  misc_feature (16)..(461): Homolog of NCBI NO: 15238398 NR Description: oxysterol-binding protein - like
MGSKDQDGGAASSGGGFFSSFAAGMRSWGTAVHKSVNGLLGYEGLEVINPDGGTDDAEEEALKGRWKQEDRDSYWKMMHKYIGSDVTSLVTLPVIIFEPMTMLQKMAELMEYCELLDKADECEDPYMCMVYASTWAVSVYFAYQRTWKPFNPILGETYEMVNHQGITFLAEQVSHHPPMGVAHCENEHFTYDITSKLKTKFLGNSVEIYPVGRTRVTLKKSGVVLDLVPPLTKVNNLIFGRTWVDSPGEMVMTNLTTGDKVVLYFQPCGWFGAGRYEVDGYVYSAAEEPKIMITGKWNKSLSCQPCDQEGDPLPGTELKEIWRVAPAPQGDKYQYTHFAHKINSFDTAPKKLLASDSRLRPDRYALEKGDMSKSGAEKSRLEEQQRAEKRTREAKGEQFTPRWFNLTDVVSPTPWGDLEIYEYNGKYTEHRAAIDRSDVTDETDVTSVKFSPWQYGSSSSQ

SEQ ID NO: 19781 - protein, 437 aa, Zea mays subsp. mays
  peptide (1)..(437): Ceres Seq. ID no. 12376726
  misc_feature (5)..(408): Pfam Name: Oxysterol-binding protein Pfam Description: Oxysterol-binding protein
  misc_feature (289)..(403): Homolog of NCBI NO: 17529997 NR Description: oxysterol-binding protein-like protein OSBPL1A
  misc_feature (49)..(281): Homolog of NCBI NO: 17529997 NR Description: oxysterol-binding protein-like protein OSBPL1A
  misc_feature (289)..(415): Homolog of NCBI NO: 27469640 NR Description: Similar to oxysterol binding protein-like 2
  misc_feature (49)..(285): Homolog of NCBI NO: 27469640 NR Description: Similar to oxysterol binding protein-like 2
  misc_feature (58)..(276): Homolog of NCBI NO: 38639321 NR Description: putative oxysterol-binding protein [Solanum
  misc_feature (1)..(434): Homolog of NCBI NO: 38639323 NR Description: oxysterol-binding protein [Solanum tuberosum]
  misc_feature (1)..(437): Homolog of NCBI NO: 8885548 NR Description: oxysterol-binding protein [Arabidopsis thaliana]
  misc_feature (1)..(436): Homolog of NCBI NO: 15232633 NR Description: putative oxysterol-binding protein
  misc_feature (1)..(436): Homolog of NCBI NO: 15241681 NR Description: putative protein
  misc_feature (1)..(437): Homolog of NCBI NO: 15238398 NR Description: oxysterol-binding protein - like
MRSWGTAVHKSVNGLLGYEGLEVINPDGGTDDAEEEALKGRWKQEDRDSYWKMMHKYIGSDVTSLVTLPVIIFEPMTMLQKMAELMEYCELLDKADECEDPYMCMVYASTWAVSVYFAYQRTWKPFNPILGETYEMVNHQGITFLAEQVSHHPPMGVAHCENEHFTYDITSKLKTKFLGNSVEIYPVGRTRVTLKKSGVVLDLVPPLTKVNNLIFGRTWVDSPGEMVMTNLTTGDKVVLYFQPCGWFGAGRYEVDGYVYSAAEEPKIMITGKWNKSLSCQPCDQEGDPLPGTELKEIWRVAPAPQGDKYQYTHFAHKINSFDTAPKKLLASDSRLRPDRYALEKGDMSKSGAEKSRLEEQQRAEKRTREAKGEQFTPRWFNLTDVVSPTPWGDLEIYEYNGKYTEHRAAIDRSDVTDETDVTSVKFSPWQYGSSSSQ

SEQ ID NO: 19782 - protein, 385 aa, Zea mays subsp. mays
  peptide (1)..(385): Ceres Seq. ID no. 12376727
  misc_feature (1)..(356): Pfam Name: Oxysterol-binding protein Pfam Description: Oxysterol-binding protein
  misc_feature (237)..(351): Homolog of NCBI NO: 17529997 NR Description: oxysterol-binding protein-like protein OSBPL1A
  misc_feature (1)..(229): Homolog of NCBI NO: 17529997 NR Description: oxysterol-binding protein-like protein OSBPL1A
  misc_feature (237)..(363): Homolog of NCBI NO: 27469640 NR Description: Similar to oxysterol binding protein-like 2
  misc_feature (1)..(233): Homolog of NCBI NO: 27469640 NR Description: Similar to oxysterol binding protein-like 2
  misc_feature (6)..(224): Homolog of NCBI NO: 38639321 NR Description: putative oxysterol-binding protein [Solanum
  misc_feature (1)..(382): Homolog of NCBI NO: 38639323 NR Description: oxysterol-binding protein [Solanum tuberosum]
  misc_feature (1)..(385): Homolog of NCBI NO: 8885548 NR Description: oxysterol-binding protein [Arabidopsis thaliana]
  misc_feature (1)..(384): Homolog of NCBI NO: 15232633 NR Description: putative oxysterol-binding protein
  misc_feature (1)..(384): Homolog of NCBI NO: 15241681 NR Description: putative protein
  misc_feature (1)..(385): Homolog of NCBI NO: 15238398 NR Description: oxysterol-binding protein - like
MMHKYIGSDVTSLVTLPVIIFEPMTMLQKMAELMEYCELLDKADECEDPYMCMVYASTWAVSVYFAYQRTWKPFNPILGETYEMVNHQGITFLAEQVSHHPPMGVAHCENEHFTYDITSKLKTKFLGNSVEIYPVGRTRVTLKKSGVVLDLVPPLTKVNNLIFGRTWVDSPGEMVMTNLTTGDKVVLYFQPCGWFGAGRYEVDGYVYSAAEEPKIMITGKWNKSLSCQPCDQEGDPLPGTELKEIWRVAPAPQGDKYQYTHFAHKINSFDTAPKKLLASDSRLRPDRYALEKGDMSKSGAEKSRLEEQQRAEKRTREAKGEQFTPRWFNLTDVVSPTPWGDLEIYEYNGKYTEHRAAIDRSDVTDETDVTSVKFSPWQYGSSSSQ

SEQ ID NO: 19783 - DNA, 1296 bp, Zea mays subsp. mays
  misc_feature (1)..(1296): Ceres Seq. ID no. 12364476
  misc_feature: MA Experiment ID: 108504 Result: Down-regulated in Transcription
  misc_feature: MA Experiment 108504 PARAMETER Experiment Name: Zm_Drought_P Parameter: Age (day) Value: 8
  misc_feature: MA Experiment 108504 PARAMETER Experiment Name: Zm_Drought_P Parameter: Organism Value: Zea mays
  misc_feature: MA Experiment 108504 PARAMETER Experiment Name: Zm_Drought_P Parameter: Plant Line Value: 35A19
  misc_feature: MA Experiment 108504 PARAMETER Experiment Name: Zm_Drought_P Parameter: Timepoint (hr) Value: 12
  misc_feature: MA Experiment 108504 PARAMETER Experiment Name: Zm_Drought_P Parameter: Tissue Value: Aerial
  misc_feature: MA Experiment 108504 PARAMETER Experiment Name: Zm_Drought_P Parameter: Treatment Value: Drought vs. No Drought
  misc_feature: MA Experiment ID: 108527 Result: Up-regulated in Transcription
  misc_feature: MA Experiment 108527 PARAMETER Experiment Name: Zm_5mM_NO_P Parameter: Age (day) Value: 8
  misc_feature: MA Experiment 108527 PARAMETER Experiment Name: Zm_5mM_NO_P Parameter: Organism Value: Zea mays
  misc_feature: MA Experiment 108527 PARAMETER Experiment Name: Zm_5mM_NO_P Parameter: Plant Line Value: 35A19
  misc_feature: MA Experiment 108527 PARAMETER Experiment Name: Zm_5mM_NO_P Parameter: Timepoint (hr) Value: 6
  misc_feature: MA Experiment 108527 PARAMETER Experiment Name: Zm_5mM_NO_P Parameter: Tissue Value: Aerial
  misc_feature: MA Experiment 108527 PARAMETER Experiment Name: Zm_5mM_NO_P Parameter: Treatment Value: 5mM NO vs. No Treatment
  misc_feature: MA Experiment ID: 108528 Result: Down-regulated in Transcription
  misc_feature: MA Experiment 108528 PARAMETER Experiment Name: Zm_Imbibed_Seeds_P Parameter: Age (day) Value: 5 vs. 2
  misc_feature: MA Experiment 108528 PARAMETER Experiment Name: Zm_Imbibed_Seeds_P Parameter: Organism Value: Zea mays
  misc_feature: MA Experiment 108528 PARAMETER Experiment Name: Zm_Imbibed_Seeds_P Parameter: Plant Line Value: 35A19
  misc_feature: MA Experiment 108528 PARAMETER Experiment Name: Zm_Imbibed_Seeds_P Parameter: Tissue Value: Aerial vs. Embryo
  misc_feature: MA Experiment ID: 108529 Result: Up-regulated in Transcription
  misc_feature: MA Experiment 108529 PARAMETER Experiment Name: Zm_Imbibed_Seeds_P Parameter: Age (day) Value: 5 vs. 2
  misc_feature: MA Experiment 108529 PARAMETER Experiment Name: Zm_Imbibed_Seeds_P Parameter: Organism Value: Zea mays
  misc_feature: MA Experiment 108529 PARAMETER Experiment Name: Zm_Imbibed_Seeds_P Parameter: Plant Line Value: 35A19
  misc_feature: MA Experiment 108529 PARAMETER Experiment Name: Zm_Imbibed_Seeds_P Parameter: Tissue Value: Roots vs. Embryo
  misc_feature: MA Experiment ID: 108530 Result: Down-regulated in Transcription
  misc_feature: MA Experiment 108530 PARAMETER Experiment Name: Zm_Imbibed_Seeds_P Parameter: Age (day) Value: 6 vs. 2
  misc_feature: MA Experiment 108530 PARAMETER Experiment Name: Zm_Imbibed_Seeds_P Parameter: Organism Value: Zea mays
  misc_feature: MA Experiment 108530 PARAMETER Experiment Name: Zm_Imbibed_Seeds_P Parameter: Plant Line Value: 35A19
  misc_feature: MA Experiment 108530 PARAMETER Experiment Name: Zm_Imbibed_Seeds_P Parameter: Tissue Value: Aerial vs. Embryo
  misc_feature: MA Experiment ID: 108543 Result: Up-regulated in Transcription
  misc_feature: MA Experiment ID: 108547 Result: Down-regulated in Transcription
  misc_feature: MA Experiment 108547 PARAMETER Experiment Name: Zm_Imbibed_Seeds_P Parameter: Age (day) Value: 4 vs. 2
  misc_feature: MA Experiment 108547 PARAMETER Experiment Name: Zm_Imbibed_Seeds_P Parameter: Organism Value: Zea mays
  misc_feature: MA Experiment 108547 PARAMETER Experiment Name: Zm_Imbibed_Seeds_P Parameter: Plant Line Value: 35A19
  misc_feature: MA Experiment 108547 PARAMETER Experiment Name: Zm_Imbibed_Seeds_P Parameter: Tissue Value: Aerial vs. Embryo
  misc_feature: MA Experiment ID: 20000478 Result: Up-regulated in Transcription
  misc_feature: MA Experiment 20000478 PARAMETER Experiment Name: Zm_5mM_SA_P Parameter: Age (day) Value: 11
  misc_feature: MA Experiment 20000478 PARAMETER Experiment Name: Zm_5mM_SA_P Parameter: Organism Value: Zea mays
  misc_feature: MA Experiment 20000478 PARAMETER Experiment Name: Zm_5mM_SA_P Parameter: Plant Line Value: 35A19
  misc_feature: MA Experiment 20000478 PARAMETER Experiment Name: Zm_5mM_SA_P Parameter: Timepoint (hr) Value: 72
  misc_feature: MA Experiment 20000478 PARAMETER Experiment Name: Zm_5mM_SA_P Parameter: Tissue Value: Aerial
  misc_feature: MA Experiment 20000478 PARAMETER Experiment Name: Zm_5mM_SA_P Parameter: Treatment Value: 5mM SA vs. No Treatment
  misc_feature: MA Experiment ID: 20000488 Result: Down-regulated in Transcription
  misc_feature: MA Experiment 20000488 PARAMETER Experiment Name: Zm_50mM_NH4NO3_L_to_H_P Parameter: Organism Value: Zea mays
  misc_feature: MA Experiment 20000488 PARAMETER Experiment Name: Zm_50mM_NH4NO3_L_to_H_P Parameter: Timepoint (hr) Value: 8
  misc_feature: MA Experiment 20000488 PARAMETER Experiment Name: Zm_50mM_NH4NO3_L_to_H_P Parameter: Tissue Value: Leaves
  misc_feature: MA Experiment 20000488 PARAMETER Experiment Name: Zm_50mM_NH4NO3_L_to_H_P Parameter: Treatment Value: 50mM NH4NO3 vs. 100mM Mannitol
  misc_feature: MA Experiment ID: 20000535 Result: Down-regulated in Transcription
  misc_feature: MA Experiment 20000535 PARAMETER Experiment Name: Zm_Hybrid_Seed_Dev_P Parameter: DAP Value: 30 vs. 12
  misc_feature: MA Experiment 20000535 PARAMETER Experiment Name: Zm_Hybrid_Seed_Dev_P Parameter: Organism Value: Zea mays
  misc_feature: MA Experiment 20000535 PARAMETER Experiment Name: Zm_Hybrid_Seed_Dev_P Parameter: Plant Line Value: 35A19
  misc_feature: MA Experiment 20000535 PARAMETER Experiment Name: Zm_Hybrid_Seed_Dev_P Parameter: Tissue Value: Embryo vs. Unfert Floret
  misc_feature: MA Experiment ID: 20000626 Result: Up-regulated in Transcription
  misc_feature: MA Experiment 20000626 PARAMETER Experiment Name: Zm_Herbicide-Treatments_P Parameter: Timepoint (hr) Value: 12
  misc_feature: MA Experiment 20000626 PARAMETER Experiment Name: Zm_Herbicide-Treatments_P Parameter: Tissue Value: Aerial
  misc_feature: MA Experiment 20000626 PARAMETER Experiment Name: Zm_Herbicide-Treatments_P Parameter: Treatment Value: Roundup vs. No Treatment
  misc_feature: MA Experiment ID: 20001612 Result: Up-regulated in Transcription
  misc_feature: MA Experiment 20001612 PARAMETER Experiment Name: Zm_50ppm_KNO3_L-to-H_P Parameter: Age (day) Value: 19
  misc_feature: MA Experiment 20001612 PARAMETER Experiment Name: Zm_50ppm_KNO3_L-to-H_P Parameter: Organism Value: Zea mays
  misc_feature: MA Experiment 20001612 PARAMETER Experiment Name: Zm_50ppm_KNO3_L-to-H_P Parameter: Plant Line Value: 35A19
  misc_feature: MA Experiment 20001612 PARAMETER Experiment Name: Zm_50ppm_KNO3_L-to-H_P Parameter: Timepoint (hr) Value: 8
  misc_feature: MA Experiment 20001612 PARAMETER Experiment Name: Zm_50ppm_KNO3_L-to-H_P Parameter: Tissue Value: Roots
  misc_feature: MA Experiment 20001612 PARAMETER Experiment Name: Zm_50ppm_KNO3_L-to-H_P Parameter: Treatment Value: 50ppm KNO3 vs. 50ppm KCl
  misc_feature: MA Experiment ID: 20001613 Result: Up-regulated in Transcription
  misc_feature: MA Experiment 20001613 PARAMETER Experiment Name: Zm_50ppm_KNO3_L-to-H_P Parameter: Age (day) Value: 20
  misc_feature: MA Experiment 20001613 PARAMETER Experiment Name: Zm_50ppm_KNO3_L-to-H_P Parameter: Organism Value: Zea mays
  misc_feature: MA Experiment 20001613 PARAMETER Experiment Name: Zm_50ppm_KNO3_L-to-H_P Parameter: Plant Line Value: 35A19
  misc_feature: MA Experiment 20001613 PARAMETER Experiment Name: Zm_50ppm_KNO3_L-to-H_P Parameter: Timepoint (hr) Value: 24
  misc_feature: MA Experiment 20001613 PARAMETER Experiment Name: Zm_50ppm_KNO3_L-to-H_P Parameter: Tissue Value: Roots
  misc_feature: MA Experiment 20001613 PARAMETER Experiment Name: Zm_50ppm_KNO3_L-to-H_P Parameter: Treatment Value: 50ppm KNO3 vs. 50ppm KCl
gcacgagaccattacctagaacatcctaatcgaaaaatccaattgaggaagagaagaggcgataagcacactaatggctgacgagtcatggagggtgccaaccccagtgcaagaactggccgcaggcgtggtggagccaccgacccagttcgtgctgcaggagcaggatcgtcctggatctgggaccctgctcttcgccactgacatgccggagcccattcccgtcgttgacctcagcaggctggcggctgccgacgaggcttccaagctccggtcagcactggagacctgggggctcttcctggttactaagcatgggatagaagcatctctcatggacgatgtgatggccgcgtcacgcgattttttctaccagccgctcgaagcgaagcaggaatacagtaacctgataggcggcaagcggttccagatggagggttatggtaatgacatggtgaaatccaaagatcagatactggactggcaagatcggctgcagctcagggtggaaccccaagatgagaggaacctcgcttattggcccaaacaccctgattctttcagggatcttctggagaagtatgcatcaaaaaccaagatagttaggaacaaagtcttacgggcgatgggcaaaacattggagcttggcgaagactatttcatcagccagattggtgacagggcctcagcaattgctaggttcaactactaccctccctgtccaaggcctgatcttgtctttggcattaagcctcactctgacggtggcgcggtgacgatacttctcgtcgacaaggatgttgggggcctgcaagttcagaaagatggcgtttggtacactgttccgtccatgcctcacacgctgcttgtcaacttgggtgactccatggagataatgaacaatgggatcttcaaaagtccggtgcacagggttgtgacgaatgcagagaaagagagactctcactcgccatgttctacggcgtggaaggccagagagtgcttgagccagcgcttggtttgctgggtgaggagcgaccagcacggtacaggaaaattatggcctcagactacattattgggctccgtcaaggaattgcggaaggacagagatttatcgagactttgaagatatagtcaatcgtgaatgctcaagaataataaagagttgcttcgcccattgctaaatcagatcagagtccaatgtccattctgtaatgcattaccacattgttatacatgctcggaagacttcagagaagatgtaatcctgctcgttttactaaatttggggcatt

SEQ ID NO: 19784 - protein, 353 aa, Zea mays subsp. mays
  peptide (1)..(353): Ceres Seq. ID no. 12364477
  misc_feature (204)..(304): Pfam Name: 2OG-Fe(II) oxygenase superfamily Pfam Description: 2OG-Fe(II) oxygenase superfamily
  misc_feature (1)..(122): Homolog of NCBI NO: 24413983 NR Description: ethylene-forming-enzyme-like dioxygenase-like
  misc_feature (165)..(353): Homolog of NCBI NO: 24413983 NR Description: ethylene-forming-enzyme-like dioxygenase-like
  misc_feature (1)..(353): Homolog of NCBI NO: 34898472 NR Description: Similar to Prunus armeniaca
  misc_feature (274)..(353): Homolog of NCBI NO: 24413981 NR Description: contains EST
  misc_feature (12)..(253): Homolog of NCBI NO: 24413981 NR Description: contains EST
  misc_feature (12)..(353): Homolog of NCBI NO: 34898468 NR Description: Similar to Prunus armeniaca
  misc_feature (1)..(353): Homolog of NCBI NO: 24413984 NR Description: ethylene-forming-enzyme-like dioxygenase-like
  misc_feature (1)..(327): Homolog of NCBI NO: 34898470 NR Description: ESTs D47168(S12332),D46350(S10967) correspond to region of the predicted gene.~Similar to Prunus armeniaca
  misc_feature (12)..(353): Homolog of NCBI NO: 33115140 NR Description: iron/ascorbate-dependent oxidoreductase [Hordeum
  misc_feature (1)..(353): Homolog of NCBI NO: 24413982 NR Description: ethylene-forming-enzyme-like dioxygenase-like
MADESWRVPTPVQELAAGVVEPPTQFVLQEQDRPGSGTLLFATDMPEPIPVVDLSRLAAADEASKLRSALETWGLFLVTKHGIEASLMDDVMAASRDFFYQPLEAKQEYSNLIGGKRFQMEGYGNDMVKSKDQILDWQDRLQLRVEPQDERNLAYWPKHPDSFRDLLEKYASKTKIVRNKVLRAMGKTLELGEDYFISQIGDRASAIARFNYYPPCPRPDLVFGIKPHSDGGAVTILLVDKDVGGLQVQKDGVWYTVPSMPHTLLVNLGDSMEIMNNGIFKSPVHRVVTNAEKERLSLAMFYGVEGQRVLEPALGLLGEERPARYRKIMASDYIIGLRQGIAEGQRFIETLKI

SEQ ID NO: 19785 - protein, 309 aa, Zea mays subsp. mays
  peptide (1)..(309): Ceres Seq. ID no. 12364478
  misc_feature (160)..(260): Pfam Name: 2OG-Fe(II) oxygenase superfamily Pfam Description: 2OG-Fe(II) oxygenase superfamily
  misc_feature (230)..(309): Homolog of NCBI NO: 24413981 NR Description: contains EST
  misc_feature (1)..(209): Homolog of NCBI NO: 24413981 NR Description: contains EST
  misc_feature (1)..(309): Homolog of NCBI NO: 34898468 NR Description: Similar to Prunus armeniaca
  misc_feature (1)..(309): Homolog of NCBI NO: 24413984 NR Description: ethylene-forming-enzyme-like dioxygenase-like
  misc_feature (121)..(309): Homolog of NCBI NO: 24413983 NR Description: ethylene-forming-enzyme-like dioxygenase-like
  misc_feature (1)..(309): Homolog of NCBI NO: 34898472 NR Description: Similar to Prunus armeniaca
  misc_feature (1)..(78): Homolog of NCBI NO: 24413983 NR Description: ethylene-forming-enzyme-like dioxygenase-like
  misc_feature (1)..(283): Homolog of NCBI NO: 34898470 NR Description: ESTs D47168(S12332),D46350(S10967) correspond to region of the predicted gene.~Similar to Prunus armeniaca
  misc_feature (1)..(309): Homolog of NCBI NO: 33115140 NR Description: iron/ascorbate-dependent oxidoreductase [Hordeum
  misc_feature (1)..(309): Homolog of NCBI NO: 24413982 NR Description: ethylene-forming-enzyme-like dioxygenase-like
MPEPIPVVDLSRLAAADEASKLRSALETWGLFLVTKHGIEASLMDDVMAASRDFFYQPLEAKQEYSNLIGGKRFQMEGYGNDMVKSKDQILDWQDRLQLRVEPQDERNLAYWPKHPDSFRDLLEKYASKTKIVRNKVLRAMGKTLELGEDYFISQIGDRASAIARFNYYPPCPRPDLVFGIKPHSDGGAVTILLVDKDVGGLQVQKDGVWYTVPSMPHTLLVNLGDSMEIMNNGIFKSPVHRVVTNAEKERLSLAMFYGVEGQRVLEPALGLLGEERPARYRKIMASDYIIGLRQGIAEGQRFIETLKI

SEQ ID NO: 19786 - protein, 266 aa, Zea mays subsp. mays
  peptide (1)..(266): Ceres Seq. ID no. 12364479
  misc_feature (117)..(217): Pfam Name: 2OG-Fe(II) oxygenase superfamily Pfam Description: 2OG-Fe(II) oxygenase superfamily
  misc_feature (1)..(35): Homolog of NCBI NO: 24413983 NR Description: ethylene-forming-enzyme-like dioxygenase-like
  misc_feature (78)..(266): Homolog of NCBI NO: 24413983 NR Description: ethylene-forming-enzyme-like dioxygenase-like
  misc_feature (1)..(266): Homolog of NCBI NO: 34898472 NR Description: Similar to Prunus armeniaca
  misc_feature (187)..(266): Homolog of NCBI NO: 24413981 NR Description: contains EST
  misc_feature (1)..(166): Homolog of NCBI NO: 24413981 NR Description: contains EST
  misc_feature (1)..(266): Homolog of NCBI NO: 34898468 NR Description: Similar to Prunus armeniaca
  misc_feature (1)..(266): Homolog of NCBI NO: 24413984 NR Description: ethylene-forming-enzyme-like dioxygenase-like
  misc_feature (1)..(240): Homolog of NCBI NO: 34898470 NR Description: ESTs D47168(S12332),D46350(S10967) correspond to region of the predicted gene.~Similar to Prunus armeniaca
  misc_feature (1)..(266): Homolog of NCBI NO: 33115140 NR Description: iron/ascorbate-dependent oxidoreductase [Hordeum
  misc_feature (1)..(266): Homolog of NCBI NO: 24413982 NR Description: ethylene-forming-enzyme-like dioxygenase-like
MDDVMAASRDFFYQPLEAKQEYSNLIGGKRFQMEGYGNDMVKSKDQILDWQDRLQLRVEPQDERNLAYWPKHPDSFRDLLEKYASKTKIVRNKVLRAMGKTLELGEDYFISQIGDRASAIARFNYYPPCPRPDLVFGIKPHSDGGAVTILLVDKDVGGLQVQKDGVWYTVPSMPHTLLVNLGDSMEIMNNGIFKSPVHRVVTNAEKERLSLAMFYGVEGQRVLEPALGLLGEERPARYRKIMASDYIIGLRQGIAEGQRFIETLKI

SEQ ID NO: 19787 - DNA, 1287 bp, Zea mays subsp. mays
  misc_feature (1)..(1287): Ceres Seq. ID no. 12454845
  misc_feature: MA Experiment ID: 108522 Result: Down-regulated in Transcription
  misc_feature: MA Experiment 108522 PARAMETER Experiment Name: Zm_42deg_Heat_P Parameter: Age (day) Value: 8
  misc_feature: MA Experiment 108522 PARAMETER Experiment Name: Zm_42deg_Heat_P Parameter: Organism Value: Zea mays
  misc_feature: MA Experiment 108522 PARAMETER Experiment Name: Zm_42deg_Heat_P Parameter: Plant Line Value: 35A19
  misc_feature: MA Experiment 108522 PARAMETER Experiment Name: Zm_42deg_Heat_P Parameter: Temperature (deg C) Value: 42 vs. 22
  misc_feature: MA Experiment 108522 PARAMETER Experiment Name: Zm_42deg_Heat_P Parameter: Timepoint (hr) Value: 1
  misc_feature: MA Experiment 108522 PARAMETER Experiment Name: Zm_42deg_Heat_P Parameter: Tissue Value: Aerial
  misc_feature: MA Experiment ID: 108528 Result: Up-regulated in Transcription
  misc_feature: MA Experiment 108528 PARAMETER Experiment Name: Zm_Imbibed_Seeds_P Parameter: Age (day) Value: 5 vs. 2
  misc_feature: MA Experiment 108528 PARAMETER Experiment Name: Zm_Imbibed_Seeds_P Parameter: Organism Value: Zea mays
  misc_feature: MA Experiment 108528 PARAMETER Experiment Name: Zm_Imbibed_Seeds_P Parameter: Plant Line Value: 35A19
  misc_feature: MA Experiment 108528 PARAMETER Experiment Name: Zm_Imbibed_Seeds_P Parameter: Tissue Value: Aerial vs. Embryo
  misc_feature: MA Experiment ID: 108530 Result: Up-regulated in Transcription
  misc_feature: MA Experiment 108530 PARAMETER Experiment Name: Zm_Imbibed_Seeds_P Parameter: Age (day) Value: 6 vs. 2
  misc_feature: MA Experiment 108530 PARAMETER Experiment Name: Zm_Imbibed_Seeds_P Parameter: Organism Value: Zea mays
  misc_feature: MA Experiment 108530 PARAMETER Experiment Name: Zm_Imbibed_Seeds_P Parameter: Plant Line Value: 35A19
  misc_feature: MA Experiment 108530 PARAMETER Experiment Name: Zm_Imbibed_Seeds_P Parameter: Tissue Value: Aerial vs. Embryo
  misc_feature: MA Experiment ID: 108535 Result: Down-regulated in Transcription
  misc_feature: MA Experiment 108535 PARAMETER Experiment Name: Zm_Meristem_P Parameter: Age (day) Value: 8
  misc_feature: MA Experiment 108535 PARAMETER Experiment Name: Zm_Meristem_P Parameter: Organism Value: Zea mays
  misc_feature: MA Experiment 108535 PARAMETER Experiment Name: Zm_Meristem_P Parameter: Plant Line Value: 35A19
  misc_feature: MA Experiment 108535 PARAMETER Experiment Name: Zm_Meristem_P Parameter: Tissue Value: Root Meristem vs. Above Root Meristem
  misc_feature: MA Experiment ID: 108547 Result: Up-regulated in Transcription
  misc_feature: MA Experiment 108547 PARAMETER Experiment Name: Zm_Imbibed_Seeds_P Parameter: Age (day) Value: 4 vs. 2
  misc_feature: MA Experiment 108547 PARAMETER Experiment Name: Zm_Imbibed_Seeds_P Parameter: Organism Value: Zea mays
  misc_feature: MA Experiment 108547 PARAMETER Experiment Name: Zm_Imbibed_Seeds_P Parameter: Plant Line Value: 35A19
  misc_feature: MA Experiment 108547 PARAMETER Experiment Name: Zm_Imbibed_Seeds_P Parameter: Tissue Value: Aerial vs. Embryo
  misc_feature: MA Experiment ID: 20000535 Result: Down-regulated in Transcription
  misc_feature: MA Experiment 20000535 PARAMETER Experiment Name: Zm_Hybrid_Seed_Dev_P Parameter: DAP Value: 30 vs. 12
  misc_feature: MA Experiment 20000535 PARAMETER Experiment Name: Zm_Hybrid_Seed_Dev_P Parameter: Organism Value: Zea mays
  misc_feature: MA Experiment 20000535 PARAMETER Experiment Name: Zm_Hybrid_Seed_Dev_P Parameter: Plant Line Value: 35A19
  misc_feature: MA Experiment 20000535 PARAMETER Experiment Name: Zm_Hybrid_Seed_Dev_P Parameter: Tissue Value: Embryo vs. Unfert Floret
actttctcttcagttcaacttccgactttccgagtcgtcacctcacctaccggctaccgaggaagcagaagcgcacgagcgagacgcagccaccgcccgggaggaggaggaagccaagagcaatcggactttgaatggctcgcgacggcggcagcagagggtcaccgggggcggagcggcggcgggtggcgctgcgtgccctcctcgcgtcgggtggcgcggaggcggaggccgcgaggacgtcgagcaagggcctgctacgcggccttcggtgcacgtccgcggccgcatcgcaggctatcgcgccggagatcccgcggcctccggcggactggcgcggactcggttgcgccgcggcggcccaggcgcacgcgccggctgccgcggtggaagcggcccggcccacggcggactggcgcaggcttgggtgcgcggctggagcggcaccggcggtccaggctcaagcgccccggcgttccgaggagtggcgcgtgaggcggcggaggaacgagagggagaggcggaaggcgagggctggcggcgtcagtggtggtggtggggccagtgccgggatgggcgtcggcggggacgtctggtgcacgccgggcataccgttcgccgccgaggcctcttcggtggactgcgtggtggcgccgcaccatacggtggccgcgcgccgccgcgccgaggccgacaggccgcggagagagatgatgttccagacaaggatgttattgggaagaatgggtatttatgatcagtatcaggattggcgcctcgatgtcgacaacatgacatatgaggagttgctcgatcttgaggaccggattggatatgtaagtacagggcttcgtgaggacgagatcattcaaagccttaggatggtaaagtactccgcgttcaaccccagacatttttctacggaaatggacaggagatgtagcatctgtcaagaagagttcgaagtacacgaggaaactgggaagctgagctgtggccacagctatcacgtgcactgcataaagcagtggctttctcggaagaacgcttgtccggtttgcaagaccactgtctcgaagacctgaagtccctattctttctagtgtctgaaccacactttcattaagtataatccaattgaaatgcaaaagattagttctattgttgctgtacagtccagcagccgtctgcacgcacgcttgttgagtacagtatctagtacacgcacgcttgctgtacacacatgatcctagtatttatttgcatatggaacttacaatttttttc

SEQ ID NO: 19788 - protein, 316 aa, Zea mays subsp. mays
  peptide (1)..(316): Ceres Seq. ID no. 12454846
  misc_feature (269)..(309): Pfam Name: Zinc finger, C3HC4 type (RING finger) Pfam Description: Zinc finger, C3HC4 type (RING finger)
  misc_feature (150)..(316): Homolog of NCBI NO: 38345496 NR Description: OSJNBa0010D21.9 [Oryza sativa (japonica
  misc_feature (7)..(312): Homolog of NCBI NO: 15239131 NR Description: putative protein
  misc_feature (193)..(311): Homolog of NCBI NO: 15219544 NR Description: putative RING zinc finger protein; protein id:
  misc_feature (182)..(312): Homolog of NCBI NO: 15220067 NR Description: hypothetical protein; protein id: At1g45180.1
  misc_feature (194)..(310): Homolog of NCBI NO: 25511721 NR Description: F2H15.19 protein - Arabidopsis thaliana
  misc_feature (192)..(310): Homolog of NCBI NO: 21554695 NR Description: zinc-finger protein (C-terminal), putative
  misc_feature (192)..(310): Homolog of NCBI NO: 15220912 NR Description: zinc-finger protein (C-terminal), putative
  misc_feature (193)..(255): Homolog of NCBI NO: 34911396 NR Description: RING zinc finger protein-like
  misc_feature (273)..(316): Homolog of NCBI NO: 34911396 NR Description: RING zinc finger protein-like
  misc_feature (68)..(288): Homolog of NCBI NO: 34911396 NR Description: RING zinc finger protein-like
MARDGGSRGSPGAERRRVALRALLASGGAEAEAARTSSKGLLRGLRCTSAAASQAIAPEIPRPPADWRGLGCAAAAQAHAPAAAVEAARPTADWRRLGCAAGAAPAVQAQAPRRSEEWRVRRRRNERERRKARAGGVSGGGGASAGMGVGGDVWCTPGIPFAAEASSVDCVVAPHHTVAARRRAEADRPRREMMFQTRMLLGRMGIYDQYQDWRLDVDNMTYEELLDLEDRIGYVSTGLREDEIIQSLRMVKYSAFNPRHFSTEMDRRCSICQEEFEVHEETGKLSCGHSYHVHCIKQWLSRKNACPVCKTTVSKT

SEQ ID NO: 19789 - protein, 251 aa, Zea mays subsp. mays
  peptide (1)..(251): Ceres Seq. ID no. 12454847
LSLQFNFRLSESSPHLPATEEAEAHERDAATAREEEEAKSNRTLNGSRRRQQRVTGGGAAAGGAACPPRVGWRGGGGREDVEQGPATRPSVHVRGRIAGYRAGDPAASGGLARTRLRRGGPGARAGCRGGSGPAHGGLAQAWVRGWSGTGGPGSSAPAFRGVAREAAEEREGEAEGEGWRRQWWWWGQCRDGRRRGRLVHAGHTVRRRGLFGGLRGGAAPYGGRAPPRRGRQAAERDDVPDKDVIGKNGYL

SEQ ID NO: 19790 - protein, 170 aa, Zea mays subsp. mays
  peptide (1)..(170): Ceres Seq. ID no. 12454848
  misc_feature (123)..(163): Pfam Name: Zinc finger, C3HC4 type (RING finger) Pfam Description: Zinc finger, C3HC4 type (RING finger)
  misc_feature (4)..(170): Homolog of NCBI NO: 38345496 NR Description: OSJNBa0010D21.9 [Oryza sativa (japonica
  misc_feature (1)..(166): Homolog of NCBI NO: 15239131 NR Description: putative protein
  misc_feature (47)..(165): Homolog of NCBI NO: 15219544 NR Description: putative RING zinc finger protein; protein id:
  misc_feature (36)..(166): Homolog of NCBI NO: 15220067 NR Description: hypothetical protein; protein id: At1g45180.1
  misc_feature (48)..(164): Homolog of NCBI NO: 25511721 NR Description: F2H15.19 protein - Arabidopsis thaliana
  misc_feature (46)..(164): Homolog of NCBI NO: 21554695 NR Description: zinc-finger protein (C-terminal), putative
  misc_feature (46)..(164): Homolog of NCBI NO: 15220912 NR Description: zinc-finger protein (C-terminal), putative
  misc_feature (47)..(109): Homolog of NCBI NO: 34911396 NR Description: RING zinc finger protein-like
  misc_feature (127)..(170): Homolog of NCBI NO: 34911396 NR Description: RING zinc finger protein-like
  misc_feature (1)..(142): Homolog of NCBI NO: 34911396 NR Description: RING zinc finger protein-like
MGVGGDVWCTPGIPFAAEASSVDCVVAPHHTVAARRRAEADRPRREMMFQTRMLLGRMGIYDQYQDWRLDVDNMTYEELLDLEDRIGYVSTGLREDEIIQSLRMVKYSAFNPRHFSTEMDRRCSICQEEFEVHEETGKLSCGHSYHVHCIKQWLSRKNACPVCKTTVSKT

SEQ ID NO: 19791 - DNA, 1600 bp, Zea mays subsp. mays
  misc_feature (1)..(1600): Ceres Seq. ID no. 12364490
  misc_feature: MA Experiment ID: 108504 Result: Up-regulated in Transcription
  misc_feature: MA Experiment 108504 PARAMETER Experiment Name: Zm_Drought_P Parameter: Age (day) Value: 8
  misc_feature: MA Experiment 108504 PARAMETER Experiment Name: Zm_Drought_P Parameter: Organism Value: Zea mays
  misc_feature: MA Experiment 108504 PARAMETER Experiment Name: Zm_Drought_P Parameter: Plant Line Value: 35A19
  misc_feature: MA Experiment 108504 PARAMETER Experiment Name: Zm_Drought_P Parameter: Timepoint (hr) Value: 12
  misc_feature: MA Experiment 108504 PARAMETER Experiment Name: Zm_Drought_P Parameter: Tissue Value: Aerial
  misc_feature: MA Experiment 108504 PARAMETER Experiment Name: Zm_Drought_P Parameter: Treatment Value: Drought vs. No Drought
  misc_feature: MA Experiment ID: 108523 Result: Down-regulated in Transcription
  misc_feature: MA Experiment 108523 PARAMETER Experiment Name: Zm_42deg_Heat_P Parameter: Age (day) Value: 8
  misc_feature: MA Experiment 108523 PARAMETER Experiment Name: Zm_42deg_Heat_P Parameter: Organism Value: Zea mays
  misc_feature: MA Experiment 108523 PARAMETER Experiment Name: Zm_42deg_Heat_P Parameter: Plant Line Value: 35A19
  misc_feature: MA Experiment 108523 PARAMETER Experiment Name: Zm_42deg_Heat_P Parameter: Temperature (deg C) Value: 42 vs. 22
  misc_feature: MA Experiment 108523 PARAMETER Experiment Name: Zm_42deg_Heat_P Parameter: Timepoint (hr) Value: 6
  misc_feature: MA Experiment 108523 PARAMETER Experiment Name: Zm_42deg_Heat_P Parameter: Tissue Value: Aerial
  misc_feature: MA Experiment ID: 20000480 Result: Up-regulated in Transcription
  misc_feature: MA Experiment 20000480 PARAMETER Experiment Name: Zm_Drought_P Parameter: Age (day) Value: 11
  misc_feature: MA Experiment 20000480 PARAMETER Experiment Name: Zm_Drought_P Parameter: Organism Value: Zea mays
  misc_feature: MA Experiment 20000480 PARAMETER Experiment Name: Zm_Drought_P Parameter: Plant Line Value: 35A19
  misc_feature: MA Experiment 20000480 PARAMETER Experiment Name: Zm_Drought_P Parameter: Timepoint (hr) Value: 72
  misc_feature: MA Experiment 20000480 PARAMETER Experiment Name: Zm_Drought_P Parameter: Tissue Value: Aerial
  misc_feature: MA Experiment 20000480 PARAMETER Experiment Name: Zm_Drought_P Parameter: Treatment Value: Drought vs. No Drought
gcacgagaccattacctagaacatcctaatcgaaaacccagacccagagcttctcttctcaaaagatgcaggagcaggacgtggacgatggcggcggcaggacgacccagcagcaggagaagtcgatcgacgactggctccctatcaactcctccaggaaggccaagtggtggtactccgccttccacaatgtcaccgccatggtcggcgccggcgtgctcggcctcccctacgccatgtccgagcttggctggggccctggcatcgcggtgatgatcctgtcgtggataatcaccctatacacgctatggcagatggtggagatgcacgagatggtgcctgggaagcggttcgaccggtaccacgagctcgggcagcacgtcttcggcgacaggctgggcctctggatcgtggtgccgcagcagctggcagtagaggtgagcctgaacatcatctacatggtcaccggcggccagtccctcaagaagttccacgacgtcatctgcgacggcggcaggtgcggcggcgacttgaagctctcctacttcatcatgatcttcgcctccgtccacctggtcctctcccagctccccaacttcaactccatctccgccgtgtcgctcgccgccgccgtcatgtcgctcagttactccaccattgcgtggggcgcgtcgctgcacagagggaggagagaggacgtggactaccacctgcgcgccacgaccaccccagggaaggtgttcggcttcctgggaggcctaggggacgtggcgttcgcctactcggggcacaacgtggtgctggagatccaggccaccatcccgtccacgccggacaagccgtccaagaaggccatgtggaagggcgcctttgtcgcctacgtcgtcgtcgccatctgctacttccccgtcacgttcgtcgggtactgggccttcggcagcggcgtcgacgagaacatcctcatcacgctctccaagcccaagtggctcattgccctcgccaacatgatggtcgtcgtccatgtcattggcagttaccaggtttatgccatgccggtgtttgacatgatagagacggtgctggtcaagaaaatgaggttcgctccgagcctcacgctccgtcttattgcccggagcgtctatgttgcgttcacaatgtttctaggcatcactttccccttcttcggtggattgctcagtttcttcggcggattagccttcgcaccgacaacttattttcttccctgcatcatgtggctcaaggtttacaagcccaaacggttcggcctttcatggttcatcaactggatctgcatcgttattggagtgctgctgttgattctgggtccgataggagggctccggcagatcattttgtcagccaccacatacaaattctaccagtaaaatcgatcaactggagtcgtatggcgtggctgttttgttagcattacatttcttagggtggattggcttttaatgtacacgagcgagtgagattgatgctagtagctcctaggagtatatatatttctatcatccacagagcttaatgtatcttgtagttgggacattaaaagagcaagtaggctttactcgct

SEQ ID NO: 19792 - protein, 446 aa, Zea mays subsp. mays
  peptide (1)..(446): Ceres Seq. ID no. 12364491
  misc_feature (47)..(136): Pfam Name: Tryptophan/tyrosine permease family Pfam Description: Tryptophan/tyrosine permease family
  misc_feature (1)..(445): Homolog of NCBI NO: 25297692 NR Description: hypothetical protein F14O23.2 [imported] -
  misc_feature (15)..(436): Homolog of NCBI NO: 6091720 NR Description: putative amino acid permease [Arabidopsis
  misc_feature (15)..(436): Homolog of NCBI NO: 15232176 NR Description: putative amino acid permease; protein id:
  misc_feature (15)..(436): Homolog of NCBI NO: 15219896 NR Description: lysine and histidine specific transporter,
  misc_feature (5)..(445): Homolog of NCBI NO: 7489096 NR Description: amino acid permease 1 - wood tobacco
  misc_feature (17)..(445): Homolog of NCBI NO: 2576361 NR Description: lysine and histidine specific transporter
  misc_feature (16)..(445): Homolog of NCBI NO: 22330117 NR Description: lysine and histidine specific transporter,
  misc_feature (16)..(445): Homolog of NCBI NO: 12597815 NR Description: lysine and histidine specific transporter,
  misc_feature (17)..(445): Homolog of NCBI NO: 15220504 NR Description: putative amino acid permease; protein id:
  misc_feature (17)..(445): Homolog of NCBI NO: 18395471 NR Description: putative lysine/histidine-specific permease
MQEQDVDDGGGRTTQQQEKSIDDWLPINSSRKAKWWYSAFHNVTAMVGAGVLGLPYAMSELGWGPGIAVMILSWIITLYTLWQMVEMHEMVPGKRFDRYHELGQHVFGDRLGLWIVVPQQLAVEVSLNIIYMVTGGQSLKKFHDVICDGGRCGGDLKLSYFIMIFASVHLVLSQLPNFNSISAVSLAAAVMSLSYSTIAWGASLHRGRREDVDYHLRATTTPGKVFGFLGGLGDVAFAYSGHNVVLEIQATIPSTPDKPSKKAMWKGAFVAYVVVAICYFPVTFVGYWAFGSGVDENILITLSKPKWLIALANMMVVVHVIGSYQVYAMPVFDMIETVLVKKMRFAPSLTLRLIARSVYVAFTMFLGITFPFFGGLLSFFGGLAFAPTTYFLPCIMWLKVYKPKRFGLSWFINWICIVIGVLLLILGPIGGLRQIILSATTYKFYQ

SEQ ID NO: 19793 - protein, 401 aa, Zea mays subsp. mays
  peptide (1)..(401): Ceres Seq. ID no. 12364492
  misc_feature (2)..(91): Pfam Name: Tryptophan/tyrosine permease family Pfam Description: Tryptophan/tyrosine permease family
  misc_feature (1)..(400): Homolog of NCBI NO: 25297692 NR Description: hypothetical protein F14O23.2 [imported] -
  misc_feature (1)..(391): Homolog of NCBI NO: 6091720 NR Description: putative amino acid permease [Arabidopsis
  misc_feature (1)..(391): Homolog of NCBI NO: 15232176 NR Description: putative amino acid permease; protein id:
  misc_feature (1)..(391): Homolog of NCBI NO: 15219896 NR Description: lysine and histidine specific transporter,
  misc_feature (1)..(400): Homolog of NCBI NO: 7489096 NR Description: amino acid permease 1 - wood tobacco
  misc_feature (1)..(400): Homolog of NCBI NO: 2576361 NR Description: lysine and histidine specific transporter
  misc_feature (1)..(400): Homolog of NCBI NO: 22330117 NR Description: lysine and histidine specific transporter,
  misc_feature (1)..(400): Homolog of NCBI NO: 12597815 NR Description: lysine and histidine specific transporter,
  misc_feature (1)..(400): Homolog of NCBI NO: 15220504 NR Description: putative amino acid permease; protein id:
  misc_feature (1)..(400): Homolog of NCBI NO: 18395471 NR Description: putative lysine/histidine-specific permease
MVGAGVLGLPYAMSELGWGPGIAVMILSWIITLYTLWQMVEMHEMVPGKRFDRYHELGQHVFGDRLGLWIVVPQQLAVEVSLNIIYMVTGGQSLKKFHDVICDGGRCGGDLKLSYFIMIFASVHLVLSQLPNFNSISAVSLAAAVMSLSYSTIAWGASLHRGRREDVDYHLRATTTPGKVFGFLGGLGDVAFAYSGHNVVLEIQATIPSTPDKPSKKAMWKGAFVAYVVVAICYFPVTFVGYWAFGSGVDENILITLSKPKWLIALANMMVVVHVIGSYQVYAMPVFDMIETVLVKKMRFAPSLTLRLIARSVYVAFTMFLGITFPFFGGLLSFFGGLAFAPTTYFLPCIMWLKVYKPKRFGLSWFINWICIVIGVLLLILGPIGGLRQIILSATTYKFYQ

SEQ ID NO: 19794 - protein, 389 aa, Zea mays subsp. mays
  peptide (1)..(389): Ceres Seq. ID no. 12364493
  misc_feature (1)..(79): Pfam Name: Tryptophan/tyrosine permease family Pfam Description: Tryptophan/tyrosine permease family
  misc_feature (1)..(388): Homolog of NCBI NO: 25297692 NR Description: hypothetical protein F14O23.2 [imported] -
  misc_feature (1)..(379): Homolog of NCBI NO: 6091720 NR Description: putative amino acid permease [Arabidopsis
  misc_feature (1)..(379): Homolog of NCBI NO: 15232176 NR Description: putative amino acid permease; protein id:
  misc_feature (1)..(379): Homolog of NCBI NO: 15219896 NR Description: lysine and histidine specific transporter,
  misc_feature (1)..(388): Homolog of NCBI NO: 7489096 NR Description: amino acid permease 1 - wood tobacco
  misc_feature (1)..(388): Homolog of NCBI NO: 2576361 NR Description: lysine and histidine specific transporter
  misc_feature (1)..(388): Homolog of NCBI NO: 22330117 NR Description: lysine and histidine specific transporter,
  misc_feature (1)..(388): Homolog of NCBI NO: 12597815 NR Description: lysine and histidine specific transporter,
  misc_feature (1)..(388): Homolog of NCBI NO: 15220504 NR Description: putative amino acid permease; protein id:
  misc_feature (1)..(388): Homolog of NCBI NO: 18395471 NR Description: putative lysine/histidine-specific permease
MSELGWGPGIAVMILSWIITLYTLWQMVEMHEMVPGKRFDRYHELGQHVFGDRLGLWIVVPQQLAVEVSLNIIYMVTGGQSLKKFHDVICDGGRCGGDLKLSYFIMIFASVHLVLSQLPNFNSISAVSLAAAVMSLSYSTIAWGASLHRGRREDVDYHLRATTTPGKVFGFLGGLGDVAFAYSGHNVVLEIQATIPSTPDKPSKKAMWKGAFVAYVVVAICYFPVTFVGYWAFGSGVDENILITLSKPKWLIALANMMVVVHVIGSYQVYAMPVFDMIETVLVKKMRFAPSLTLRLIARSVYVAFTMFLGITFPFFGGLLSFFGGLAFAPTTYFLPCIMWLKVYKPKRFGLSWFINWICIVIGVLLLILGPIGGLRQIILSATTYKFYQ

SEQ ID NO: 19795 - DNA, 1046 bp, Zea mays subsp. mays; identical to SEQ ID NO: 8061
  misc_feature (1)..(1046): Ceres Seq. ID no. 12345398
  misc_feature: MA Experiment ID: 108528 Result: Up-regulated in Transcription
  misc_feature: MA Experiment 108528 PARAMETER Experiment Name: Zm_Imbibed_Seeds_P Parameter: Age (day) Value: 5 vs. 2
  misc_feature: MA Experiment 108528 PARAMETER Experiment Name: Zm_Imbibed_Seeds_P Parameter: Organism Value: Zea mays
  misc_feature: MA Experiment 108528 PARAMETER Experiment Name: Zm_Imbibed_Seeds_P Parameter: Plant Line Value: 35A19
  misc_feature: MA Experiment 108528 PARAMETER Experiment Name: Zm_Imbibed_Seeds_P Parameter: Tissue Value: Aerial vs. Embryo
  misc_feature: MA Experiment ID: 108530 Result: Up-regulated in Transcription
  misc_feature: MA Experiment 108530 PARAMETER Experiment Name: Zm_Imbibed_Seeds_P Parameter: Age (day) Value: 6 vs. 2
  misc_feature: MA Experiment 108530 PARAMETER Experiment Name: Zm_Imbibed_Seeds_P Parameter: Organism Value: Zea mays
  misc_feature: MA Experiment 108530 PARAMETER Experiment Name: Zm_Imbibed_Seeds_P Parameter: Plant Line Value: 35A19
  misc_feature: MA Experiment 108530 PARAMETER Experiment Name: Zm_Imbibed_Seeds_P Parameter: Tissue Value: Aerial vs. Embryo
  misc_feature: MA Experiment ID: 108559 Result: Down-regulated in Transcription
  misc_feature: MA Experiment 108559 PARAMETER Experiment Name: Zm_5mM_NO_P Parameter: Age (day) Value: 8
  misc_feature: MA Experiment 108559 PARAMETER Experiment Name: Zm_5mM_NO_P Parameter: Organism Value: Zea mays
  misc_feature: MA Experiment 108559 PARAMETER Experiment Name: Zm_5mM_NO_P Parameter: Plant Line Value: 35A19
  misc_feature: MA Experiment 108559 PARAMETER Experiment Name: Zm_5mM_NO_P Parameter: Timepoint (hr) Value: 12
  misc_feature: MA Experiment 108559 PARAMETER Experiment Name: Zm_5mM_NO_P Parameter: Tissue Value: Aerial
  misc_feature: MA Experiment 108559 PARAMETER Experiment Name: Zm_5mM_NO_P Parameter: Treatment Value: 5mM NO vs. No Treatment
  misc_feature: MA Experiment ID: 108597 Result: Up-regulated in Transcription
  misc_feature: MA Experiment 108597 PARAMETER Experiment Name: Zm_100uM_ABA_P Parameter: Age (day) Value: 9
  misc_feature: MA Experiment 108597 PARAMETER Experiment Name: Zm_100uM_ABA_P Parameter: Organism Value: Zea mays
  misc_feature: MA Experiment 108597 PARAMETER Experiment Name: Zm_100uM_ABA_P Parameter: Plant Line Value: 35A19
  misc_feature: MA Experiment 108597 PARAMETER Experiment Name: Zm_100uM_ABA_P Parameter: Timepoint (hr) Value: 24
  misc_feature: MA Experiment 108597 PARAMETER Experiment Name: Zm_100uM_ABA_P Parameter: Tissue Value: Aerial
  misc_feature: MA Experiment 108597 PARAMETER Experiment Name: Zm_100uM_ABA_P Parameter: Treatment Value: 100uM ABA vs. No Treatment
  misc_feature: MA Experiment ID: 108687 Result: Down-regulated in Transcription
  misc_feature: MA Experiment 108687 PARAMETER Experiment Name: Zm_Embryos-Flowers__P Parameter: Tissue Value: Embryo vs. Aerial+
  misc_feature: MA Experiment ID: 108689 Result: Up-regulated in Transcription
  misc_feature: MA Experiment 108689 PARAMETER Experiment Name: Zm_Drought_Roots_P Parameter: Age (day) Value: 9
  misc_feature: MA Experiment 108689 PARAMETER Experiment Name: Zm_Drought_Roots_P Parameter: Organism Value: Zea mays
  misc_feature: MA Experiment 108689 PARAMETER Experiment Name: Zm_Drought_Roots_P Parameter: Plant Line Value: 35A19
  misc_feature: MA Experiment 108689 PARAMETER Experiment Name: Zm_Drought_Roots_P Parameter: Timepoint (hr) Value: 24
  misc_feature: MA Experiment 108689 PARAMETER Experiment Name: Zm_Drought_Roots_P Parameter: Tissue Value: Roots
  misc_feature: MA Experiment 108689 PARAMETER Experiment Name: Zm_Drought_Roots_P Parameter: Treatment Value: Drought vs. No Drought
  misc_feature: MA Experiment ID: 20000477 Result: Down-regulated in Transcription
  misc_feature: MA Experiment 20000477 PARAMETER Experiment Name: Zm_5mM_SA_P Parameter: Age (day) Value: 10
  misc_feature: MA Experiment 20000477 PARAMETER Experiment Name: Zm_5mM_SA_P Parameter: Organism Value: Zea mays
  misc_feature: MA Experiment 20000477 PARAMETER Experiment Name: Zm_5mM_SA_P Parameter: Plant Line Value: 35A19
  misc_feature: MA Experiment 20000477 PARAMETER Experiment Name: Zm_5mM_SA_P Parameter: Timepoint (hr) Value: 48
  misc_feature: MA Experiment 20000477 PARAMETER Experiment Name: Zm_5mM_SA_P Parameter: Tissue Value: Aerial
  misc_feature: MA Experiment 20000477 PARAMETER Experiment Name: Zm_5mM_SA_P Parameter: Treatment Value: 5mM SA vs. No Treatment

SEQ ID NO: 19796 - protein, 248 aa, Zea mays subsp. mays; identical to SEQ ID NO: 8062
  peptide (1)..(248): Ceres Seq. ID no. 12345399
  misc_feature (86)..(240): Pfam Name: Inorganic pyrophosphatase Pfam Description: Inorganic pyrophosphatase
  misc_feature (43)..(248): Homolog of NCBI NO: 3885882 NR Description: inorganic pyrophosphatase [Oryza sativa]
  misc_feature (54)..(248): Homolog of NCBI NO: 15231849 NR Description: inorganic pyrophosphatase -like protein; protein
  misc_feature (54)..(248): Homolog of NCBI NO: 21593570 NR Description: inorganic pyrophosphatase-like protein
  misc_feature (51)..(248): Homolog of NCBI NO: 15223288 NR Description: soluble inorganic pyrophosphatase, putative; id: At1g01050.1, supported by cDNA: 124537., supported by cDNA: supported by cDNA: gi_16323128, supported by cDNA:
  misc_feature (51)..(248): Homolog of NCBI NO: 40642617 NR Description: soluble pyrophosphatase [Beta vulgaris]
  misc_feature (51)..(248): Homolog of NCBI NO: 2500047 NR Description: Soluble inorganic pyrophosphatase (Pyrophosphate hydrolase) (PPase) >gi|7436030|pir||T07594 probable inorganic
  misc_feature (51)..(248): Homolog of NCBI NO: 5669924 NR Description: soluble inorganic pyrophosphatase [Populus
  misc_feature (54)..(248): Homolog of NCBI NO: 15226453 NR Description: putative inorganic pyrophosphatase; protein id: [Arabidopsis thaliana] >gi|7436034|pir||T02201 probable inorganic
  misc_feature (51)..(248): Homolog of NCBI NO: 4033424 NR Description: Soluble inorganic pyrophosphatase (Pyrophosphate hydrolase) (PPase) >gi|7436036|pir||T01370 inorganic
  misc_feature (54)..(248): Homolog of NCBI NO: 26451240 NR Description: putative inorganic pyrophosphatase [Arabidopsis

SEQ ID NO: 19797 - protein, 201 aa, Zea mays subsp. mays; identical to SEQ ID NO: 8063
  peptide (1)..(201): Ceres Seq. ID no. 12345400
  misc_feature (39)..(193): Pfam Name: Inorganic pyrophosphatase Pfam Description: Inorganic pyrophosphatase
  misc_feature (1)..(201): Homolog of NCBI NO: 3885882 NR Description: inorganic pyrophosphatase [Oryza sativa]
  misc_feature (7)..(201): Homolog of NCBI NO: 15231849 NR Description: inorganic pyrophosphatase -like protein; protein
  misc_feature (7)..(201): Homolog of NCBI NO: 21593570 NR Description: inorganic pyrophosphatase-like protein
  misc_feature (4)..(201): Homolog of NCBI NO: 15223288 NR Description: soluble inorganic pyrophosphatase, putative; id: At1g01050.1, supported by cDNA: 124537., supported by cDNA: supported by cDNA: gi_16323128, supported by cDNA:
  misc_feature (4)..(201): Homolog of NCBI NO: 40642617 NR Description: soluble pyrophosphatase [Beta vulgaris]
  misc_feature (4)..(201): Homolog of NCBI NO: 2500047 NR Description: Soluble inorganic pyrophosphatase (Pyrophosphate hydrolase) (PPase) >gi|7436030|pir||T07594 probable inorganic
  misc_feature (4)..(201): Homolog of NCBI NO: 5669924 NR Description: soluble inorganic pyrophosphatase [Populus
  misc_feature (7)..(201): Homolog of NCBI NO: 15226453 NR Description: putative inorganic pyrophosphatase; protein id: [Arabidopsis thaliana] >gi|7436034|pir||T02201 probable inorganic
  misc_feature (4)..(201): Homolog of NCBI NO: 4033424 NR Description: Soluble inorganic pyrophosphatase (Pyrophosphate hydrolase) (PPase) >gi|7436036|pir||T01370 inorganic
  misc_feature (7)..(201): Homolog of NCBI NO: 26451240 NR Description: putative inorganic pyrophosphatase [Arabidopsis

SEQ ID NO: 19798 - DNA, 1729 bp, Zea mays subsp. mays
  misc_feature (1)..(1729): Ceres Seq. ID no. 12381747
  misc_feature: MA Experiment ID: 108528 Result: Up-regulated in Transcription
  misc_feature: MA Experiment 108528 PARAMETER Experiment Name: Zm_Imbibed_Seeds_P Parameter: Age (day) Value: 5 vs. 2
  misc_feature: MA Experiment 108528 PARAMETER Experiment Name: Zm_Imbibed_Seeds_P Parameter: Organism Value: Zea mays
  misc_feature: MA Experiment 108528 PARAMETER Experiment Name: Zm_Imbibed_Seeds_P Parameter: Plant Line Value: 35A19
  misc_feature: MA Experiment 108528 PARAMETER Experiment Name: Zm_Imbibed_Seeds_P Parameter: Tissue Value: Aerial vs. Embryo
  misc_feature: MA Experiment ID: 108530 Result: Up-regulated in Transcription
  misc_feature: MA Experiment 108530 PARAMETER Experiment Name: Zm_Imbibed_Seeds_P Parameter: Age (day) Value: 6 vs. 2
  misc_feature: MA Experiment 108530 PARAMETER Experiment Name: Zm_Imbibed_Seeds_P Parameter: Organism Value: Zea mays
  misc_feature: MA Experiment 108530 PARAMETER Experiment Name: Zm_Imbibed_Seeds_P Parameter: Plant Line Value: 35A19
  misc_feature: MA Experiment 108530 PARAMETER Experiment Name: Zm_Imbibed_Seeds_P Parameter: Tissue Value: Aerial vs. Embryo
  misc_feature: MA Experiment ID: 108535 Result: Down-regulated in Transcription
  misc_feature: MA Experiment 108535 PARAMETER Experiment Name: Zm_Meristem_P Parameter: Age (day) Value: 8
  misc_feature: MA Experiment 108535 PARAMETER Experiment Name: Zm_Meristem_P Parameter: Organism Value: Zea mays
  misc_feature: MA Experiment 108535 PARAMETER Experiment Name: Zm_Meristem_P Parameter: Plant Line Value: 35A19
  misc_feature: MA Experiment 108535 PARAMETER Experiment Name: Zm_Meristem_P Parameter: Tissue Value: Root Meristem vs. Above Root Meristem
  misc_feature: MA Experiment ID: 108544 Result: Up-regulated in Transcription
  misc_feature: MA Experiment ID: 108688 Result: Down-regulated in Transcription
  misc_feature: MA Experiment 108688 PARAMETER Experiment Name: Zm_Embryos-Flowers__P Parameter: Tissue Value: Immature Flowers vs. Aerial+
  misc_feature: MA Experiment ID: 20000488 Result: Down-regulated in Transcription
  misc_feature: MA Experiment 20000488 PARAMETER Experiment Name: Zm_50mM_NH4NO3_L_to_H_P Parameter: Organism Value: Zea mays
  misc_feature: MA Experiment 20000488 PARAMETER Experiment Name: Zm_50mM_NH4NO3_L_to_H_P Parameter: Timepoint (hr) Value: 8
  misc_feature: MA Experiment 20000488 PARAMETER Experiment Name: Zm_50mM_NH4NO3_L_to_H_P Parameter: Tissue Value: Leaves
  misc_feature: MA Experiment 20000488 PARAMETER Experiment Name: Zm_50mM_NH4NO3_L_to_H_P Parameter: Treatment Value: 50mM NH4NO3 vs. 100mM Mannitol
  misc_feature: MA Experiment ID: 20000492 Result: Down-regulated in Transcription
  misc_feature: MA Experiment 20000492 PARAMETER Experiment Name: Zm_Hybrid_Seed_Dev_P Parameter: DAP Value: 12
  misc_feature: MA Experiment 20000492 PARAMETER Experiment Name: Zm_Hybrid_Seed_Dev_P Parameter: Organism Value: Zea mays
  misc_feature: MA Experiment 20000492 PARAMETER Experiment Name: Zm_Hybrid_Seed_Dev_P Parameter: Plant Line Value: 35A19
  misc_feature: MA Experiment 20000492 PARAMETER Experiment Name: Zm_Hybrid_Seed_Dev_P Parameter: Tissue Value: Fert Kernel vs. Unfert Floret
  misc_feature: MA Experiment ID: 20000535 Result: Down-regulated in Transcription
  misc_feature: MA Experiment 20000535 PARAMETER Experiment Name: Zm_Hybrid_Seed_Dev_P Parameter: DAP Value: 30 vs. 12
  misc_feature: MA Experiment 20000535 PARAMETER Experiment Name: Zm_Hybrid_Seed_Dev_P Parameter: Organism Value: Zea mays
  misc_feature: MA Experiment 20000535 PARAMETER Experiment Name: Zm_Hybrid_Seed_Dev_P Parameter: Plant Line Value: 35A19
  misc_feature: MA Experiment 20000535 PARAMETER Experiment Name: Zm_Hybrid_Seed_Dev_P Parameter: Tissue Value: Embryo vs. Unfert Floret
gcacgagaccattacctagaacatcctaatcgaaaagattgattgattgggttcctggcgttagtttgcgcgattcgggcagaggagtagacggttccagcaaatttggtccaacaattctttgtttggccgcttgggctccggtctctcgattcttcgtagcttggtgggagggcgccggatccagcggccatcatggttgtcgacacggtcagcgcgagcacctccataatagccccccacctgttcgaccacaggtccaggggcgccggcgcttcccaccaccacctccgccggacgttccatgtcgtcgcctgccgacccctgcccaccgccttcgccggccgccgcctcgtggcccgggtcaccaggcagccgtcgtcgcgcctcgccgattggccggtcagggcgctggctatgggggtcacgaaggaggtcagggccagccctcgcagggagtaccgggggatccccggggatggtggagacatgggggacgttggggtcaccagccccacgccgtcatggcctccgcggaacagggcagatgaccccaagctgcataacccgctgctccgcctcgagcgcatgggctgcgggtggctcggcgtcatcttcgagtgggagggggtcatcgttgaggatgatgccgaattggaaaggcaggcgtggttgaccctggcacaggaggagggcaagtcgccgcctcccgcttttctgttgcggagagtcgaagggatgaagaacgagcaggcgatttctgaggttctctgctggtctcgggatccctccgagcttaggagattggccctgaggaaggacgagatccacagcagccttcgaggtggctcctaccaccagatgaggaacggttccagggagttcatgagcacgctcgccaattacaagatccctatcgctgtggtgaccacacgcccacggaaggttattgaggaagccattgaagctgtaggcgtgcgcagcttcttcgatgcggttgtgacagcagaagacgtgtaccggggcaagcctgacccagaaatgttcctgtacgctgctcagcttctcagtttcatcccggagaggtgcatcgtgtttgggaactccaattcggcggtggaagctgcgcatgacgcacgtatgaagtgtgtcgcggtcgcaagcaagcacaagatctacgagcttagcgctgcagaccttgtggtgaagcaactagacgagctatccgtcgttgacttgaagaaccttgctgatattgagtccccggagtttggcatggaacctgaaccagagatggaggaggaggaagtgcccccaccatcgacgtctgtgggtatagatgatctattctggtaagagaccaaattgtacatttgattgattcctctccagaacacagatgtattgttgtcaactgtcatagtgatcagaaagaagggcttatcatccttctgtaatcagtagaatgtgatatgtaaaaaatgttgtctagagctcacacactgtatatacatactcagaaagaaagctgggaactgaatatatgaatcagaacatttgaatctgcagttcctgaaacaatgtaacaccacaaggtttctgtcgccgaatcagtattccggatgctgattatattgttctctgcagtcttcttgccaaaaaaaaaaaaaaaaaaaaaaaaaaaaaaagaaaaaaaaaaaaaaaaaacggcacgagaagccggcacgag

SEQ ID NO: 19799 - protein, 386 aa, Zea mays subsp. mays
  peptide (1)..(386): Ceres Seq. ID no. 12381748
  misc_feature (136)..(324): Pfam Name: haloacid dehalogenase-like hydrolase Pfam Description: haloacid dehalogenase-like hydrolase
  misc_feature (139)..(346): Homolog of NCBI NO: 21220059 NR Description: putative phosphatase [Streptomyces coelicolor
  misc_feature (140)..(341): Homolog of NCBI NO: 21672855 NR Description: hydrolase, haloacid dehalogenase-like family
  misc_feature (185)..(385): Homolog of NCBI NO: 6016697 NR Description: unknown protein [Arabidopsis thaliana]
  misc_feature (138)..(385): Homolog of NCBI NO: 14532506 NR Description: AT3g10970/F9F8_21 [Arabidopsis thaliana]
  misc_feature (138)..(385): Homolog of NCBI NO: 21592870 NR Description: unknown [Arabidopsis thaliana]
  misc_feature (138)..(385): Homolog of NCBI NO: 18399067 NR Description: expressed protein
  misc_feature (120)..(372): Homolog of NCBI NO: 38345597 NR Description: OSJNBb0012E24.15 [Oryza sativa (japonica
  misc_feature (138)..(368): Homolog of NCBI NO: 18542168 NR Description: putative genetic modifier [Zea mays]
  misc_feature (138)..(368): Homolog of NCBI NO: 10444400 NR Description: genetic modifier [Zea mays]
  misc_feature (43)..(383): Homolog of NCBI NO: 15234236 NR Description: putative protein
MVVDTVSASTSIIAPHLFDHRSRGAGASHHHLRRTFHVVACRPLPTAFAGRRLVARVTRQPSSRLADWPVRALAMGVTKEVRASPRREYRGIPGDGGDMGDVGVTSPTPSWPPRNRADDPKLHNPLLRLERMGCGWLGVIFEWEGVIVEDDAELERQAWLTLAQEEGKSPPPAFLLRRVEGMKNEQAISEVLCWSRDPSELRRLALRKDEIHSSLRGGSYHQMRNGSREFMSTLANYKIPIAVVTTRPRKVIEEAIEAVGVRSFFDAVVTAEDVYRGKPDPEMFLYAAQLLSFIPERCIVFGNSNSAVEAAHDARMKCVAVASKHKIYELSAADLVVKQLDELSVVDLKNLADIESPEFGMEPEPEMEEEEVPPPSTSVGIDDLFW

SEQ ID NO: 19800 - protein, 312 aa, Zea mays subsp. mays
  peptide (1)..(312): Ceres Seq. ID no. 12381749
  misc_feature (62)..(250): Pfam Name: haloacid dehalogenase-like hydrolase Pfam Description: haloacid dehalogenase-like hydrolase
  misc_feature (65)..(272): Homolog of NCBI NO: 21220059 NR Description: putative phosphatase [Streptomyces coelicolor
  misc_feature (66)..(267): Homolog of NCBI NO: 21672855 NR Description: hydrolase, haloacid dehalogenase-like family
  misc_feature (111)..(311): Homolog of NCBI NO: 6016697 NR Description: unknown protein [Arabidopsis thaliana]
  misc_feature (64)..(311): Homolog of NCBI NO: 14532506 NR Description: AT3g10970/F9F8_21 [Arabidopsis thaliana]
  misc_feature (64)..(311): Homolog of NCBI NO: 21592870 NR Description: unknown [Arabidopsis thaliana]
  misc_feature (64)..(311): Homolog of NCBI NO: 18399067 NR Description: expressed protein
  misc_feature (46)..(298): Homolog of NCBI NO: 38345597 NR Description: OSJNBb0012E24.15 [Oryza sativa (japonica
  misc_feature (64)..(294): Homolog of NCBI NO: 18542168 NR Description: putative genetic modifier [Zea mays]
  misc_feature (64)..(294): Homolog of NCBI NO: 10444400 NR Description: genetic modifier [Zea mays]
  misc_feature (1)..(309): Homolog of NCBI NO: 15234236 NR Description: putative protein
MGVTKEVRASPRREYRGIPGDGGDMGDVGVTSPTPSWPPRNRADDPKLHNPLLRLERMGCGWLGVIFEWEGVIVEDDAELERQAWLTLAQEEGKSPPPAFLLRRVEGMKNEQAISEVLCWSRDPSELRRLALRKDEIHSSLRGGSYHQMRNGSREFMSTLANYKIPIAVVTTRPRKVIEEAIEAVGVRSFFDAVVTAEDVYRGKPDPEMFLYAAQLLSFIPERCIVFGNSNSAVEAAHDARMKCVAVASKHKIYELSAADLVVKQLDELSVVDLKNLADIESPEFGMEPEPEMEEEEVPPPSTSVGIDDLFW

SEQ ID NO: 19801 - protein, 288 aa, Zea mays subsp. mays
  peptide (1)..(288): Ceres Seq. ID no. 12381750
  misc_feature (38)..(226): Pfam Name: haloacid dehalogenase-like hydrolase Pfam Description: haloacid dehalogenase-like hydrolase
  misc_feature (41)..(248): Homolog of NCBI NO: 21220059 NR Description: putative phosphatase [Streptomyces coelicolor
  misc_feature (42)..(243): Homolog of NCBI NO: 21672855 NR Description: hydrolase, haloacid dehalogenase-like family
  misc_feature (87)..(287): Homolog of NCBI NO: 6016697 NR Description: unknown protein [Arabidopsis thaliana]
  misc_feature (40)..(287): Homolog of NCBI NO: 14532506 NR Description: AT3g10970/F9F8_21 [Arabidopsis thaliana]
  misc_feature (40)..(287): Homolog of NCBI NO: 21592870 NR Description: unknown [Arabidopsis thaliana]
  misc_feature (40)..(287): Homolog of NCBI NO: 18399067 NR Description: expressed protein
  misc_feature (22)..(274): Homolog of NCBI NO: 38345597 NR Description: OSJNBb0012E24.15 [Oryza sativa (japonica
  misc_feature (40)..(270): Homolog of NCBI NO: 18542168 NR Description: putative genetic modifier [Zea mays]
  misc_feature (40)..(270): Homolog of NCBI NO: 10444400 NR Description: genetic modifier [Zea mays]
  misc_feature (1)..(285): Homolog of NCBI NO: 15234236 NR Description: putative protein
MGDVGVTSPTPSWPPRNRADDPKLHNPLLRLERMGCGWLGVIFEWEGVIVEDDAELERQAWLTLAQEEGKSPPPAFLLRRVEGMKNEQAISEVLCWSRDPSELRRLALRKDEIHSSLRGGSYHQMRNGSREFMSTLANYKIPIAVVTTRPRKVIEEAIEAVGVRSFFDAVVTAEDVYRGKPDPEMFLYAAQLLSFIPERCIVFGNSNSAVEAAHDARMKCVAVASKHKIYELSAADLVVKQLDELSVVDLKNLADIESPEFGMEPEPEMEEEEVPPPSTSVGIDDLFW

SEQ ID NO: 19802 - DNA, 1577 bp, Zea mays subsp. mays; identical to SEQ ID NO: 10465
  misc_feature (1)..(1577): Ceres Seq. ID no. 12595047
  misc_feature: MA Experiment ID: 108504 Result: Down-regulated in Transcription
  misc_feature: MA Experiment 108504 PARAMETER Experiment Name: Zm_Drought_P Parameter: Age (day) Value: 8
  misc_feature: MA Experiment 108504 PARAMETER Experiment Name: Zm_Drought_P Parameter: Organism Value: Zea mays
  misc_feature: MA Experiment 108504 PARAMETER Experiment Name: Zm_Drought_P Parameter: Plant Line Value: 35A19
  misc_feature: MA Experiment 108504 PARAMETER Experiment Name: Zm_Drought_P Parameter: Timepoint (hr) Value: 12
  misc_feature: MA Experiment 108504 PARAMETER Experiment Name: Zm_Drought_P Parameter: Tissue Value: Aerial
  misc_feature: MA Experiment 108504 PARAMETER Experiment Name: Zm_Drought_P Parameter: Treatment Value: Drought vs. No Drought
  misc_feature: MA Experiment ID: 108523 Result: Down-regulated in Transcription
  misc_feature: MA Experiment 108523 PARAMETER Experiment Name: Zm_42deg_Heat_P Parameter: Age (day) Value: 8
  misc_feature: MA Experiment 108523 PARAMETER Experiment Name: Zm_42deg_Heat_P Parameter: Organism Value: Zea mays
  misc_feature: MA Experiment 108523 PARAMETER Experiment Name: Zm_42deg_Heat_P Parameter: Plant Line Value: 35A19
  misc_feature: MA Experiment 108523 PARAMETER Experiment Name: Zm_42deg_Heat_P Parameter: Temperature (deg C) Value: 42 vs. 22
  misc_feature: MA Experiment 108523 PARAMETER Experiment Name: Zm_42deg_Heat_P Parameter: Timepoint (hr) Value: 6
  misc_feature: MA Experiment 108523 PARAMETER Experiment Name: Zm_42deg_Heat_P Parameter: Tissue Value: Aerial
  misc_feature: MA Experiment ID: 108528 Result: Down-regulated in Transcription
  misc_feature: MA Experiment 108528 PARAMETER Experiment Name: Zm_Imbibed_Seeds_P Parameter: Age (day) Value: 5 vs. 2
  misc_feature: MA Experiment 108528 PARAMETER Experiment Name: Zm_Imbibed_Seeds_P Parameter: Organism Value: Zea mays
  misc_feature: MA Experiment 108528 PARAMETER Experiment Name: Zm_Imbibed_Seeds_P Parameter: Plant Line Value: 35A19
  misc_feature: MA Experiment 108528 PARAMETER Experiment Name: Zm_Imbibed_Seeds_P Parameter: Tissue Value: Aerial vs. Embryo
  misc_feature: MA Experiment ID: 108530 Result: Down-regulated in Transcription
  misc_feature: MA Experiment 108530 PARAMETER Experiment Name: Zm_Imbibed_Seeds_P Parameter: Age (day) Value: 6 vs. 2
  misc_feature: MA Experiment 108530 PARAMETER Experiment Name: Zm_Imbibed_Seeds_P Parameter: Organism Value: Zea mays
  misc_feature: MA Experiment 108530 PARAMETER Experiment Name: Zm_Imbibed_Seeds_P Parameter: Plant Line Value: 35A19
  misc_feature: MA Experiment 108530 PARAMETER Experiment Name: Zm_Imbibed_Seeds_P Parameter: Tissue Value: Aerial vs. Embryo
  misc_feature: MA Experiment ID: 108540 Result: Down-regulated in Transcription
  misc_feature: MA Experiment 108540 PARAMETER Experiment Name: Zm_20percent_PEG_P Parameter: Age (day) Value: 8
  misc_feature: MA Experiment 108540 PARAMETER Experiment Name: Zm_20percent_PEG_P Parameter: Organism Value: Zea mays
  misc_feature: MA Experiment 108540 PARAMETER Experiment Name: Zm_20percent_PEG_P Parameter: Plant Line Value: 35A19
  misc_feature: MA Experiment 108540 PARAMETER Experiment Name: Zm_20percent_PEG_P Parameter: Timepoint (hr) Value: 6
  misc_feature: MA Experiment 108540 PARAMETER Experiment Name: Zm_20percent_PEG_P Parameter: Tissue Value: Aerial
  misc_feature: MA Experiment 108540 PARAMETER Experiment Name: Zm_20percent_PEG_P Parameter: Treatment Value: 20percent PEG vs. No Treatment
  misc_feature: MA Experiment ID: 108543 Result: Up-regulated in Transcription
  misc_feature: MA Experiment ID: 108544 Result: Up-regulated in Transcription
  misc_feature: MA Experiment ID: 108545 Result: Down-regulated in Transcription
  misc_feature: MA Experiment 108545 PARAMETER Experiment Name: Zm_Imbibed_Seeds_P Parameter: Age (day) Value: 3 vs. 2
  misc_feature: MA Experiment 108545 PARAMETER Experiment Name: Zm_Imbibed_Seeds_P Parameter: Organism Value: Zea mays
  misc_feature: MA Experiment 108545 PARAMETER Experiment Name: Zm_Imbibed_Seeds_P Parameter: Plant Line Value: 35A19
  misc_feature: MA Experiment 108545 PARAMETER Experiment Name: Zm_Imbibed_Seeds_P Parameter: Tissue Value: Aerial vs. Embryo
  misc_feature: MA Experiment ID: 108547 Result: Down-regulated in Transcription
  misc_feature: MA Experiment 108547 PARAMETER Experiment Name: Zm_Imbibed_Seeds_P Parameter: Age (day) Value: 4 vs. 2
  misc_feature: MA Experiment 108547 PARAMETER Experiment Name: Zm_Imbibed_Seeds_P Parameter: Organism Value: Zea mays
  misc_feature: MA Experiment 108547 PARAMETER Experiment Name: Zm_Imbibed_Seeds_P Parameter: Plant Line Value: 35A19
  misc_feature: MA Experiment 108547 PARAMETER Experiment Name: Zm_Imbibed_Seeds_P Parameter: Tissue Value: Aerial vs. Embryo
  misc_feature: MA Experiment ID: 108556 Result: Down-regulated in Transcription
  misc_feature: MA Experiment 108556 PARAMETER Experiment Name: Zm_Drought_P Parameter: Age (day) Value: 9
  misc_feature: MA Experiment 108556 PARAMETER Experiment Name: Zm_Drought_P Parameter: Organism Value: Zea mays
  misc_feature: MA Experiment 108556 PARAMETER Experiment Name: Zm_Drought_P Parameter: Plant Line Value: 35A19
  misc_feature: MA Experiment 108556 PARAMETER Experiment Name: Zm_Drought_P Parameter: Timepoint (hr) Value: 24
  misc_feature: MA Experiment 108556 PARAMETER Experiment Name: Zm_Drought_P Parameter: Tissue Value: Aerial
  misc_feature: MA Experiment 108556 PARAMETER Experiment Name: Zm_Drought_P Parameter: Treatment Value: Drought vs. No Drought
  misc_feature: MA Experiment ID: 108559 Result: Down-regulated in Transcription
  misc_feature: MA Experiment 108559 PARAMETER Experiment Name: Zm_5mM_NO_P Parameter: Age (day) Value: 8
  misc_feature: MA Experiment 108559 PARAMETER Experiment Name: Zm_5mM_NO_P Parameter: Organism Value: Zea mays
  misc_feature: MA Experiment 108559 PARAMETER Experiment Name: Zm_5mM_NO_P Parameter: Plant Line Value: 35A19
  misc_feature: MA Experiment 108559 PARAMETER Experiment Name: Zm_5mM_NO_P Parameter: Timepoint (hr) Value: 12
  misc_feature: MA Experiment 108559 PARAMETER Experiment Name: Zm_5mM_NO_P Parameter: Tissue Value: Aerial
  misc_feature: MA Experiment 108559 PARAMETER Experiment Name: Zm_5mM_NO_P Parameter: Treatment Value: 5mM NO vs. No Treatment
  misc_feature: MA Experiment ID: 20000478 Result: Down-regulated in Transcription
  misc_feature: MA Experiment 20000478 PARAMETER Experiment Name: Zm_5mM_SA_P Parameter: Age (day) Value: 11
  misc_feature: MA Experiment 20000478 PARAMETER Experiment Name: Zm_5mM_SA_P Parameter: Organism Value: Zea mays
  misc_feature: MA Experiment 20000478 PARAMETER Experiment Name: Zm_5mM_SA_P Parameter: Plant Line Value: 35A19
  misc_feature: MA Experiment 20000478 PARAMETER Experiment Name: Zm_5mM_SA_P Parameter: Timepoint (hr) Value: 72
  misc_feature: MA Experiment 20000478 PARAMETER Experiment Name: Zm_5mM_SA_P Parameter: Tissue Value: Aerial
  misc_feature: MA Experiment 20000478 PARAMETER Experiment Name: Zm_5mM_SA_P Parameter: Treatment Value: 5mM SA vs. No Treatment
  misc_feature: MA Experiment ID: 20000488 Result: Down-regulated in Transcription
  misc_feature: MA Experiment 20000488 PARAMETER Experiment Name: Zm_50mM_NH4NO3_L_to_H_P Parameter: Organism Value: Zea mays
  misc_feature: MA Experiment 20000488 PARAMETER Experiment Name: Zm_50mM_NH4NO3_L_to_H_P Parameter: Timepoint (hr) Value: 8
  misc_feature: MA Experiment 20000488 PARAMETER Experiment Name: Zm_50mM_NH4NO3_L_to_H_P Parameter: Tissue Value: Leaves
  misc_feature: MA Experiment 20000488 PARAMETER Experiment Name: Zm_50mM_NH4NO3_L_to_H_P Parameter: Treatment Value: 50mM NH4NO3 vs. 100mM Mannitol
  misc_feature: MA Experiment ID: 20000535 Result: Down-regulated in Transcription
  misc_feature: MA Experiment 20000535 PARAMETER Experiment Name: Zm_Hybrid_Seed_Dev_P Parameter: DAP Value: 30 vs. 12
  misc_feature: MA Experiment 20000535 PARAMETER Experiment Name: Zm_Hybrid_Seed_Dev_P Parameter: Organism Value: Zea mays
  misc_feature: MA Experiment 20000535 PARAMETER Experiment Name: Zm_Hybrid_Seed_Dev_P Parameter: Plant Line Value: 35A19
  misc_feature: MA Experiment 20000535 PARAMETER Experiment Name: Zm_Hybrid_Seed_Dev_P Parameter: Tissue Value: Embryo vs. Unfert Floret

SEQ ID NO: 19803 - protein, 421 aa, Zea mays subsp. mays; identical to SEQ ID NO: 10466
  peptide (1)..(421): Ceres Seq. ID no. 12595048
  misc_feature (43)..(421): Homolog of NCBI NO: 113377 NR Description: ALCOHOL DEHYDROGENASE 2 >gi|82671|pir||A23084
  misc_feature (43)..(421): Homolog of NCBI NO: 6979319 NR Description: alcohol dehydrogenase 2 [Oryza sativa]
  misc_feature (43)..(420): Homolog of NCBI NO: 539057 NR Description: alcohol dehydrogenase (EC 1.1.1.1) - wheat (cv.
  misc_feature (43)..(420): Homolog of NCBI NO: 113385 NR Description: ALCOHOL DEHYDROGENASE 3 >gi|82349|pir||S04040
  misc_feature (43)..(420): Homolog of NCBI NO: 13872817 NR Description: alcohol dehydrogenase [Pennisetum glaucum]
  misc_feature (43)..(421): Homolog of NCBI NO: 82669 NR Description: alcohol dehydrogenase (EC 1.1.1.1) 1 - maize
  misc_feature (43)..(421): Homolog of NCBI NO: 22122 NR Description: alcohol dehydrogenase 1 [Zea mays] alcohol dehydrogenase 1 [Zea mays]
  misc_feature (43)..(421): Homolog of NCBI NO: 113362 NR Description: Alcohol dehydrogenase 1 (ADH slow-allele)
  misc_feature (43)..(421): Homolog of NCBI NO: 3420019 NR Description: putative alcohol dehydrogenase 1 [Sorghum bicolor]
  misc_feature (43)..(421): Homolog of NCBI NO: 113359 NR Description: Alcohol dehydrogenase 1 >gi|22120|emb|CAA25239.1|

SEQ ID NO: 19804 - protein, 379 aa, Zea mays subsp. mays; identical to SEQ ID NO: 10467
  peptide (1)..(379): Ceres Seq. ID no. 12595049
  misc_feature (1)..(379): Homolog of NCBI NO: 113377 NR Description: ALCOHOL DEHYDROGENASE 2 >gi|82671|pir||A23084
  misc_feature (1)..(379): Homolog of NCBI NO: 6979319 NR Description: alcohol dehydrogenase 2 [Oryza sativa]
  misc_feature (1)..(378): Homolog of NCBI NO: 539057 NR Description: alcohol dehydrogenase (EC 1.1.1.1) - wheat (cv.
  misc_feature (1)..(378): Homolog of NCBI NO: 113385 NR Description: ALCOHOL DEHYDROGENASE 3 >gi|82349|pir||S04040
  misc_feature (1)..(378): Homolog of NCBI NO: 13872817 NR Description: alcohol dehydrogenase [Pennisetum glaucum]
  misc_feature (1)..(379): Homolog of NCBI NO: 82669 NR Description: alcohol dehydrogenase (EC 1.1.1.1) 1 - maize
  misc_feature (1)..(379): Homolog of NCBI NO: 22122 NR Description: alcohol dehydrogenase 1 [Zea mays] alcohol dehydrogenase 1 [Zea mays]
  misc_feature (1)..(379): Homolog of NCBI NO: 113362 NR Description: Alcohol dehydrogenase 1 (ADH slow-allele)
  misc_feature (1)..(379): Homolog of NCBI NO: 3420019 NR Description: putative alcohol dehydrogenase 1 [Sorghum bicolor]
  misc_feature (1)..(379): Homolog of NCBI NO: 113359 NR Description: Alcohol dehydrogenase 1 >gi|22120|emb|CAA25239.1|

SEQ ID NO: 19805 - protein, 345 aa, Zea mays subsp. mays; identical to SEQ ID NO: 10468
  peptide (1)..(345): Ceres Seq. ID no. 12595050
  misc_feature (1)..(345): Homolog of NCBI NO: 113377 NR Description: ALCOHOL DEHYDROGENASE 2 >gi|82671|pir||A23084
  misc_feature (1)..(345): Homolog of NCBI NO: 6979319 NR Description: alcohol dehydrogenase 2 [Oryza sativa]
  misc_feature (1)..(344): Homolog of NCBI NO: 539057 NR Description: alcohol dehydrogenase (EC 1.1.1.1) - wheat (cv.
  misc_feature (1)..(344): Homolog of NCBI NO: 113385 NR Description: ALCOHOL DEHYDROGENASE 3 >gi|82349|pir||S04040
  misc_feature (1)..(344): Homolog of NCBI NO: 13872817 NR Description: alcohol dehydrogenase [Pennisetum glaucum]
  misc_feature (1)..(345): Homolog of NCBI NO: 82669 NR Description: alcohol dehydrogenase (EC 1.1.1.1) 1 - maize
  misc_feature (1)..(345): Homolog of NCBI NO: 22122 NR Description: alcohol dehydrogenase 1 [Zea mays] alcohol dehydrogenase 1 [Zea mays]
  misc_feature (1)..(345): Homolog of NCBI NO: 113362 NR Description: Alcohol dehydrogenase 1 (ADH slow-allele)
  misc_feature (1)..(345): Homolog of NCBI NO: 3420019 NR Description: putative alcohol dehydrogenase 1 [Sorghum bicolor]
  misc_feature (1)..(345): Homolog of NCBI NO: 113359 NR Description: Alcohol dehydrogenase 1 >gi|22120|emb|CAA25239.1|

SEQ ID NO: 19806 - DNA, 2763 bp, Zea mays subsp. mays; identical to SEQ ID NO: 19641
  misc_feature (1)..(2763): Ceres Seq. ID no. 13635181
  misc_feature: MA Experiment ID: 108528 Result: Up-regulated in Transcription
  misc_feature: MA Experiment 108528 PARAMETER Experiment Name: Zm_Imbibed_Seeds_P Parameter: Age (day) Value: 5 vs. 2
  misc_feature: MA Experiment 108528 PARAMETER Experiment Name: Zm_Imbibed_Seeds_P Parameter: Organism Value: Zea mays
  misc_feature: MA Experiment 108528 PARAMETER Experiment Name: Zm_Imbibed_Seeds_P Parameter: Plant Line Value: 35A19
  misc_feature: MA Experiment 108528 PARAMETER Experiment Name: Zm_Imbibed_Seeds_P Parameter: Tissue Value: Aerial vs. Embryo
  misc_feature: MA Experiment ID: 108529 Result: Down-regulated in Transcription
  misc_feature: MA Experiment 108529 PARAMETER Experiment Name: Zm_Imbibed_Seeds_P Parameter: Age (day) Value: 5 vs. 2
  misc_feature: MA Experiment 108529 PARAMETER Experiment Name: Zm_Imbibed_Seeds_P Parameter: Organism Value: Zea mays
  misc_feature: MA Experiment 108529 PARAMETER Experiment Name: Zm_Imbibed_Seeds_P Parameter: Plant Line Value: 35A19
  misc_feature: MA Experiment 108529 PARAMETER Experiment Name: Zm_Imbibed_Seeds_P Parameter: Tissue Value: Roots vs. Embryo
  misc_feature: MA Experiment ID: 108535 Result: Up-regulated in Transcription
  misc_feature: MA Experiment 108535 PARAMETER Experiment Name: Zm_Meristem_P Parameter: Age (day) Value: 8
  misc_feature: MA Experiment 108535 PARAMETER Experiment Name: Zm_Meristem_P Parameter: Organism Value: Zea mays
  misc_feature: MA Experiment 108535 PARAMETER Experiment Name: Zm_Meristem_P Parameter: Plant Line Value: 35A19
  misc_feature: MA Experiment 108535 PARAMETER Experiment Name: Zm_Meristem_P Parameter: Tissue Value: Root Meristem vs. Above Root Meristem
  misc_feature: MA Experiment ID: 108544 Result: Down-regulated in Transcription
  misc_feature: MA Experiment ID: 108546 Result: Down-regulated in Transcription
  misc_feature: MA Experiment 108546 PARAMETER Experiment Name: Zm_Imbibed_Seeds_P Parameter: Age (day) Value: 3 vs. 2
  misc_feature: MA Experiment 108546 PARAMETER Experiment Name: Zm_Imbibed_Seeds_P Parameter: Organism Value: Zea mays
  misc_feature: MA Experiment 108546 PARAMETER Experiment Name: Zm_Imbibed_Seeds_P Parameter: Plant Line Value: 35A19
  misc_feature: MA Experiment 108546 PARAMETER Experiment Name: Zm_Imbibed_Seeds_P Parameter: Tissue Value: Roots vs. Embryo
  misc_feature: MA Experiment ID: 108559 Result: Down-regulated in Transcription
  misc_feature: MA Experiment 108559 PARAMETER Experiment Name: Zm_5mM_NO_P Parameter: Age (day) Value: 8
  misc_feature: MA Experiment 108559 PARAMETER Experiment Name: Zm_5mM_NO_P Parameter: Organism Value: Zea mays
  misc_feature: MA Experiment 108559 PARAMETER Experiment Name: Zm_5mM_NO_P Parameter: Plant Line Value: 35A19
  misc_feature: MA Experiment 108559 PARAMETER Experiment Name: Zm_5mM_NO_P Parameter: Timepoint (hr) Value: 12
  misc_feature: MA Experiment 108559 PARAMETER Experiment Name: Zm_5mM_NO_P Parameter: Tissue Value: Aerial
  misc_feature: MA Experiment 108559 PARAMETER Experiment Name: Zm_5mM_NO_P Parameter: Treatment Value: 5mM NO vs. No Treatment
  misc_feature: MA Experiment ID: 108689 Result: Up-regulated in Transcription
  misc_feature: MA Experiment 108689 PARAMETER Experiment Name: Zm_Drought_Roots_P Parameter: Age (day) Value: 9
  misc_feature: MA Experiment 108689 PARAMETER Experiment Name: Zm_Drought_Roots_P Parameter: Organism Value: Zea mays
  misc_feature: MA Experiment 108689 PARAMETER Experiment Name: Zm_Drought_Roots_P Parameter: Plant Line Value: 35A19
  misc_feature: MA Experiment 108689 PARAMETER Experiment Name: Zm_Drought_Roots_P Parameter: Timepoint (hr) Value: 24
  misc_feature: MA Experiment 108689 PARAMETER Experiment Name: Zm_Drought_Roots_P Parameter: Tissue Value: Roots
  misc_feature: MA Experiment 108689 PARAMETER Experiment Name: Zm_Drought_Roots_P Parameter: Treatment Value: Drought vs. No Drought
  misc_feature: MA Experiment ID: 20000492 Result: Up-regulated in Transcription
  misc_feature: MA Experiment 20000492 PARAMETER Experiment Name: Zm_Hybrid_Seed_Dev_P Parameter: DAP Value: 12
  misc_feature: MA Experiment 20000492 PARAMETER Experiment Name: Zm_Hybrid_Seed_Dev_P Parameter: Organism Value: Zea mays
  misc_feature: MA Experiment 20000492 PARAMETER Experiment Name: Zm_Hybrid_Seed_Dev_P Parameter: Plant Line Value: 35A19
  misc_feature: MA Experiment 20000492 PARAMETER Experiment Name: Zm_Hybrid_Seed_Dev_P Parameter: Tissue Value: Fert Kernel vs. Unfert Floret
  misc_feature: MA Experiment ID: 20000535 Result: Up-regulated in Transcription
  misc_feature: MA Experiment 20000535 PARAMETER Experiment Name: Zm_Hybrid_Seed_Dev_P Parameter: DAP Value: 30 vs. 12
  misc_feature: MA Experiment 20000535 PARAMETER Experiment Name: Zm_Hybrid_Seed_Dev_P Parameter: Organism Value: Zea mays
  misc_feature: MA Experiment 20000535 PARAMETER Experiment Name: Zm_Hybrid_Seed_Dev_P Parameter: Plant Line Value: 35A19
  misc_feature: MA Experiment 20000535 PARAMETER Experiment Name: Zm_Hybrid_Seed_Dev_P Parameter: Tissue Value: Embryo vs. Unfert Floret

SEQ ID NO: 19807 - protein, 814 aa, Zea mays subsp. mays; identical to SEQ ID NO: 19642
  peptide (1)..(814): Ceres Seq. ID no. 13635182
  misc_feature (132)..(806): Homolog of NCBI NO: 7433851 NR Description: 1,4-alpha-glucan branching enzyme (EC 2.4.1.18) I
  misc_feature (111)..(814): Homolog of NCBI NO: 7547156 NR Description: seed starch branching enzyme [Sorghum bicolor]
  misc_feature (132)..(806): Homolog of NCBI NO: 399544 NR Description: 1,4-alpha-glucan branching enzyme (Starch
  misc_feature (132)..(806): Homolog of NCBI NO: 283000 NR Description: 1,4-alpha-glucan branching enzyme (EC 2.4.1.18) I
  misc_feature (132)..(814): Homolog of NCBI NO: 5441248 NR Description: branching enzyme 3 [Phaseolus vulgaris]
  misc_feature (132)..(814): Homolog of NCBI NO: 4586237 NR Description: starch branching enzyme I [Triticum aestivum]
  misc_feature (132)..(814): Homolog of NCBI NO: 11037532 NR Description: starch branching enyzyme 1 [Triticum aestivum]
  misc_feature (132)..(814): Homolog of NCBI NO: 4586236 NR Description: starch branching enzyme I [Triticum aestivum]
  misc_feature (132)..(814): Homolog of NCBI NO: 7433857 NR Description: 1,4-alpha-glucan branching enzyme (EC 2.4.1.18)
  misc_feature (108)..(814): Homolog of NCBI NO: 1771261 NR Description: 1,4-alpha-glucan branching enzyme [Manihot
  misc_feature (132)..(806): Homolog of NCBI NO: 7433851 NR Description: 1,4-alpha-glucan branching enzyme (EC 2.4.1.18) I
  misc_feature (111)..(814): Homolog of NCBI NO: 7547156 NR Description: seed starch branching enzyme [Sorghum bicolor]
  misc_feature (132)..(806): Homolog of NCBI NO: 399544 NR Description: 1,4-alpha-glucan branching enzyme (Starch
  misc_feature (132)..(806): Homolog of NCBI NO: 283000 NR Description: 1,4-alpha-glucan branching enzyme (EC 2.4.1.18) I
  misc_feature (132)..(814): Homolog of NCBI NO: 5441248 NR Description: branching enzyme 3 [Phaseolus vulgaris]
  misc_feature (132)..(814): Homolog of NCBI NO: 4586237 NR Description: starch branching enzyme I [Triticum aestivum]
  misc_feature (132)..(814): Homolog of NCBI NO: 11037532 NR Description: starch branching enyzyme 1 [Triticum aestivum]
  misc_feature (132)..(814): Homolog of NCBI NO: 4586236 NR Description: starch branching enzyme I [Triticum aestivum]
  misc_feature (132)..(814): Homolog of NCBI NO: 7433857 NR Description: 1,4-alpha-glucan branching enzyme (EC 2.4.1.18)
  misc_feature (108)..(814): Homolog of NCBI NO: 1771261 NR Description: 1,4-alpha-glucan branching enzyme [Manihot

SEQ ID NO: 19808 - protein, 677 aa, Zea mays subsp. mays; identical to SEQ ID NO: 19643
  peptide (1)..(677): Ceres Seq. ID no. 13635183
  misc_feature (1)..(669): Homolog of NCBI NO: 7433851 NR Description: 1,4-alpha-glucan branching enzyme (EC 2.4.1.18) I
  misc_feature (1)..(677): Homolog of NCBI NO: 7547156 NR Description: seed starch branching enzyme [Sorghum bicolor]
  misc_feature (1)..(669): Homolog of NCBI NO: 399544 NR Description: 1,4-alpha-glucan branching enzyme (Starch
  misc_feature (1)..(669): Homolog of NCBI NO: 283000 NR Description: 1,4-alpha-glucan branching enzyme (EC 2.4.1.18) I
  misc_feature (1)..(677): Homolog of NCBI NO: 5441248 NR Description: branching enzyme 3 [Phaseolus vulgaris]
  misc_feature (1)..(677): Homolog of NCBI NO: 4586237 NR Description: starch branching enzyme I [Triticum aestivum]
  misc_feature (1)..(677): Homolog of NCBI NO: 11037532 NR Description: starch branching enyzyme 1 [Triticum aestivum]
  misc_feature (1)..(677): Homolog of NCBI NO: 4586236 NR Description: starch branching enzyme I [Triticum aestivum]
  misc_feature (1)..(677): Homolog of NCBI NO: 7433857 NR Description: 1,4-alpha-glucan branching enzyme (EC 2.4.1.18)
  misc_feature (1)..(677): Homolog of NCBI NO: 1771261 NR Description: 1,4-alpha-glucan branching enzyme [Manihot
  misc_feature (1)..(669): Homolog of NCBI NO: 7433851 NR Description: 1,4-alpha-glucan branching enzyme (EC 2.4.1.18) I
  misc_feature (1)..(677): Homolog of NCBI NO: 7547156 NR Description: seed starch branching enzyme [Sorghum bicolor]
  misc_feature (1)..(669): Homolog of NCBI NO: 399544 NR Description: 1,4-alpha-glucan branching enzyme (Starch
  misc_feature (1)..(669): Homolog of NCBI NO: 283000 NR Description: 1,4-alpha-glucan branching enzyme (EC 2.4.1.18) I
  misc_feature (1)..(677): Homolog of NCBI NO: 5441248 NR Description: branching enzyme 3 [Phaseolus vulgaris]
  misc_feature (1)..(677): Homolog of NCBI NO: 4586237 NR Description: starch branching enzyme I [Triticum aestivum]
  misc_feature (1)..(677): Homolog of NCBI NO: 11037532 NR Description: starch branching enyzyme 1 [Triticum aestivum]
  misc_feature (1)..(677): Homolog of NCBI NO: 4586236 NR Description: starch branching enzyme I [Triticum aestivum]
  misc_feature (1)..(677): Homolog of NCBI NO: 7433857 NR Description: 1,4-alpha-glucan branching enzyme (EC 2.4.1.18)
  misc_feature (1)..(677): Homolog of NCBI NO: 1771261 NR Description: 1,4-alpha-glucan branching enzyme [Manihot

SEQ ID NO: 19809 - protein, 601 aa, Zea mays subsp. mays; identical to SEQ ID NO: 19644
  peptide (1)..(601): Ceres Seq. ID no. 13635184
  misc_feature (1)..(593): Homolog of NCBI NO: 7433851 NR Description: 1,4-alpha-glucan branching enzyme (EC 2.4.1.18) I
  misc_feature (1)..(601): Homolog of NCBI NO: 7547156 NR Description: seed starch branching enzyme [Sorghum bicolor]
  misc_feature (1)..(593): Homolog of NCBI NO: 399544 NR Description: 1,4-alpha-glucan branching enzyme (Starch
  misc_feature (1)..(593): Homolog of NCBI NO: 283000 NR Description: 1,4-alpha-glucan branching enzyme (EC 2.4.1.18) I
  misc_feature (1)..(601): Homolog of NCBI NO: 5441248 NR Description: branching enzyme 3 [Phaseolus vulgaris]
  misc_feature (1)..(601): Homolog of NCBI NO: 11037532 NR Description: starch branching enyzyme 1 [Triticum aestivum]
  misc_feature (1)..(601): Homolog of NCBI NO: 4586237 NR Description: starch branching enzyme I [Triticum aestivum]
  misc_feature (1)..(601): Homolog of NCBI NO: 4586236 NR Description: starch branching enzyme I [Triticum aestivum]
  misc_feature (1)..(601): Homolog of NCBI NO: 7433857 NR Description: 1,4-alpha-glucan branching enzyme (EC 2.4.1.18)
  misc_feature (1)..(601): Homolog of NCBI NO: 1771261 NR Description: 1,4-alpha-glucan branching enzyme [Manihot
  misc_feature (1)..(601): Homolog of NCBI NO: 7547156 NR Description: seed starch branching enzyme [Sorghum bicolor]
  misc_feature (1)..(593): Homolog of NCBI NO: 399544 NR Description: 1,4-alpha-glucan branching enzyme (Starch
  misc_feature (1)..(593): Homolog of NCBI NO: 283000 NR Description: 1,4-alpha-glucan branching enzyme (EC 2.4.1.18) I
  misc_feature (1)..(601): Homolog of NCBI NO: 5441248 NR Description: branching enzyme 3 [Phaseolus vulgaris]
  misc_feature (1)..(601): Homolog of NCBI NO: 11037532 NR Description: starch branching enyzyme 1 [Triticum aestivum]
  misc_feature (1)..(601): Homolog of NCBI NO: 4586237 NR Description: starch branching enzyme I [Triticum aestivum]
  misc_feature (1)..(601): Homolog of NCBI NO: 4586236 NR Description: starch branching enzyme I [Triticum aestivum]
  misc_feature (1)..(601): Homolog of NCBI NO: 7433857 NR Description: 1,4-alpha-glucan branching enzyme (EC 2.4.1.18)
  misc_feature (1)..(601): Homolog of NCBI NO: 1771261 NR Description: 1,4-alpha-glucan branching enzyme [Manihot
  misc_feature (1)..(593): Homolog of NCBI NO: 7433851 NR Description: 1,4-alpha-glucan branching enzyme (EC 2.4.1.18) I

SEQ ID NO: 19810 - DNA, 1795 bp, Zea mays subsp. mays
  misc_feature (1)..(1795): Ceres Seq. ID no. 12381755
  misc_feature: MA Experiment ID: 108535 Result: Up-regulated in Transcription
  misc_feature: MA Experiment 108535 PARAMETER Experiment Name: Zm_Meristem_P Parameter: Age (day) Value: 8
  misc_feature: MA Experiment 108535 PARAMETER Experiment Name: Zm_Meristem_P Parameter: Organism Value: Zea mays
  misc_feature: MA Experiment 108535 PARAMETER Experiment Name: Zm_Meristem_P Parameter: Plant Line Value: 35A19
  misc_feature: MA Experiment 108535 PARAMETER Experiment Name: Zm_Meristem_P Parameter: Tissue Value: Root Meristem vs. Above Root Meristem
  misc_feature: MA Experiment ID: 108543 Result: Down-regulated in Transcription
  misc_feature: MA Experiment ID: 20000487 Result: Up-regulated in Transcription
  misc_feature: MA Experiment 20000487 PARAMETER Experiment Name: Zm_50mM_NH4NO3_L_to_H_P Parameter: Organism Value: Zea mays
  misc_feature: MA Experiment 20000487 PARAMETER Experiment Name: Zm_50mM_NH4NO3_L_to_H_P Parameter: Timepoint (hr) Value: 4
  misc_feature: MA Experiment 20000487 PARAMETER Experiment Name: Zm_50mM_NH4NO3_L_to_H_P Parameter: Tissue Value: Leaves
  misc_feature: MA Experiment 20000487 PARAMETER Experiment Name: Zm_50mM_NH4NO3_L_to_H_P Parameter: Treatment Value: 50mM NH4NO3 vs. 100mM Mannitol
gcacgagaccattacctagaacatcctaatcaaaactcccgatctcaccaccgcctcgcgatctcccccccgccgccatggctttctccgcgcggaggagcctcgccaccagcctgtcacaccacttctccggccgcctctacccctctatctcgcacctcgttccttcccaccacgagcactccgaccccgctccctccccctcccccgtgccgcagcctcggccccaatcgtcgcagcaatccgcaccaccgttcccctccgcgcttcctcggccgtcgagatcccgggccctggcccccttccccctccctttcgctctccacctcgcggcccaccgctactcctccgccccggcccccgactcggaggtcttggcggactccgccgccgcggcccctgtgtcggagctgctctccgatggggtggcgtcagctgccgcgtccgtctccacgccgccgttgccgtaccccggggaggtcgctgccgccgcggccgaatcatttccacccgtcgcggcgctgcagcacctgctggacgccgttcaatccttcaccggcctcaactggtgggcgactattgcgctgacgacgttgatgatccggctggcgactgtcccgctgctgatcaaccagatgaagtccatgatgaagttaaatgagatgagaccagaaattgaagccatcaatgaagagatgcgaaattcaactgatccaaggtcaatggaagtggggaaacagaaactgggggagctattccttagacatggagtgactccattgacaccattgaagggtctattcatacagggacctatatttatgagctttttctttgctatatcaaatatggttgagaaagtcccttctatgaaaggaggtggtgtgtattggtttactgatttgacaactcctgataatttattaatcctcccagtgttaacatcactgacctttttggctacagtagagcttaatatgcaagatggcatggaagggaatcatatgttaaaaccaatgaaaaagttctcccggttttttggagttttgtttgttccatttacaataggctttccaaaggcaattttcttttactgggtcacatcaaactttttctcacttgtttacggcgctgttctccggaatccggctgtaagacttttcttaaatcttcctcgcttggaatctcagcccacaactgcagaagtccagcccttaaacctatcgggcggaccagagccaagtcctggagtcgattctcctatcacagataaggaaactgagcagtcgagttctgtgctaagtcctggagtcgattctcctatagcagacaaggaatgtgagcagtcgagtcctgcggtgagtcctgaagtcaattctcctatggtggacaaggaaagtgagcagtcgagttctgtgttatgtgaccgtatcagagatcttgagatcagggctaaagcaacgggtgaatctcgagagtaaattcgtgatttgtccacatggaagtaagcaagcacatctcctttgggggtttctggtacttttttttttttgttgggagcaaaggatacccagtagcgaggtataattttgaagagtccgcggtttttcgaaatataacggcccaccatgtttccgtgaataaattggtgtagtatattggcttgtaaaatcgttgcacggtatgatataaccttgtactactagctaacattagccatgatgttccttggattaagcatattgttgctattgagcggcacacgacatgtttgtctaatatttgcttcatgcgg

SEQ ID NO: 19811 - protein, 467 aa, Zea mays subsp. mays
  peptide (1)..(467): Ceres Seq. ID no. 12381756
  misc_feature (163)..(359): Pfam Name: 60Kd inner membrane protein Pfam Description: 60Kd inner membrane protein
  misc_feature (61)..(367): Homolog of NCBI NO: 37589026 NR Description: Oxidase (cytochrome c) assembly 1-like [Homo
  misc_feature (61)..(367): Homolog of NCBI NO: 4826880 NR Description: oxidase (cytochrome c) assembly 1-like [Homo
  misc_feature (72)..(373): Homolog of NCBI NO: 34874107 NR Description: similar to Cytochrome oxidase biogenesis protein
  misc_feature (49)..(367): Homolog of NCBI NO: 12841194 NR Description: unnamed protein product [Mus musculus]
  misc_feature (49)..(367): Homolog of NCBI NO: 38372481 NR Description: Inner membrane protein OXA1L, mitochondrial
  misc_feature (49)..(367): Homolog of NCBI NO: 26346514 NR Description: unnamed protein product [Mus musculus]
  misc_feature (77)..(372): Homolog of NCBI NO: 15241690 NR Description: OXA1 protein (OXA1p)
  misc_feature (20)..(407): Homolog of NCBI NO: 15225991 NR Description: OXA1 protein (OXA1p), putative
  misc_feature (31)..(405): Homolog of NCBI NO: 37536158 NR Description: putative Oxa1 protein [Oryza sativa (japonica
  misc_feature (31)..(405): Homolog of NCBI NO: 22122905 NR Description: putative cytochrome oxidase assembly protein
MAFSARRSLATSLSHHFSGRLYPSISHLVPSHHEHSDPAPSPSPVPQPRPQSSQQSAPPFPSALPRPSRSRALAPFPLPFALHLAAHRYSSAPAPDSEVLADSAAAAPVSELLSDGVASAAASVSTPPLPYPGEVAAAAAESFPPVAALQHLLDAVQSFTGLNWWATIALTTLMIRLATVPLLINQMKSMMKLNEMRPEIEAINEEMRNSTDPRSMEVGKQKLGELFLRHGVTPLTPLKGLFIQGPIFMSFFFAISNMVEKVPSMKGGGVYWFTDLTTPDNLLILPVLTSLTFLATVELNMQDGMEGNHMLKPMKKFSRFFGVLFVPFTIGFPKAIFFYWVTSNFFSLVYGAVLRNPAVRLFLNLPRLESQPTTAEVQPLNLSGGPEPSPGVDSPITDKETEQSSSVLSPGVDSPIADKECEQSSPAVSPEVNSPMVDKESEQSSSVLCDRIRDLEIRAKATGESRE

SEQ ID NO: 19812 - protein, 294 aa, Zea mays subsp. mays
  peptide (1)..(294): Ceres Seq. ID no. 12381757
  misc_feature (1)..(186): Pfam Name: 60Kd inner membrane protein Pfam Description: 60Kd inner membrane protein
  misc_feature (1)..(194): Homolog of NCBI NO: 37589026 NR Description: Oxidase (cytochrome c) assembly 1-like [Homo
  misc_feature (1)..(194): Homolog of NCBI NO: 4826880 NR Description: oxidase (cytochrome c) assembly 1-like [Homo
  misc_feature (1)..(200): Homolog of NCBI NO: 34874107 NR Description: similar to Cytochrome oxidase biogenesis protein
  misc_feature (1)..(194): Homolog of NCBI NO: 12841194 NR Description: unnamed protein product [Mus musculus]
  misc_feature (1)..(194): Homolog of NCBI NO: 38372481 NR Description: Inner membrane protein OXA1L, mitochondrial
  misc_feature (1)..(194): Homolog of NCBI NO: 26346514 NR Description: unnamed protein product [Mus musculus]
  misc_feature (1)..(199): Homolog of NCBI NO: 15241690 NR Description: OXA1 protein (OXA1p)
  misc_feature (1)..(234): Homolog of NCBI NO: 15225991 NR Description: OXA1 protein (OXA1p), putative
  misc_feature (1)..(232): Homolog of NCBI NO: 37536158 NR Description: putative Oxa1 protein [Oryza sativa (japonica
  misc_feature (1)..(232): Homolog of NCBI NO: 22122905 NR Description: putative cytochrome oxidase assembly protein
MIRLATVPLLINQMKSMMKLNEMRPEIEAINEEMRNSTDPRSMEVGKQKLGELFLRHGVTPLTPLKGLFIQGPIFMSFFFAISNMVEKVPSMKGGGVYWFTDLTTPDNLLILPVLTSLTFLATVELNMQDGMEGNHMLKPMKKFSRFFGVLFVPFTIGFPKAIFFYWVTSNFFSLVYGAVLRNPAVRLFLNLPRLESQPTTAEVQPLNLSGGPEPSPGVDSPITDKETEQSSSVLSPGVDSPIADKECEQSSPAVSPEVNSPMVDKESEQSSSVLCDRIRDLEIRAKATGESRE

SEQ ID NO: 19813 - protein, 281 aa, Zea mays subsp. mays
  peptide (1)..(281): Ceres Seq. ID no. 12381758
  misc_feature (1)..(173): Pfam Name: 60Kd inner membrane protein Pfam Description: 60Kd inner membrane protein
  misc_feature (1)..(181): Homolog of NCBI NO: 37589026 NR Description: Oxidase (cytochrome c) assembly 1-like [Homo
  misc_feature (1)..(181): Homolog of NCBI NO: 4826880 NR Description: oxidase (cytochrome c) assembly 1-like [Homo
  misc_feature (1)..(187): Homolog of NCBI NO: 34874107 NR Description: similar to Cytochrome oxidase biogenesis protein
  misc_feature (1)..(181): Homolog of NCBI NO: 12841194 NR Description: unnamed protein product [Mus musculus]
  misc_feature (1)..(181): Homolog of NCBI NO: 38372481 NR Description: Inner membrane protein OXA1L, mitochondrial
  misc_feature (1)..(181): Homolog of NCBI NO: 26346514 NR Description: unnamed protein product [Mus musculus]
  misc_feature (1)..(186): Homolog of NCBI NO: 15241690 NR Description: OXA1 protein (OXA1p)
  misc_feature (1)..(221): Homolog of NCBI NO: 15225991 NR Description: OXA1 protein (OXA1p), putative
  misc_feature (1)..(219): Homolog of NCBI NO: 37536158 NR Description: putative Oxa1 protein [Oryza sativa (japonica
  misc_feature (1)..(219): Homolog of NCBI NO: 22122905 NR Description: putative cytochrome oxidase assembly protein
MKSMMKLNEMRPEIEAINEEMRNSTDPRSMEVGKQKLGELFLRHGVTPLTPLKGLFIQGPIFMSFFFAISNMVEKVPSMKGGGVYWFTDLTTPDNLLILPVLTSLTFLATVELNMQDGMEGNHMLKPMKKFSRFFGVLFVPFTIGFPKAIFFYWVTSNFFSLVYGAVLRNPAVRLFLNLPRLESQPTTAEVQPLNLSGGPEPSPGVDSPITDKETEQSSSVLSPGVDSPIADKECEQSSPAVSPEVNSPMVDKESEQSSSVLCDRIRDLEIRAKATGESRE

SEQ ID NO: 19814 - DNA, 2022 bp, Zea mays subsp. mays
  misc_feature (1)..(2022): Ceres Seq. ID no. 12378252
  misc_feature: MA Experiment ID: 108535 Result: Up-regulated in Transcription
  misc_feature: MA Experiment 108535 PARAMETER Experiment Name: Zm_Meristem_P Parameter: Age (day) Value: 8
  misc_feature: MA Experiment 108535 PARAMETER Experiment Name: Zm_Meristem_P Parameter: Organism Value: Zea mays
  misc_feature: MA Experiment 108535 PARAMETER Experiment Name: Zm_Meristem_P Parameter: Plant Line Value: 35A19
  misc_feature: MA Experiment 108535 PARAMETER Experiment Name: Zm_Meristem_P Parameter: Tissue Value: Root Meristem vs. Above Root Meristem
  misc_feature: MA Experiment ID: 108543 Result: Up-regulated in Transcription
  misc_feature: MA Experiment ID: 108689 Result: Up-regulated in Transcription
  misc_feature: MA Experiment 108689 PARAMETER Experiment Name: Zm_Drought_Roots_P Parameter: Age (day) Value: 9
  misc_feature: MA Experiment 108689 PARAMETER Experiment Name: Zm_Drought_Roots_P Parameter: Organism Value: Zea mays
  misc_feature: MA Experiment 108689 PARAMETER Experiment Name: Zm_Drought_Roots_P Parameter: Plant Line Value: 35A19
  misc_feature: MA Experiment 108689 PARAMETER Experiment Name: Zm_Drought_Roots_P Parameter: Timepoint (hr) Value: 24
  misc_feature: MA Experiment 108689 PARAMETER Experiment Name: Zm_Drought_Roots_P Parameter: Tissue Value: Roots
  misc_feature: MA Experiment 108689 PARAMETER Experiment Name: Zm_Drought_Roots_P Parameter: Treatment Value: Drought vs. No Drought
  misc_feature: MA Experiment ID: 20000477 Result: Down-regulated in Transcription
  misc_feature: MA Experiment 20000477 PARAMETER Experiment Name: Zm_5mM_SA_P Parameter: Age (day) Value: 10
  misc_feature: MA Experiment 20000477 PARAMETER Experiment Name: Zm_5mM_SA_P Parameter: Organism Value: Zea mays
  misc_feature: MA Experiment 20000477 PARAMETER Experiment Name: Zm_5mM_SA_P Parameter: Plant Line Value: 35A19
  misc_feature: MA Experiment 20000477 PARAMETER Experiment Name: Zm_5mM_SA_P Parameter: Timepoint (hr) Value: 48
  misc_feature: MA Experiment 20000477 PARAMETER Experiment Name: Zm_5mM_SA_P Parameter: Tissue Value: Aerial
  misc_feature: MA Experiment 20000477 PARAMETER Experiment Name: Zm_5mM_SA_P Parameter: Treatment Value: 5mM SA vs. No Treatment
  misc_feature: MA Experiment ID: 20000492 Result: Up-regulated in Transcription
  misc_feature: MA Experiment 20000492 PARAMETER Experiment Name: Zm_Hybrid_Seed_Dev_P Parameter: DAP Value: 12
  misc_feature: MA Experiment 20000492 PARAMETER Experiment Name: Zm_Hybrid_Seed_Dev_P Parameter: Organism Value: Zea mays
  misc_feature: MA Experiment 20000492 PARAMETER Experiment Name: Zm_Hybrid_Seed_Dev_P Parameter: Plant Line Value: 35A19
  misc_feature: MA Experiment 20000492 PARAMETER Experiment Name: Zm_Hybrid_Seed_Dev_P Parameter: Tissue Value: Fert Kernel vs. Unfert Floret
  misc_feature: MA Experiment ID: 20000535 Result: Up-regulated in Transcription
  misc_feature: MA Experiment 20000535 PARAMETER Experiment Name: Zm_Hybrid_Seed_Dev_P Parameter: DAP Value: 30 vs. 12
  misc_feature: MA Experiment 20000535 PARAMETER Experiment Name: Zm_Hybrid_Seed_Dev_P Parameter: Organism Value: Zea mays
  misc_feature: MA Experiment 20000535 PARAMETER Experiment Name: Zm_Hybrid_Seed_Dev_P Parameter: Plant Line Value: 35A19
  misc_feature: MA Experiment 20000535 PARAMETER Experiment Name: Zm_Hybrid_Seed_Dev_P Parameter: Tissue Value: Embryo vs. Unfert Floret
gcacgagaccattacctagaacatcctaatcaaaaacccggccgatcccgcacccctgactgtcagccgcgatccgctcttgtaggctccctccctctccgacccgcgtctccctcctcccactccactgctcctggtctctctctctctctccttctcctccccccgtccgtggccggagatcgacggtttccattttccagatcgcagttcattcagttgctctgttacctttacacggtctgcatgcctctattgtgtctgcagttttgcgtgcagcggcggagcaggagagatggcgtcggaggccaaggacgtgggcatcctcgccatggacatctacttcccgcccaactgcgtgctccaggaagagttggaaacacatgatggcgtgagcaaagggaagtataccattgggcttgggcaggaaagtatggcattttgcactgaagttgaggatgttatttcgatgagcttgacagtggtgaagtccctcctgaaaaattataacattgacccaatgtgcattggacgtttggaagttggcagtgaaacagtaatagacaagagcaagtctataaagacatggctgatgcagatatttgaggaatctggcaatactgatattgaaggagttgactcctctaatgcatgttatggtggaacagctgcattgtttaattgtgttaactgggttgaaagcaagtcatgggatggtcgctatggacttgttgtttgcacagacagtgcggtttacgctgaaggtccggctcgccctactggtggtgcggctgctattgcaatgctgattggaccaaatgctcctatttgttttgaaagtaaatatagaggatctcatatggcccatgtatacgacttttacaagcccgatcttgcgagtgaatatccggtggttgatgggaagctatcacaaacatgctacctcatggcattggactcctgctacaatgtattttgcaaaaagtatgaaaaacatgaggggaagcagttttcaatttctgatgcagattatgttgtgttccattctccatacaacaagcttgtacagaaaagcttcgctcgtttgtactacaatgatttcttgagaaactgcagcacggttgatggagagtcaagggaaaaattggcaccctatgcaggcttgtcatctgaagaaagctaccagagtcgcgaccttgaaaaggcatctcagcaagtcgccaagaatctgtacgagaccaaggttcagccaacaacattgatcccaaaacaagttgggaatatgtatacagcatcactctacgcagctcttgcatcggttgtccatagtaggcatgaaactctggcaggccagaggattgttatgttttcgtatggcagtgggttgacatcaacaatgttctctttcatgattaatgaaggccatcaccctttcagtctgctaaacatcgcaaacatactggatatttccaagaagctgaaggcaaggcacgtggttcccccagagaaatttgtggaggcactgaaactgatggagcaccgctatggggcaagagatttcgtgacgaatcaagatacaagtctgctatccgcaggcacatactatctcacgcacgttgactccaagtacagaaggttctacgacgtgaaaggtgacggtgtcgccactgcaatgtccaacggccactgatctttcttctgcccgaagctgcaacaagtcaaataacagaggcaagtgtcctaagcatccttagattattatatctattaagaggggaagctcgagttatagattaatctatgcccagctgtaaggttgtaaagttagttagagctgcgcatgcttgtttagtaaaagctctgctgctcttcagttatttagcgaatcaagcacactgctgggctaataagaattgtaaacaataatctgcagaatcactggctacatccaggttatgctgatgaatgcacgatttcatgtttaacacgatcaatgcatctggttacatccaggttatgctg

SEQ ID NO: 19815 - protein, 464 aa, Zea mays subsp. mays
  peptide (1)..(464): Ceres Seq. ID no. 12378253
  misc_feature (5)..(452): Pfam Name: Hydroxymethylglutaryl-coenzyme A synthase Pfam Description: Hydroxymethylglutaryl-coenzyme A synthase
  misc_feature (59)..(464): Homolog of NCBI NO: 30681902 NR Description: hydroxymethylglutaryl-CoA synthase [Arabidopsis
  misc_feature (1)..(463): Homolog of NCBI NO: 7436678 NR Description: hydroxymethylglutaryl-CoA synthase (EC 4.1.3.5),
  misc_feature (5)..(463): Homolog of NCBI NO: 11192007 NR Description: HMG-CoA synthase [Brassica juncea]
  misc_feature (5)..(464): Homolog of NCBI NO: 1143390 NR Description: hydroxymethylglutaryl-CoA synthase [Arabidopsis
  misc_feature (5)..(464): Homolog of NCBI NO: 15234313 NR Description: hydroxymethylglutaryl-CoA synthase
  misc_feature (5)..(464): Homolog of NCBI NO: 11192003 NR Description: HMG-CoA synthase [Brassica juncea]
  misc_feature (5)..(464): Homolog of NCBI NO: 7799986 NR Description: HMG-CoA synthase [Brassica juncea]
  misc_feature (5)..(464): Homolog of NCBI NO: 11192005 NR Description: HMG-CoA synthase [Brassica juncea]
  misc_feature (5)..(464): Homolog of NCBI NO: 14916100 NR Description: hydroxymethylglutaryl coenzyme A synthase [Hevea
  misc_feature (5)..(464): Homolog of NCBI NO: 16417956 NR Description: hydroxymethylglutaryl coenzyme A synthase [Hevea
MASEAKDVGILAMDIYFPPNCVLQEELETHDGVSKGKYTIGLGQESMAFCTEVEDVISMSLTVVKSLLKNYNIDPMCIGRLEVGSETVIDKSKSIKTWLMQIFEESGNTDIEGVDSSNACYGGTAALFNCVNWVESKSWDGRYGLVVCTDSAVYAEGPARPTGGAAAIAMLIGPNAPICFESKYRGSHMAHVYDFYKPDLASEYPVVDGKLSQTCYLMALDSCYNVFCKKYEKHEGKQFSISDADYVVFHSPYNKLVQKSFARLYYNDFLRNCSTVDGESREKLAPYAGLSSEESYQSRDLEKASQQVAKNLYETKVQPTTLIPKQVGNMYTASLYAALASVVHSRHETLAGQRIVMFSYGSGLTSTMFSFMINEGHHPFSLLNIANILDISKKLKARHVVPPEKFVEALKLMEHRYGARDFVTNQDTSLLSAGTYYLTHVDSKYRRFYDVKGDGVATAMSNGH

SEQ ID NO: 19816 - protein, 452 aa, Zea mays subsp. mays
  peptide (1)..(452): Ceres Seq. ID no. 12378254
  misc_feature (1)..(440): Pfam Name: Hydroxymethylglutaryl-coenzyme A synthase Pfam Description: Hydroxymethylglutaryl-coenzyme A synthase
  misc_feature (47)..(452): Homolog of NCBI NO: 30681902 NR Description: hydroxymethylglutaryl-CoA synthase [Arabidopsis
  misc_feature (1)..(451): Homolog of NCBI NO: 7436678 NR Description: hydroxymethylglutaryl-CoA synthase (EC 4.1.3.5),
  misc_feature (1)..(451): Homolog of NCBI NO: 11192007 NR Description: HMG-CoA synthase [Brassica juncea]
  misc_feature (1)..(452): Homolog of NCBI NO: 1143390 NR Description: hydroxymethylglutaryl-CoA synthase [Arabidopsis
  misc_feature (1)..(452): Homolog of NCBI NO: 15234313 NR Description: hydroxymethylglutaryl-CoA synthase
  misc_feature (1)..(452): Homolog of NCBI NO: 11192003 NR Description: HMG-CoA synthase [Brassica juncea]
  misc_feature (1)..(452): Homolog of NCBI NO: 7799986 NR Description: HMG-CoA synthase [Brassica juncea]
  misc_feature (1)..(452): Homolog of NCBI NO: 11192005 NR Description: HMG-CoA synthase [Brassica juncea]
  misc_feature (1)..(452): Homolog of NCBI NO: 14916100 NR Description: hydroxymethylglutaryl coenzyme A synthase [Hevea
  misc_feature (1)..(452): Homolog of NCBI NO: 16417956 NR Description: hydroxymethylglutaryl coenzyme A synthase [Hevea
MDIYFPPNCVLQEELETHDGVSKGKYTIGLGQESMAFCTEVEDVISMSLTVVKSLLKNYNIDPMCIGRLEVGSETVIDKSKSIKTWLMQIFEESGNTDIEGVDSSNACYGGTAALFNCVNWVESKSWDGRYGLVVCTDSAVYAEGPARPTGGAAAIAMLIGPNAPICFESKYRGSHMAHVYDFYKPDLASEYPVVDGKLSQTCYLMALDSCYNVFCKKYEKHEGKQFSISDADYVVFHSPYNKLVQKSFARLYYNDFLRNCSTVDGESREKLAPYAGLSSEESYQSRDLEKASQQVAKNLYETKVQPTTLIPKQVGNMYTASLYAALASVVHSRHETLAGQRIVMFSYGSGLTSTMFSFMINEGHHPFSLLNIANILDISKKLKARHVVPPEKFVEALKLMEHRYGARDFVTNQDTSLLSAGTYYLTHVDSKYRRFYDVKGDGVATAMSNGH

SEQ ID NO: 19817 - protein, 418 aa, Zea mays subsp. mays
  peptide (1)..(418): Ceres Seq. ID no. 12378255
  misc_feature (1)..(406): Pfam Name: Hydroxymethylglutaryl-coenzyme A synthase Pfam Description: Hydroxymethylglutaryl-coenzyme A synthase
  misc_feature (13)..(418): Homolog of NCBI NO: 30681902 NR Description: hydroxymethylglutaryl-CoA synthase [Arabidopsis
  misc_feature (1)..(417): Homolog of NCBI NO: 7436678 NR Description: hydroxymethylglutaryl-CoA synthase (EC 4.1.3.5),
  misc_feature (1)..(417): Homolog of NCBI NO: 11192007 NR Description: HMG-CoA synthase [Brassica juncea]
  misc_feature (1)..(418): Homolog of NCBI NO: 1143390 NR Description: hydroxymethylglutaryl-CoA synthase [Arabidopsis
  misc_feature (1)..(418): Homolog of NCBI NO: 15234313 NR Description: hydroxymethylglutaryl-CoA synthase
  misc_feature (1)..(418): Homolog of NCBI NO: 11192003 NR Description: HMG-CoA synthase [Brassica juncea]
  misc_feature (1)..(418): Homolog of NCBI NO: 7799986 NR Description: HMG-CoA synthase [Brassica juncea]
  misc_feature (1)..(418): Homolog of NCBI NO: 11192005 NR Description: HMG-CoA synthase [Brassica juncea]
  misc_feature (1)..(418): Homolog of NCBI NO: 14916100 NR Description: hydroxymethylglutaryl coenzyme A synthase [Hevea
  misc_feature (1)..(418): Homolog of NCBI NO: 16417956 NR Description: hydroxymethylglutaryl coenzyme A synthase [Hevea
MAFCTEVEDVISMSLTVVKSLLKNYNIDPMCIGRLEVGSETVIDKSKSIKTWLMQIFEESGNTDIEGVDSSNACYGGTAALFNCVNWVESKSWDGRYGLVVCTDSAVYAEGPARPTGGAAAIAMLIGPNAPICFESKYRGSHMAHVYDFYKPDLASEYPVVDGKLSQTCYLMALDSCYNVFCKKYEKHEGKQFSISDADYVVFHSPYNKLVQKSFARLYYNDFLRNCSTVDGESREKLAPYAGLSSEESYQSRDLEKASQQVAKNLYETKVQPTTLIPKQVGNMYTASLYAALASVVHSRHETLAGQRIVMFSYGSGLTSTMFSFMINEGHHPFSLLNIANILDISKKLKARHVVPPEKFVEALKLMEHRYGARDFVTNQDTSLLSAGTYYLTHVDSKYRRFYDVKGDGVATAMSNGH

SEQ ID NO: 19818 - DNA, 484 bp, Zea mays subsp. mays
  misc_feature (1)..(484): Ceres Seq. ID no. 4613578
  misc_feature: MA Experiment ID: 108527 Result: Up-regulated in Transcription
  misc_feature: MA Experiment 108527 PARAMETER Experiment Name: Zm_5mM_NO_P Parameter: Age (day) Value: 8
  misc_feature: MA Experiment 108527 PARAMETER Experiment Name: Zm_5mM_NO_P Parameter: Organism Value: Zea mays
  misc_feature: MA Experiment 108527 PARAMETER Experiment Name: Zm_5mM_NO_P Parameter: Plant Line Value: 35A19
  misc_feature: MA Experiment 108527 PARAMETER Experiment Name: Zm_5mM_NO_P Parameter: Timepoint (hr) Value: 6
  misc_feature: MA Experiment 108527 PARAMETER Experiment Name: Zm_5mM_NO_P Parameter: Tissue Value: Aerial
  misc_feature: MA Experiment 108527 PARAMETER Experiment Name: Zm_5mM_NO_P Parameter: Treatment Value: 5mM NO vs. No Treatment
  misc_feature: MA Experiment ID: 108534 Result: Up-regulated in Transcription
  misc_feature: MA Experiment 108534 PARAMETER Experiment Name: Zm_4deg_Cold_P Parameter: Age (hr) Value: 8
  misc_feature: MA Experiment 108534 PARAMETER Experiment Name: Zm_4deg_Cold_P Parameter: Organism Value: Zea mays
  misc_feature: MA Experiment 108534 PARAMETER Experiment Name: Zm_4deg_Cold_P Parameter: Plant Line Value: 35A19
  misc_feature: MA Experiment 108534 PARAMETER Experiment Name: Zm_4deg_Cold_P Parameter: Temperature (deg C) Value: 4 vs. 22
  misc_feature: MA Experiment 108534 PARAMETER Experiment Name: Zm_4deg_Cold_P Parameter: Timepoint (hr) Value: 6
  misc_feature: MA Experiment 108534 PARAMETER Experiment Name: Zm_4deg_Cold_P Parameter: Tissue Value: Aerial
gctccagtctagacggcggtttgacttttcgaccggggaaataggcgctgcgtttgatttgaggaggcgacacgagacgggacgggagggatctcttcgctggaggctggagcgttgcccgattcgtcgcggttctcggacaagggaggagggagggcgcacctcgggctccgatcgaagagctttgttaacattagagattgaaaggtagcatcgtagcaaaatgaaggcaccatcactactggttcagtgtttccctggcttgcttcccagcaaggccactagttgcgtgccaattgtatctgagaaggatctgcagctaccatcaccagctgttgaaataatcccctcaaagagtgttcatccatacaaatatgctggagagaaggttgatgtgcaaggtcttaatattttcaagggtaaagtcagtgtagcagatatgatagttatctcaccttctgaagtagcatcatcaaaatatgat

SEQ ID NO: 19819 - protein, 87 aa, Zea mays subsp. mays
  peptide (1)..(87): Ceres Seq. ID no. 4613579
  misc_feature (1)..(85): Homolog of NCBI NO: 25408858 NR Description: hypothetical protein At2g43320 [imported] -
  misc_feature (1)..(85): Homolog of NCBI NO: 18406207 NR Description: expressed protein
  misc_feature (1)..(85): Homolog of NCBI NO: 16226903 NR Description: At2g43320/T1O24.6 [Arabidopsis thaliana]
  misc_feature (1)..(86): Homolog of NCBI NO: 38346224 NR Description: OJ990528_30.4 [Oryza sativa (japonica
MKAPSLLVQCFPGLLPSKATSCVPIVSEKDLQLPSPAVEIIPSKSVHPYKYAGEKVDVQGLNIFKGKVSVADMIVISPSEVASSKYD

SEQ ID NO: 19820 - protein, 69 aa, Zea mays subsp. mays
  peptide (1)..(69): Ceres Seq. ID no. 4613580
LQSRRRFDFSTGEIGAAFDLRRRHETGREGSLRWRLERCPIRRGSRTREEGGRTSGSDRRALLTLEIER

SEQ ID NO: 19821 - DNA, 1692 bp, Zea mays subsp. mays
  misc_feature (1)..(1692): Ceres Seq. ID no. 12383532
  misc_feature: MA Experiment ID: 108535 Result: Down-regulated in Transcription
  misc_feature: MA Experiment 108535 PARAMETER Experiment Name: Zm_Meristem_P Parameter: Age (day) Value: 8
  misc_feature: MA Experiment 108535 PARAMETER Experiment Name: Zm_Meristem_P Parameter: Organism Value: Zea mays
  misc_feature: MA Experiment 108535 PARAMETER Experiment Name: Zm_Meristem_P Parameter: Plant Line Value: 35A19
  misc_feature: MA Experiment 108535 PARAMETER Experiment Name: Zm_Meristem_P Parameter: Tissue Value: Root Meristem vs. Above Root Meristem
  misc_feature: MA Experiment ID: 108543 Result: Up-regulated in Transcription
  misc_feature: MA Experiment ID: 20000478 Result: Down-regulated in Transcription
  misc_feature: MA Experiment 20000478 PARAMETER Experiment Name: Zm_5mM_SA_P Parameter: Age (day) Value: 11
  misc_feature: MA Experiment 20000478 PARAMETER Experiment Name: Zm_5mM_SA_P Parameter: Organism Value: Zea mays
  misc_feature: MA Experiment 20000478 PARAMETER Experiment Name: Zm_5mM_SA_P Parameter: Plant Line Value: 35A19
  misc_feature: MA Experiment 20000478 PARAMETER Experiment Name: Zm_5mM_SA_P Parameter: Timepoint (hr) Value: 72
  misc_feature: MA Experiment 20000478 PARAMETER Experiment Name: Zm_5mM_SA_P Parameter: Tissue Value: Aerial
  misc_feature: MA Experiment 20000478 PARAMETER Experiment Name: Zm_5mM_SA_P Parameter: Treatment Value: 5mM SA vs. No Treatment
  misc_feature: MA Experiment ID: 20000479 Result: Down-regulated in Transcription
  misc_feature: MA Experiment 20000479 PARAMETER Experiment Name: Zm_Drought_P Parameter: Age (day) Value: 10
  misc_feature: MA Experiment 20000479 PARAMETER Experiment Name: Zm_Drought_P Parameter: Organism Value: Zea mays
  misc_feature: MA Experiment 20000479 PARAMETER Experiment Name: Zm_Drought_P Parameter: Plant Line Value: 35A19
  misc_feature: MA Experiment 20000479 PARAMETER Experiment Name: Zm_Drought_P Parameter: Timepoint (hr) Value: 48
  misc_feature: MA Experiment 20000479 PARAMETER Experiment Name: Zm_Drought_P Parameter: Tissue Value: Aerial
  misc_feature: MA Experiment 20000479 PARAMETER Experiment Name: Zm_Drought_P Parameter: Treatment Value: Drought vs. No Drought
  misc_feature: MA Experiment ID: 20000480 Result: Down-regulated in Transcription
  misc_feature: MA Experiment 20000480 PARAMETER Experiment Name: Zm_Drought_P Parameter: Age (day) Value: 11
  misc_feature: MA Experiment 20000480 PARAMETER Experiment Name: Zm_Drought_P Parameter: Organism Value: Zea mays
  misc_feature: MA Experiment 20000480 PARAMETER Experiment Name: Zm_Drought_P Parameter: Plant Line Value: 35A19
  misc_feature: MA Experiment 20000480 PARAMETER Experiment Name: Zm_Drought_P Parameter: Timepoint (hr) Value: 72
  misc_feature: MA Experiment 20000480 PARAMETER Experiment Name: Zm_Drought_P Parameter: Tissue Value: Aerial
  misc_feature: MA Experiment 20000480 PARAMETER Experiment Name: Zm_Drought_P Parameter: Treatment Value: Drought vs. No Drought
gcacgagaccattacctagaacatcctaatcgaaaagccgccgccgcaaacgtcgcccccgaccgaagcctagccaccaccaccagcaccagcaacctcgcgtagcagcgctcgacaccgctggacgccccgcgcccgcgcgaaagcaggaccttgattctgtcgttggcgataccatggatgtgtcctacgagaagtgtgctgatccgtcgaactcggacctgcctagcgctgttgttgatggctgagcgatacgacgatggcggctccgaacacctgggatctgctgtagtagagggagctattggaaacgaagggaattcggggaccgaaagttccgagcagactggtgatgagcgcgctggaggaggtgaaggctctcctgttgatgtcgaaaacagcgctgataaacaagagagccaggagacgacggttccgatggaagaaacagaaacgagcgacggcacctcgatcacgtcgatggaggatgccctggaaccgaaccgtcatcacgatctcccgtcggagcctgaggatgtgggcaaccacactcctgatcctgatcactccagcggcaagaactccaaaggaaacagtagcgtgttccagagcgcaaggagggtgctggcttcaaccaataagaaaactccatctgcaactgcacggaagccactgcagttgactaacagaggtaaccaggatgacgcgaaatcgtcggctggaaaggccgccacggttccatcaggcccggttttccgctgtactgaacgggccgagaagcgcagagaattttatatgaagctggaggagaagcatcaagctatggaggaagagaagattcagttggaggctaagttgaagaaagagcaggaggaggcactgaagcagctgaggaagagcctgaccttcaaagccaaccccatgccgagcttctaccacgaggcgacgccgtccccgaaggccgagttcaagaagctgcccacgacccggcccaagtcgcccaagctgggcaggaggaagacggcctcgacctccatggagacgtccaactcgtcgtcggagagcgagggcacgaggccgtgctgccgcgccagccgcgacggcctcgacagcagctgcagatgcggcggcaggagcaggccgcaggccgcgaacgccaagccggccgccgggcccaagaagccgccgccgcagcagcagcagccgaaacaccgcgcccacaagatcgccggcgagggcgccatcaacatcgccgtgcactagccgccgccgccgcttcttgaaacttctttccggtcgcatgcatgcaggacgatggcgatggcgtgcggattttccttctaagttatgagagtgctttgtcggcttgtggatttggtgtagataataatataagttatggtgacgacgaacgaacaggggctgctgccacgagtgaggccggtcagtcagacagaggtggtggtgtttattgcttgcttgcttgtttgtctgtttgtttgtttatttatgctaatcttatttatttaatctgctgtcgaggatggcctgcgcattgccactgtgcaggcgctgcttgttttttcgtcttcttaatttatggggagtggtaagagagacttgagcgctggatgtaacgtgtacaaacgaaaacgaaggcttgctggtggtggtgatggaggattttatctg

SEQ ID NO: 19822 - protein, 360 aa, Zea mays subsp. mays
  peptide (1)..(360): Ceres Seq. ID no. 12383533
  misc_feature (63)..(290): Homolog of NCBI NO: 30679219 NR Description: expressed protein [Arabidopsis thaliana]
  misc_feature (121)..(293): Homolog of NCBI NO: 34897180 NR Description: unknown protein [Oryza sativa (japonica
  misc_feature (177)..(283): Homolog of NCBI NO: 25408425 NR Description: hypothetical protein At2g35880 [imported] -
  misc_feature (177)..(283): Homolog of NCBI NO: 18403980 NR Description: expressed protein
  misc_feature (63)..(290): Homolog of NCBI NO: 18396961 NR Description: expressed protein
  misc_feature (63)..(290): Homolog of NCBI NO: 21618286 NR Description: unknown [Arabidopsis thaliana]
  misc_feature (63)..(290): Homolog of NCBI NO: 6175167 NR Description: unknown protein [Arabidopsis thaliana]
  misc_feature (34)..(348): Homolog of NCBI NO: 15224733 NR Description: unknown protein; protein id: At2g25480.1
  misc_feature (45)..(348): Homolog of NCBI NO: 18417986 NR Description: putative protein
  misc_feature (28)..(359): Homolog of NCBI NO: 34393229 NR Description: putative seed specific protein
MCPTRSVLIRRTRTCLALLLMAERYDDGGSEHLGSAVVEGAIGNEGNSGTESSEQTGDERAGGGEGSPVDVENSADKQESQETTVPMEETETSDGTSITSMEDALEPNRHHDLPSEPEDVGNHTPDPDHSSGKNSKGNSSVFQSARRVLASTNKKTPSATARKPLQLTNRGNQDDAKSSAGKAATVPSGPVFRCTERAEKRREFYMKLEEKHQAMEEEKIQLEAKLKKEQEEALKQLRKSLTFKANPMPSFYHEATPSPKAEFKKLPTTRPKSPKLGRRKTASTSMETSNSSSESEGTRPCCRASRDGLDSSCRCGGRSRPQAANAKPAAGPKKPPPQQQQPKHRAHKIAGEGAINIAVH

SEQ ID NO: 19823 - protein, 340 aa, Zea mays subsp. mays
  peptide (1)..(340): Ceres Seq. ID no. 12383534
  misc_feature (43)..(270): Homolog of NCBI NO: 30679219 NR Description: expressed protein [Arabidopsis thaliana]
  misc_feature (101)..(273): Homolog of NCBI NO: 34897180 NR Description: unknown protein [Oryza sativa (japonica
  misc_feature (157)..(263): Homolog of NCBI NO: 25408425 NR Description: hypothetical protein At2g35880 [imported] -
  misc_feature (157)..(263): Homolog of NCBI NO: 18403980 NR Description: expressed protein
  misc_feature (43)..(270): Homolog of NCBI NO: 21618286 NR Description: unknown [Arabidopsis thaliana]
  misc_feature (43)..(270): Homolog of NCBI NO: 18396961 NR Description: expressed protein
  misc_feature (43)..(270): Homolog of NCBI NO: 6175167 NR Description: unknown protein [Arabidopsis thaliana]
  misc_feature (14)..(328): Homolog of NCBI NO: 15224733 NR Description: unknown protein; protein id: At2g25480.1
  misc_feature (25)..(328): Homolog of NCBI NO: 18417986 NR Description: putative protein
  misc_feature (8)..(339): Homolog of NCBI NO: 34393229 NR Description: putative seed specific protein
MAERYDDGGSEHLGSAVVEGAIGNEGNSGTESSEQTGDERAGGGEGSPVDVENSADKQESQETTVPMEETETSDGTSITSMEDALEPNRHHDLPSEPEDVGNHTPDPDHSSGKNSKGNSSVFQSARRVLASTNKKTPSATARKPLQLTNRGNQDDAKSSAGKAATVPSGPVFRCTERAEKRREFYMKLEEKHQAMEEEKIQLEAKLKKEQEEALKQLRKSLTFKANPMPSFYHEATPSPKAEFKKLPTTRPKSPKLGRRKTASTSMETSNSSSESEGTRPCCRASRDGLDSSCRCGGRSRPQAANAKPAAGPKKPPPQQQQPKHRAHKIAGEGAINIAVH

SEQ ID NO: 19824 - protein, 274 aa, Zea mays subsp. mays
  peptide (1)..(274): Ceres Seq. ID no. 12383535
  misc_feature (1)..(262): Homolog of NCBI NO: 18417986 NR Description: putative protein
  misc_feature (1)..(273): Homolog of NCBI NO: 34393229 NR Description: putative seed specific protein
  misc_feature (1)..(204): Homolog of NCBI NO: 30679219 NR Description: expressed protein [Arabidopsis thaliana]
  misc_feature (35)..(207): Homolog of NCBI NO: 34897180 NR Description: unknown protein [Oryza sativa (japonica
  misc_feature (91)..(197): Homolog of NCBI NO: 25408425 NR Description: hypothetical protein At2g35880 [imported] -
  misc_feature (91)..(197): Homolog of NCBI NO: 18403980 NR Description: expressed protein
  misc_feature (1)..(204): Homolog of NCBI NO: 21618286 NR Description: unknown [Arabidopsis thaliana]
  misc_feature (1)..(204): Homolog of NCBI NO: 18396961 NR Description: expressed protein
  misc_feature (1)..(204): Homolog of NCBI NO: 6175167 NR Description: unknown protein [Arabidopsis thaliana]
  misc_feature (1)..(262): Homolog of NCBI NO: 15224733 NR Description: unknown protein; protein id: At2g25480.1
MEETETSDGTSITSMEDALEPNRHHDLPSEPEDVGNHTPDPDHSSGKNSKGNSSVFQSARRVLASTNKKTPSATARKPLQLTNRGNQDDAKSSAGKAATVPSGPVFRCTERAEKRREFYMKLEEKHQAMEEEKIQLEAKLKKEQEEALKQLRKSLTFKANPMPSFYHEATPSPKAEFKKLPTTRPKSPKLGRRKTASTSMETSNSSSESEGTRPCCRASRDGLDSSCRCGGRSRPQAANAKPAAGPKKPPPQQQQPKHRAHKIAGEGAINIAVH

SEQ ID NO: 19825 - DNA, 466 bp, Zea mays subsp. mays
  misc_feature (1)..(466): Ceres Seq. ID no. 6410186
  misc_feature: MA Experiment ID: 108527 Result: Up-regulated in Transcription
  misc_feature: MA Experiment 108527 PARAMETER Experiment Name: Zm_5mM_NO_P Parameter: Age (day) Value: 8
  misc_feature: MA Experiment 108527 PARAMETER Experiment Name: Zm_5mM_NO_P Parameter: Organism Value: Zea mays
  misc_feature: MA Experiment 108527 PARAMETER Experiment Name: Zm_5mM_NO_P Parameter: Plant Line Value: 35A19
  misc_feature: MA Experiment 108527 PARAMETER Experiment Name: Zm_5mM_NO_P Parameter: Timepoint (hr) Value: 6
  misc_feature: MA Experiment 108527 PARAMETER Experiment Name: Zm_5mM_NO_P Parameter: Tissue Value: Aerial
  misc_feature: MA Experiment 108527 PARAMETER Experiment Name: Zm_5mM_NO_P Parameter: Treatment Value: 5mM NO vs. No Treatment
  misc_feature: MA Experiment ID: 108528 Result: Up-regulated in Transcription
  misc_feature: MA Experiment 108528 PARAMETER Experiment Name: Zm_Imbibed_Seeds_P Parameter: Age (day) Value: 5 vs. 2
  misc_feature: MA Experiment 108528 PARAMETER Experiment Name: Zm_Imbibed_Seeds_P Parameter: Organism Value: Zea mays
  misc_feature: MA Experiment 108528 PARAMETER Experiment Name: Zm_Imbibed_Seeds_P Parameter: Plant Line Value: 35A19
  misc_feature: MA Experiment 108528 PARAMETER Experiment Name: Zm_Imbibed_Seeds_P Parameter: Tissue Value: Aerial vs. Embryo
  misc_feature: MA Experiment ID: 108534 Result: Up-regulated in Transcription
  misc_feature: MA Experiment 108534 PARAMETER Experiment Name: Zm_4deg_Cold_P Parameter: Age (hr) Value: 8
  misc_feature: MA Experiment 108534 PARAMETER Experiment Name: Zm_4deg_Cold_P Parameter: Organism Value: Zea mays
  misc_feature: MA Experiment 108534 PARAMETER Experiment Name: Zm_4deg_Cold_P Parameter: Plant Line Value: 35A19
  misc_feature: MA Experiment 108534 PARAMETER Experiment Name: Zm_4deg_Cold_P Parameter: Temperature (deg C) Value: 4 vs. 22
  misc_feature: MA Experiment 108534 PARAMETER Experiment Name: Zm_4deg_Cold_P Parameter: Timepoint (hr) Value: 6
  misc_feature: MA Experiment 108534 PARAMETER Experiment Name: Zm_4deg_Cold_P Parameter: Tissue Value: Aerial
  misc_feature: MA Experiment ID: 108535 Result: Down-regulated in Transcription
  misc_feature: MA Experiment 108535 PARAMETER Experiment Name: Zm_Meristem_P Parameter: Age (day) Value: 8
  misc_feature: MA Experiment 108535 PARAMETER Experiment Name: Zm_Meristem_P Parameter: Organism Value: Zea mays
  misc_feature: MA Experiment 108535 PARAMETER Experiment Name: Zm_Meristem_P Parameter: Plant Line Value: 35A19
  misc_feature: MA Experiment 108535 PARAMETER Experiment Name: Zm_Meristem_P Parameter: Tissue Value: Root Meristem vs. Above Root Meristem
  misc_feature: MA Experiment ID: 108543 Result: Down-regulated in Transcription
  misc_feature: MA Experiment ID: 108547 Result: Up-regulated in Transcription
  misc_feature: MA Experiment 108547 PARAMETER Experiment Name: Zm_Imbibed_Seeds_P Parameter: Age (day) Value: 4 vs. 2
  misc_feature: MA Experiment 108547 PARAMETER Experiment Name: Zm_Imbibed_Seeds_P Parameter: Organism Value: Zea mays
  misc_feature: MA Experiment 108547 PARAMETER Experiment Name: Zm_Imbibed_Seeds_P Parameter: Plant Line Value: 35A19
  misc_feature: MA Experiment 108547 PARAMETER Experiment Name: Zm_Imbibed_Seeds_P Parameter: Tissue Value: Aerial vs. Embryo
  misc_feature: MA Experiment ID: 108689 Result: Up-regulated in Transcription
  misc_feature: MA Experiment 108689 PARAMETER Experiment Name: Zm_Drought_Roots_P Parameter: Age (day) Value: 9
  misc_feature: MA Experiment 108689 PARAMETER Experiment Name: Zm_Drought_Roots_P Parameter: Organism Value: Zea mays
  misc_feature: MA Experiment 108689 PARAMETER Experiment Name: Zm_Drought_Roots_P Parameter: Plant Line Value: 35A19
  misc_feature: MA Experiment 108689 PARAMETER Experiment Name: Zm_Drought_Roots_P Parameter: Timepoint (hr) Value: 24
  misc_feature: MA Experiment 108689 PARAMETER Experiment Name: Zm_Drought_Roots_P Parameter: Tissue Value: Roots
  misc_feature: MA Experiment 108689 PARAMETER Experiment Name: Zm_Drought_Roots_P Parameter: Treatment Value: Drought vs. No Drought
  misc_feature: MA Experiment ID: 20000477 Result: Up-regulated in Transcription
  misc_feature: MA Experiment 20000477 PARAMETER Experiment Name: Zm_5mM_SA_P Parameter: Age (day) Value: 10
  misc_feature: MA Experiment 20000477 PARAMETER Experiment Name: Zm_5mM_SA_P Parameter: Organism Value: Zea mays
  misc_feature: MA Experiment 20000477 PARAMETER Experiment Name: Zm_5mM_SA_P Parameter: Plant Line Value: 35A19
  misc_feature: MA Experiment 20000477 PARAMETER Experiment Name: Zm_5mM_SA_P Parameter: Timepoint (hr) Value: 48
  misc_feature: MA Experiment 20000477 PARAMETER Experiment Name: Zm_5mM_SA_P Parameter: Tissue Value: Aerial
  misc_feature: MA Experiment 20000477 PARAMETER Experiment Name: Zm_5mM_SA_P Parameter: Treatment Value: 5mM SA vs. No Treatment
  misc_feature: MA Experiment ID: 20000478 Result: Up-regulated in Transcription
  misc_feature: MA Experiment 20000478 PARAMETER Experiment Name: Zm_5mM_SA_P Parameter: Age (day) Value: 11
  misc_feature: MA Experiment 20000478 PARAMETER Experiment Name: Zm_5mM_SA_P Parameter: Organism Value: Zea mays
  misc_feature: MA Experiment 20000478 PARAMETER Experiment Name: Zm_5mM_SA_P Parameter: Plant Line Value: 35A19
  misc_feature: MA Experiment 20000478 PARAMETER Experiment Name: Zm_5mM_SA_P Parameter: Timepoint (hr) Value: 72
  misc_feature: MA Experiment 20000478 PARAMETER Experiment Name: Zm_5mM_SA_P Parameter: Tissue Value: Aerial
  misc_feature: MA Experiment 20000478 PARAMETER Experiment Name: Zm_5mM_SA_P Parameter: Treatment Value: 5mM SA vs. No Treatment
  misc_feature: MA Experiment ID: 20000479 Result: Up-regulated in Transcription
  misc_feature: MA Experiment 20000479 PARAMETER Experiment Name: Zm_Drought_P Parameter: Age (day) Value: 10
  misc_feature: MA Experiment 20000479 PARAMETER Experiment Name: Zm_Drought_P Parameter: Organism Value: Zea mays
  misc_feature: MA Experiment 20000479 PARAMETER Experiment Name: Zm_Drought_P Parameter: Plant Line Value: 35A19
  misc_feature: MA Experiment 20000479 PARAMETER Experiment Name: Zm_Drought_P Parameter: Timepoint (hr) Value: 48
  misc_feature: MA Experiment 20000479 PARAMETER Experiment Name: Zm_Drought_P Parameter: Tissue Value: Aerial
  misc_feature: MA Experiment 20000479 PARAMETER Experiment Name: Zm_Drought_P Parameter: Treatment Value: Drought vs. No Drought
  misc_feature: MA Experiment ID: 20000480 Result: Up-regulated in Transcription
  misc_feature: MA Experiment 20000480 PARAMETER Experiment Name: Zm_Drought_P Parameter: Age (day) Value: 11
  misc_feature: MA Experiment 20000480 PARAMETER Experiment Name: Zm_Drought_P Parameter: Organism Value: Zea mays
  misc_feature: MA Experiment 20000480 PARAMETER Experiment Name: Zm_Drought_P Parameter: Plant Line Value: 35A19
  misc_feature: MA Experiment 20000480 PARAMETER Experiment Name: Zm_Drought_P Parameter: Timepoint (hr) Value: 72
  misc_feature: MA Experiment 20000480 PARAMETER Experiment Name: Zm_Drought_P Parameter: Tissue Value: Aerial
  misc_feature: MA Experiment 20000480 PARAMETER Experiment Name: Zm_Drought_P Parameter: Treatment Value: Drought vs. No Drought
  misc_feature: MA Experiment ID: 20000487 Result: Up-regulated in Transcription
  misc_feature: MA Experiment 20000487 PARAMETER Experiment Name: Zm_50mM_NH4NO3_L_to_H_P Parameter: Organism Value: Zea mays
  misc_feature: MA Experiment 20000487 PARAMETER Experiment Name: Zm_50mM_NH4NO3_L_to_H_P Parameter: Timepoint (hr) Value: 4
  misc_feature: MA Experiment 20000487 PARAMETER Experiment Name: Zm_50mM_NH4NO3_L_to_H_P Parameter: Tissue Value: Leaves
  misc_feature: MA Experiment 20000487 PARAMETER Experiment Name: Zm_50mM_NH4NO3_L_to_H_P Parameter: Treatment Value: 50mM NH4NO3 vs. 100mM Mannitol
  misc_feature: MA Experiment ID: 20000488 Result: Up-regulated in Transcription
  misc_feature: MA Experiment 20000488 PARAMETER Experiment Name: Zm_50mM_NH4NO3_L_to_H_P Parameter: Organism Value: Zea mays
  misc_feature: MA Experiment 20000488 PARAMETER Experiment Name: Zm_50mM_NH4NO3_L_to_H_P Parameter: Timepoint (hr) Value: 8
  misc_feature: MA Experiment 20000488 PARAMETER Experiment Name: Zm_50mM_NH4NO3_L_to_H_P Parameter: Tissue Value: Leaves
  misc_feature: MA Experiment 20000488 PARAMETER Experiment Name: Zm_50mM_NH4NO3_L_to_H_P Parameter: Treatment Value: 50mM NH4NO3 vs. 100mM Mannitol
  misc_feature: MA Experiment ID: 20000492 Result: Up-regulated in Transcription
  misc_feature: MA Experiment 20000492 PARAMETER Experiment Name: Zm_Hybrid_Seed_Dev_P Parameter: DAP Value: 12
  misc_feature: MA Experiment 20000492 PARAMETER Experiment Name: Zm_Hybrid_Seed_Dev_P Parameter: Organism Value: Zea mays
  misc_feature: MA Experiment 20000492 PARAMETER Experiment Name: Zm_Hybrid_Seed_Dev_P Parameter: Plant Line Value: 35A19
  misc_feature: MA Experiment 20000492 PARAMETER Experiment Name: Zm_Hybrid_Seed_Dev_P Parameter: Tissue Value: Fert Kernel vs. Unfert Floret
atccatccgtagcgttccattccattccatctccctcctcgcctacggcttcttccaccgcggcatcgtgcccggcctctgcttcggcgcgggcctggggattacgctgttcggcatggcctacatgttcgtccacgacggcctggtccaccgccgctttccggtcggccccatcgccgacgtgccctacttccgccgagtggctgcctcgcacaagatacaccacatggacaagttcggcggcgtcccgtatgggctcttcctgggaccaaaggagctggaggaggttggtggcctggacgagcttgttagcagtccggtgagtgaagctactgatactgaagacgcaggagaagaaaagacgcgtccagttgtatgcgttgtccgaacaagcgtgttcatgggccagagtgtgccaaatgagttctagctttaggcgagtgggccaaatgagtgtgggctgcgt

SEQ ID NO: 19826 - protein, 142 aa, Zea mays subsp. mays
  peptide (1)..(142): Ceres Seq. ID no. 6410187
  misc_feature (2)..(102): Pfam Name: Carotene hydroxylase Pfam Description: Carotene hydroxylase
  misc_feature (2)..(116): Homolog of NCBI NO: 21734857 NR Description: beta-carotene hydroxylase [Vitis vinifera]
  misc_feature (4)..(102): Homolog of NCBI NO: 9971820 NR Description: beta hydroxylase [Tagetes erecta]
  misc_feature (9)..(102): Homolog of NCBI NO: 37536402 NR Description: putative beta-carotene hydroxylase
  misc_feature (2)..(102): Homolog of NCBI NO: 2956717 NR Description: beta-carotene hydroxylase 2 [Capsicum annuum]
  misc_feature (2)..(121): Homolog of NCBI NO: 33145986 NR Description: beta-carotene hydroxylase [Crocus sativus]
  misc_feature (4)..(102): Homolog of NCBI NO: 5870600 NR Description: beta-carotene hydroxylase [Lycopersicon
  misc_feature (2)..(102): Homolog of NCBI NO: 9968545 NR Description: beta-carotene hydroxylase [Narcissus
  misc_feature (2)..(102): Homolog of NCBI NO: 11245486 NR Description: beta-carotene hydroxylase [Citrus unshiu]
  misc_feature (2)..(102): Homolog of NCBI NO: 9988836 NR Description: beta-carotene hydroxylase [Citrus unshiu]
  misc_feature (4)..(102): Homolog of NCBI NO: 32488500 NR Description: OSJNBa0011J08.7 [Oryza sativa (japonica
SIRSVPFHSISLLAYGFFHRGIVPGLCFGAGLGITLFGMAYMFVHDGLVHRRFPVGPIADVPYFRRVAASHKIHHMDKFGGVPYGLFLGPKELEEVGGLDELVSSPVSEATDTEDAGEEKTRPVVCVVRTSVFMGQSVPNEF

SEQ ID NO: 19827 - protein, 106 aa, Zea mays subsp. mays
  peptide (1)..(106): Ceres Seq. ID no. 6410188
PSVAFHSIPSPSSPTASSTAASCPASASARAWGLRCSAWPTCSSTTAWSTAAFRSAPSPTCPTSAEWLPRTRYTTWTSSAASRMGSSWDQRSWRRLVAWTSLLAVR

SEQ ID NO: 19828 - protein, 104 aa, Zea mays subsp. mays; identical to SEQ ID NO: 14802
  peptide (1)..(104): Ceres Seq. ID no. 6410189
  misc_feature (1)..(64): Pfam Name: Carotene hydroxylase Pfam Description: Carotene hydroxylase
  misc_feature (1)..(78): Homolog of NCBI NO: 21734857 NR Description: beta-carotene hydroxylase [Vitis vinifera]
  misc_feature (1)..(64): Homolog of NCBI NO: 9971820 NR Description: beta hydroxylase [Tagetes erecta]
  misc_feature (1)..(64): Homolog of NCBI NO: 37536402 NR Description: putative beta-carotene hydroxylase
  misc_feature (1)..(64): Homolog of NCBI NO: 2956717 NR Description: beta-carotene hydroxylase 2 [Capsicum annuum]
  misc_feature (1)..(83): Homolog of NCBI NO: 33145986 NR Description: beta-carotene hydroxylase [Crocus sativus]
  misc_feature (1)..(64): Homolog of NCBI NO: 5870600 NR Description: beta-carotene hydroxylase [Lycopersicon
  misc_feature (1)..(64): Homolog of NCBI NO: 9968545 NR Description: beta-carotene hydroxylase [Narcissus
  misc_feature (1)..(64): Homolog of NCBI NO: 11245486 NR Description: beta-carotene hydroxylase [Citrus unshiu]
  misc_feature (1)..(64): Homolog of NCBI NO: 9988836 NR Description: beta-carotene hydroxylase [Citrus unshiu]
  misc_feature (1)..(64): Homolog of NCBI NO: 32488500 NR Description: OSJNBa0011J08.7 [Oryza sativa (japonica

SEQ ID NO: 19829 - DNA, 468 bp, Zea mays subsp. mays
  misc_feature (1)..(468): Ceres Seq. ID no. 2112893
  misc_feature: MA Experiment ID: 108597 Result: Up-regulated in Transcription
  misc_feature: MA Experiment 108597 PARAMETER Experiment Name: Zm_100uM_ABA_P Parameter: Age (day) Value: 9
  misc_feature: MA Experiment 108597 PARAMETER Experiment Name: Zm_100uM_ABA_P Parameter: Organism Value: Zea mays
  misc_feature: MA Experiment 108597 PARAMETER Experiment Name: Zm_100uM_ABA_P Parameter: Plant Line Value: 35A19
  misc_feature: MA Experiment 108597 PARAMETER Experiment Name: Zm_100uM_ABA_P Parameter: Timepoint (hr) Value: 24
  misc_feature: MA Experiment 108597 PARAMETER Experiment Name: Zm_100uM_ABA_P Parameter: Tissue Value: Aerial
  misc_feature: MA Experiment 108597 PARAMETER Experiment Name: Zm_100uM_ABA_P Parameter: Treatment Value: 100uM ABA vs. No Treatment
  misc_feature: MA Experiment ID: 20000480 Result: Up-regulated in Transcription
  misc_feature: MA Experiment 20000480 PARAMETER Experiment Name: Zm_Drought_P Parameter: Age (day) Value: 11
  misc_feature: MA Experiment 20000480 PARAMETER Experiment Name: Zm_Drought_P Parameter: Organism Value: Zea mays
  misc_feature: MA Experiment 20000480 PARAMETER Experiment Name: Zm_Drought_P Parameter: Plant Line Value: 35A19
  misc_feature: MA Experiment 20000480 PARAMETER Experiment Name: Zm_Drought_P Parameter: Timepoint (hr) Value: 72
  misc_feature: MA Experiment 20000480 PARAMETER Experiment Name: Zm_Drought_P Parameter: Tissue Value: Aerial
  misc_feature: MA Experiment 20000480 PARAMETER Experiment Name: Zm_Drought_P Parameter: Treatment Value: Drought vs. No Drought
  misc_feature: MA Experiment ID: 20000487 Result: Up-regulated in Transcription
  misc_feature: MA Experiment 20000487 PARAMETER Experiment Name: Zm_50mM_NH4NO3_L_to_H_P Parameter: Organism Value: Zea mays
  misc_feature: MA Experiment 20000487 PARAMETER Experiment Name: Zm_50mM_NH4NO3_L_to_H_P Parameter: Timepoint (hr) Value: 4
  misc_feature: MA Experiment 20000487 PARAMETER Experiment Name: Zm_50mM_NH4NO3_L_to_H_P Parameter: Tissue Value: Leaves
  misc_feature: MA Experiment 20000487 PARAMETER Experiment Name: Zm_50mM_NH4NO3_L_to_H_P Parameter: Treatment Value: 50mM NH4NO3 vs. 100mM Mannitol
  misc_feature: MA Experiment ID: 20000535 Result: Up-regulated in Transcription
  misc_feature: MA Experiment 20000535 PARAMETER Experiment Name: Zm_Hybrid_Seed_Dev_P Parameter: DAP Value: 30 vs. 12
  misc_feature: MA Experiment 20000535 PARAMETER Experiment Name: Zm_Hybrid_Seed_Dev_P Parameter: Organism Value: Zea mays
  misc_feature: MA Experiment 20000535 PARAMETER Experiment Name: Zm_Hybrid_Seed_Dev_P Parameter: Plant Line Value: 35A19
  misc_feature: MA Experiment 20000535 PARAMETER Experiment Name: Zm_Hybrid_Seed_Dev_P Parameter: Tissue Value: Embryo vs. Unfert Floret
ctttctcgcttgctcactcgcgtcgacgactgggctaccggcgcctccacccttcggcctgggtkgttctttsgccggtcgacgagcgcacaccagggtacagtacgtattgctcgtgatttgtgtaactacggagcaagctgcatacagcacaagatagaagatgggtatccttgagaggatcaaggagattgaggccgagatggctcggactcagaaaaataaagcaacagaatatcatcttggacaactgaaggcaaaactagcaaagttgaggacacaactattagagcctccaaagggttccagcggaggtggagatggttttgaagtcacaaagtttgggcatggtcgtgttgctcttattggatttcccagtgttggaaagtcaactcttttaacgatgttgactgggacacattctgaagctgcatcatatgagttcacaacgcttacttgcattcctgg

SEQ ID NO: 19830 - protein, 101 aa, Zea mays subsp. mays
  peptide (1)..(101): Ceres Seq. ID no. 2112894
  misc_feature (1)..(100): Pfam Name: GTP1/OBG family Pfam Description: GTP1/OBG family
  misc_feature (1)..(100): Homolog of NCBI NO: 30584259 NR Description: Homo sapiens developmentally regulated GTP
  misc_feature (1)..(100): Homolog of NCBI NO: 12653443 NR Description: developmentally regulated GTP-binding protein 2
  misc_feature (1)..(100): Homolog of NCBI NO: 10946678 NR Description: developmentally regulated GTP binding protein 2
  misc_feature (1)..(100): Homolog of NCBI NO: 4557537 NR Description: developmentally regulated GTP binding protein 2
  misc_feature (1)..(100): Homolog of NCBI NO: 13877991 NR Description: putative developmentally regulated GTP-binding
  misc_feature (1)..(100): Homolog of NCBI NO: 7441590 NR Description: GTP binding protein - garden pea
  misc_feature (1)..(100): Homolog of NCBI NO: 8778457 NR Description: F1L3.17 [Arabidopsis thaliana]
  misc_feature (1)..(100): Homolog of NCBI NO: 15220113 NR Description: developmentally regulated GTP-binding protein
  misc_feature (1)..(100): Homolog of NCBI NO: 2058456 NR Description: GTP-binding protein [Arabidopsis thaliana]
  misc_feature (1)..(100): Homolog of NCBI NO: 15218561 NR Description: putative GTP-binding protein; protein id:
MGILERIKEIEAEMARTQKNKATEYHLGQLKAKLAKLRTQLLEPPKGSSGGGDGFEVTKFGHGRVALIGFPSVGKSTLLTMLTGTHSEAASYEFTTLTCIP

SEQ ID NO: 19831 - protein, 88 aa, Zea mays subsp. mays
  peptide (1)..(88): Ceres Seq. ID no. 2112895
  misc_feature (1)..(87): Pfam Name: GTP1/OBG family Pfam Description: GTP1/OBG family
  misc_feature (1)..(87): Homolog of NCBI NO: 30584259 NR Description: Homo sapiens developmentally regulated GTP
  misc_feature (1)..(87): Homolog of NCBI NO: 12653443 NR Description: developmentally regulated GTP-binding protein 2
  misc_feature (1)..(87): Homolog of NCBI NO: 10946678 NR Description: developmentally regulated GTP binding protein 2
  misc_feature (1)..(87): Homolog of NCBI NO: 4557537 NR Description: developmentally regulated GTP binding protein 2
  misc_feature (1)..(87): Homolog of NCBI NO: 13877991 NR Description: putative developmentally regulated GTP-binding
  misc_feature (1)..(87): Homolog of NCBI NO: 7441590 NR Description: GTP binding protein - garden pea
  misc_feature (1)..(87): Homolog of NCBI NO: 8778457 NR Description: F1L3.17 [Arabidopsis thaliana]
  misc_feature (1)..(87): Homolog of NCBI NO: 15220113 NR Description: developmentally regulated GTP-binding protein
  misc_feature (1)..(87): Homolog of NCBI NO: 2058456 NR Description: GTP-binding protein [Arabidopsis thaliana]
  misc_feature (1)..(87): Homolog of NCBI NO: 15218561 NR Description: putative GTP-binding protein; protein id:
MARTQKNKATEYHLGQLKAKLAKLRTQLLEPPKGSSGGGDGFEVTKFGHGRVALIGFPSVGKSTLLTMLTGTHSEAASYEFTTLTCIP

SEQ ID NO: 19832 - protein, 58 aa, Zea mays subsp. mays
  peptide (1)..(58): Ceres Seq. ID no. 2112896
  misc_feature (22)..(22): Xaa is any aa, unknown or other
  misc_feature (25)..(25): Xaa is any aa, unknown or other
LSRLLTRVDDWATGASTLRPGXFFXRSTSAHQGTVRIARDLCNYGASCIQHKIEDGYP

SEQ ID NO: 19833 - DNA, 1829 bp, Zea mays subsp. mays
  misc_feature (1)..(1829): Ceres Seq. ID no. 12435597
  misc_feature: MA Experiment ID: 108527 Result: Down-regulated in Transcription
  misc_feature: MA Experiment 108527 PARAMETER Experiment Name: Zm_5mM_NO_P Parameter: Age (day) Value: 8
  misc_feature: MA Experiment 108527 PARAMETER Experiment Name: Zm_5mM_NO_P Parameter: Organism Value: Zea mays
  misc_feature: MA Experiment 108527 PARAMETER Experiment Name: Zm_5mM_NO_P Parameter: Plant Line Value: 35A19
  misc_feature: MA Experiment 108527 PARAMETER Experiment Name: Zm_5mM_NO_P Parameter: Timepoint (hr) Value: 6
  misc_feature: MA Experiment 108527 PARAMETER Experiment Name: Zm_5mM_NO_P Parameter: Tissue Value: Aerial
  misc_feature: MA Experiment 108527 PARAMETER Experiment Name: Zm_5mM_NO_P Parameter: Treatment Value: 5mM NO vs. No Treatment
  misc_feature: MA Experiment ID: 108529 Result: Up-regulated in Transcription
  misc_feature: MA Experiment 108529 PARAMETER Experiment Name: Zm_Imbibed_Seeds_P Parameter: Age (day) Value: 5 vs. 2
  misc_feature: MA Experiment 108529 PARAMETER Experiment Name: Zm_Imbibed_Seeds_P Parameter: Organism Value: Zea mays
  misc_feature: MA Experiment 108529 PARAMETER Experiment Name: Zm_Imbibed_Seeds_P Parameter: Plant Line Value: 35A19
  misc_feature: MA Experiment 108529 PARAMETER Experiment Name: Zm_Imbibed_Seeds_P Parameter: Tissue Value: Roots vs. Embryo
  misc_feature: MA Experiment ID: 108530 Result: Up-regulated in Transcription
  misc_feature: MA Experiment 108530 PARAMETER Experiment Name: Zm_Imbibed_Seeds_P Parameter: Age (day) Value: 6 vs. 2
  misc_feature: MA Experiment 108530 PARAMETER Experiment Name: Zm_Imbibed_Seeds_P Parameter: Organism Value: Zea mays
  misc_feature: MA Experiment 108530 PARAMETER Experiment Name: Zm_Imbibed_Seeds_P Parameter: Plant Line Value: 35A19
  misc_feature: MA Experiment 108530 PARAMETER Experiment Name: Zm_Imbibed_Seeds_P Parameter: Tissue Value: Aerial vs. Embryo
  misc_feature: MA Experiment ID: 108535 Result: Down-regulated in Transcription
  misc_feature: MA Experiment 108535 PARAMETER Experiment Name: Zm_Meristem_P Parameter: Age (day) Value: 8
  misc_feature: MA Experiment 108535 PARAMETER Experiment Name: Zm_Meristem_P Parameter: Organism Value: Zea mays
  misc_feature: MA Experiment 108535 PARAMETER Experiment Name: Zm_Meristem_P Parameter: Plant Line Value: 35A19
  misc_feature: MA Experiment 108535 PARAMETER Experiment Name: Zm_Meristem_P Parameter: Tissue Value: Root Meristem vs. Above Root Meristem
  misc_feature: MA Experiment ID: 108687 Result: Down-regulated in Transcription
  misc_feature: MA Experiment 108687 PARAMETER Experiment Name: Zm_Embryos-Flowers__P Parameter: Tissue Value: Embryo vs. Aerial+
  misc_feature: MA Experiment ID: 20000477 Result: Down-regulated in Transcription
  misc_feature: MA Experiment 20000477 PARAMETER Experiment Name: Zm_5mM_SA_P Parameter: Age (day) Value: 10
  misc_feature: MA Experiment 20000477 PARAMETER Experiment Name: Zm_5mM_SA_P Parameter: Organism Value: Zea mays
  misc_feature: MA Experiment 20000477 PARAMETER Experiment Name: Zm_5mM_SA_P Parameter: Plant Line Value: 35A19
  misc_feature: MA Experiment 20000477 PARAMETER Experiment Name: Zm_5mM_SA_P Parameter: Timepoint (hr) Value: 48
  misc_feature: MA Experiment 20000477 PARAMETER Experiment Name: Zm_5mM_SA_P Parameter: Tissue Value: Aerial
  misc_feature: MA Experiment 20000477 PARAMETER Experiment Name: Zm_5mM_SA_P Parameter: Treatment Value: 5mM SA vs. No Treatment
  misc_feature: MA Experiment ID: 20000488 Result: Up-regulated in Transcription
  misc_feature: MA Experiment 20000488 PARAMETER Experiment Name: Zm_50mM_NH4NO3_L_to_H_P Parameter: Organism Value: Zea mays
  misc_feature: MA Experiment 20000488 PARAMETER Experiment Name: Zm_50mM_NH4NO3_L_to_H_P Parameter: Timepoint (hr) Value: 8
  misc_feature: MA Experiment 20000488 PARAMETER Experiment Name: Zm_50mM_NH4NO3_L_to_H_P Parameter: Tissue Value: Leaves
  misc_feature: MA Experiment 20000488 PARAMETER Experiment Name: Zm_50mM_NH4NO3_L_to_H_P Parameter: Treatment Value: 50mM NH4NO3 vs. 100mM Mannitol
  misc_feature: MA Experiment ID: 20000535 Result: Down-regulated in Transcription
  misc_feature: MA Experiment 20000535 PARAMETER Experiment Name: Zm_Hybrid_Seed_Dev_P Parameter: DAP Value: 30 vs. 12
  misc_feature: MA Experiment 20000535 PARAMETER Experiment Name: Zm_Hybrid_Seed_Dev_P Parameter: Organism Value: Zea mays
  misc_feature: MA Experiment 20000535 PARAMETER Experiment Name: Zm_Hybrid_Seed_Dev_P Parameter: Plant Line Value: 35A19
  misc_feature: MA Experiment 20000535 PARAMETER Experiment Name: Zm_Hybrid_Seed_Dev_P Parameter: Tissue Value: Embryo vs. Unfert Floret
  misc_feature: MA Experiment ID: 20001610 Result: Up-regulated in Transcription
  misc_feature: MA Experiment 20001610 PARAMETER Experiment Name: Zm_50ppm_KNO3_L-to-H_P Parameter: Age (day) Value: 19
  misc_feature: MA Experiment 20001610 PARAMETER Experiment Name: Zm_50ppm_KNO3_L-to-H_P Parameter: Organism Value: Zea mays
  misc_feature: MA Experiment 20001610 PARAMETER Experiment Name: Zm_50ppm_KNO3_L-to-H_P Parameter: Plant Line Value: 35A19
  misc_feature: MA Experiment 20001610 PARAMETER Experiment Name: Zm_50ppm_KNO3_L-to-H_P Parameter: Timepoint (hr) Value: 2
  misc_feature: MA Experiment 20001610 PARAMETER Experiment Name: Zm_50ppm_KNO3_L-to-H_P Parameter: Tissue Value: Roots
  misc_feature: MA Experiment 20001610 PARAMETER Experiment Name: Zm_50ppm_KNO3_L-to-H_P Parameter: Treatment Value: 50ppm KNO3 vs. 50ppm KCl
  misc_feature: MA Experiment ID: 20001613 Result: Up-regulated in Transcription
  misc_feature: MA Experiment 20001613 PARAMETER Experiment Name: Zm_50ppm_KNO3_L-to-H_P Parameter: Age (day) Value: 20
  misc_feature: MA Experiment 20001613 PARAMETER Experiment Name: Zm_50ppm_KNO3_L-to-H_P Parameter: Organism Value: Zea mays
  misc_feature: MA Experiment 20001613 PARAMETER Experiment Name: Zm_50ppm_KNO3_L-to-H_P Parameter: Plant Line Value: 35A19
  misc_feature: MA Experiment 20001613 PARAMETER Experiment Name: Zm_50ppm_KNO3_L-to-H_P Parameter: Timepoint (hr) Value: 24
  misc_feature: MA Experiment 20001613 PARAMETER Experiment Name: Zm_50ppm_KNO3_L-to-H_P Parameter: Tissue Value: Roots
  misc_feature: MA Experiment 20001613 PARAMETER Experiment Name: Zm_50ppm_KNO3_L-to-H_P Parameter: Treatment Value: 50ppm KNO3 vs. 50ppm KCl
  misc_feature: MA Experiment ID: 20001614 Result: Up-regulated in Transcription
  misc_feature: MA Experiment 20001614 PARAMETER Experiment Name: Zm_50ppm_KNO3_L-to-H_P Parameter: Age (day) Value: 21
  misc_feature: MA Experiment 20001614 PARAMETER Experiment Name: Zm_50ppm_KNO3_L-to-H_P Parameter: Organism Value: Zea mays
  misc_feature: MA Experiment 20001614 PARAMETER Experiment Name: Zm_50ppm_KNO3_L-to-H_P Parameter: Plant Line Value: 35A19
  misc_feature: MA Experiment 20001614 PARAMETER Experiment Name: Zm_50ppm_KNO3_L-to-H_P Parameter: Timepoint (hr) Value: 48
  misc_feature: MA Experiment 20001614 PARAMETER Experiment Name: Zm_50ppm_KNO3_L-to-H_P Parameter: Tissue Value: Roots
  misc_feature: MA Experiment 20001614 PARAMETER Experiment Name: Zm_50ppm_KNO3_L-to-H_P Parameter: Treatment Value: 50ppm KNO3 vs. 50ppm KCl
aacgtgcgggactggtctctcccgaataagttgtcacccacacagggcacagcttggagttttcctgattgcattaccctgtccaaactgttcttgccaggaacattattcctcctcgtgttccatcttctaaacaaactgcatcctgccatgattcgatgatcgacctcatgtcgctagcactgccctggccagcagaccggcacggcgatgcgatcggtgcacagagcggtggcgcgagtggtggtgtgggttgcggcgccggcgatgatccgcgcggggctgacgacgccggtgatgacggtgctgctggtgtcgttcctgctggagtacctgcccaagatctaccacgcggcgcgcctgctccggcggatgcagaggcagtctggctacatcttcggcaccatctggtggggcatcgcgctcaacctcatggcctacttcgtcgccgcccatgctgtgggcgcgtgctggtacctgctcggcgtccagcgggccagcaagtgcctgaaagagcagtgcctccaggcggctgggtgcgcgcgcggcagcgcggtggcctgcgcggcgccgctgtactacggcggctccccgtctcccggagtcgtcggcggcgacaggctcgcctgggccgggaacgcgcaggcccggggcacgtgcctcgccagcggcgacaactaccagtacggcgcgtacacgtggacggtgatgctggtggcgaacccgagccgggtggagcggatgctgctccccatcttctggggcctcatgacgctcagcacgttcggcaacctggagagcacgacggagtggctggagatcgtgttcaacatcatcaccatcacgggcgggctcgtcctcgtcaccatgctcatcggcaacatcaaggtgttcctgaacgcgaccacgtccaagaagcaggccatgcacacgcggctgcgcggcgtggagtggtggatgaagcgcaagaaactgccgcggagcttccgcggccgggtgcgccagttcgagcgccagcggtgggccgccacgcgcggcgtcgacgagtgccaaatcgtgcgcgacctccccgagggcctccgccgggacatcaagtaccacctctgcctcgacctcgtccgccaggtcccattcttccagcacatggacgacctcgtgctcgagaacatctgcgacagggtgaaatccctcatctttcccaagggagaaaccatcgtgagggagggcgacgtggtgcagcggatgctgttcatcgtgcggggccacctgcagtgcagccaggtgctgcggaacggcgcgacgagcagctgcacgctggggcctggcaacttcagcggcgacgagctgctgtcgtggtgcctgcgccgcccgttcctggaacgcctcccgacgtcgtcggcgacgctggtgacgctggagagcaccgaggtgttcggcctggacgccgccgacgtcaagtacgtcacgcagcacttccgctacaccttcaccaacgacaaggtgcgccgcagcgcgcgctactactcgcccggctggcgtacctgggcggccgtcgcccgttcagctggcctggaggaggtacaagcaccgcaagacgctctcatcgctctccttcatccgcccgcggcgcccgctgtcccgctgctcctcgctcggggaggagaagctccgcctgtacacggccatcctcacctcgcccaagcccaaccaggacgacgacttctagctagcttatagctaggccgttccaggccggattctcttctcctcagcgaggaggagtatatatatcaaacaacatgcatttattagtagtattcattactctc

SEQ ID NO: 19834 - protein, 523 aa, Zea mays subsp. mays
  peptide (1)..(523): Ceres Seq. ID no. 12435598
  misc_feature (17)..(75): Homolog of NCBI NO: 15228479 NR Description: histone-H4-like protein; protein id: At3g28780.1
MIDLMSLALPWPADRHGDAIGAQSGGASGGVGCGAGDDPRGADDAGDDGAAGVVPAGVPAQDLPRGAPAPADAEAVWLHLRHHLVGHRAQPHGLLRRRPCCGRVLVPARRPAGQQVPERAVPPGGWVRARQRGGLRGAAVLRRLPVSRSRRRRQARLGRERAGPGHVPRQRRQLPVRRVHVDGDAGGEPEPGGADAAPHLLGPHDAQHVRQPGEHDGVAGDRVQHHHHHGRARPRHHAHRQHQGVPERDHVQEAGHAHAAARRGVVDEAQETAAELPRPGAPVRAPAVGRHARRRRVPNRARPPRGPPPGHQVPPLPRPRPPGPILPAHGRPRAREHLRQGEIPHLSQGRNHREGGRRGAADAVHRAGPPAVQPGAAERRDEQLHAGAWQLQRRRAAVVVPAPPVPGTPPDVVGDAGDAGEHRGVRPGRRRRQVRHAALPLHLHQRQGAPQRALLLARLAYLGGRRPFSWPGGGTSTARRSHRSPSSARGARCPAAPRSGRRSSACTRPSSPRPSPTRTTTSS

SEQ ID NO: 19835 - protein, 519 aa, Zea mays subsp. mays
  peptide (1)..(519): Ceres Seq. ID no. 12435599
  misc_feature (13)..(71): Homolog of NCBI NO: 15228479 NR Description: histone-H4-like protein; protein id: At3g28780.1
MSLALPWPADRHGDAIGAQSGGASGGVGCGAGDDPRGADDAGDDGAAGVVPAGVPAQDLPRGAPAPADAEAVWLHLRHHLVGHRAQPHGLLRRRPCCGRVLVPARRPAGQQVPERAVPPGGWVRARQRGGLRGAAVLRRLPVSRSRRRRQARLGRERAGPGHVPRQRRQLPVRRVHVDGDAGGEPEPGGADAAPHLLGPHDAQHVRQPGEHDGVAGDRVQHHHHHGRARPRHHAHRQHQGVPERDHVQEAGHAHAAARRGVVDEAQETAAELPRPGAPVRAPAVGRHARRRRVPNRARPPRGPPPGHQVPPLPRPRPPGPILPAHGRPRAREHLRQGEIPHLSQGRNHREGGRRGAADAVHRAGPPAVQPGAAERRDEQLHAGAWQLQRRRAAVVVPAPPVPGTPPDVVGDAGDAGEHRGVRPGRRRRQVRHAALPLHLHQRQGAPQRALLLARLAYLGGRRPFSWPGGGTSTARRSHRSPSSARGARCPAAPRSGRRSSACTRPSSPRPSPTRTTTSS

SEQ ID NO: 19836 - protein, 508 aa, Zea mays subsp. mays
  peptide (1)..(508): Ceres Seq. ID no. 12435600
  misc_feature (323)..(424): Pfam Name: Cyclic nucleotide-binding domain Pfam Description: Cyclic nucleotide-binding domain
  misc_feature (10)..(447): Homolog of NCBI NO: 15226370 NR Description: cyclic nucleotide-regulated ion channel, putative
  misc_feature (38)..(447): Homolog of NCBI NO: 30688654 NR Description: cyclic nucleotide-regulated ion channel, putative
  misc_feature (10)..(447): Homolog of NCBI NO: 30682497 NR Description: cyclic nucleotide-regulated ion channel, putative
  misc_feature (10)..(447): Homolog of NCBI NO: 25412226 NR Description: hypothetical protein At2g24610 [imported] -
  misc_feature (89)..(477): Homolog of NCBI NO: 30961811 NR Description: putative cyclic nucleotide and
  misc_feature (8)..(473): Homolog of NCBI NO: 13236666 NR Description: putative cyclic nucleotide and
  misc_feature (8)..(448): Homolog of NCBI NO: 15242291 NR Description: cyclic nucleotide-regulated ion channel (CNGC2)
  misc_feature (10)..(449): Homolog of NCBI NO: 15239581 NR Description: cyclic nucleotide-regulated ion channel (CNGC4)
  misc_feature (8)..(449): Homolog of NCBI NO: 30961805 NR Description: putative cyclic nucleotide and
  misc_feature (8)..(449): Homolog of NCBI NO: 34910098 NR Description: putative cyclic nucleotide and
MRSVHRAVARVVVWVAAPAMIRAGLTTPVMTVLLVSFLLEYLPKIYHAARLLRRMQRQSGYIFGTIWWGIALNLMAYFVAAHAVGACWYLLGVQRASKCLKEQCLQAAGCARGSAVACAAPLYYGGSPSPGVVGGDRLAWAGNAQARGTCLASGDNYQYGAYTWTVMLVANPSRVERMLLPIFWGLMTLSTFGNLESTTEWLEIVFNIITITGGLVLVTMLIGNIKVFLNATTSKKQAMHTRLRGVEWWMKRKKLPRSFRGRVRQFERQRWAATRGVDECQIVRDLPEGLRRDIKYHLCLDLVRQVPFFQHMDDLVLENICDRVKSLIFPKGETIVREGDVVQRMLFIVRGHLQCSQVLRNGATSSCTLGPGNFSGDELLSWCLRRPFLERLPTSSATLVTLESTEVFGLDAADVKYVTQHFRYTFTNDKVRRSARYYSPGWRTWAAVARSAGLEEVQAPQDALIALLHPPAAPAVPLLLARGGEAPPVHGHPHLAQAQPGRRLLASL

SEQ ID NO: 19837 - DNA, 1557 bp, Zea mays subsp. mays
  misc_feature (1)..(1557): Ceres Seq. ID no. 12418577
  misc_feature: MA Experiment ID: 108528 Result: Up-regulated in Transcription
  misc_feature: MA Experiment 108528 PARAMETER Experiment Name: Zm_Imbibed_Seeds_P Parameter: Age (day) Value: 5 vs. 2
  misc_feature: MA Experiment 108528 PARAMETER Experiment Name: Zm_Imbibed_Seeds_P Parameter: Organism Value: Zea mays
  misc_feature: MA Experiment 108528 PARAMETER Experiment Name: Zm_Imbibed_Seeds_P Parameter: Plant Line Value: 35A19
  misc_feature: MA Experiment 108528 PARAMETER Experiment Name: Zm_Imbibed_Seeds_P Parameter: Tissue Value: Aerial vs. Embryo
  misc_feature: MA Experiment ID: 108530 Result: Up-regulated in Transcription
  misc_feature: MA Experiment 108530 PARAMETER Experiment Name: Zm_Imbibed_Seeds_P Parameter: Age (day) Value: 6 vs. 2
  misc_feature: MA Experiment 108530 PARAMETER Experiment Name: Zm_Imbibed_Seeds_P Parameter: Organism Value: Zea mays
  misc_feature: MA Experiment 108530 PARAMETER Experiment Name: Zm_Imbibed_Seeds_P Parameter: Plant Line Value: 35A19
  misc_feature: MA Experiment 108530 PARAMETER Experiment Name: Zm_Imbibed_Seeds_P Parameter: Tissue Value: Aerial vs. Embryo
  misc_feature: MA Experiment ID: 108543 Result: Down-regulated in Transcription
  misc_feature: MA Experiment ID: 108547 Result: Up-regulated in Transcription
  misc_feature: MA Experiment 108547 PARAMETER Experiment Name: Zm_Imbibed_Seeds_P Parameter: Age (day) Value: 4 vs. 2
  misc_feature: MA Experiment 108547 PARAMETER Experiment Name: Zm_Imbibed_Seeds_P Parameter: Organism Value: Zea mays
  misc_feature: MA Experiment 108547 PARAMETER Experiment Name: Zm_Imbibed_Seeds_P Parameter: Plant Line Value: 35A19
  misc_feature: MA Experiment 108547 PARAMETER Experiment Name: Zm_Imbibed_Seeds_P Parameter: Tissue Value: Aerial vs. Embryo
  misc_feature: MA Experiment ID: 20000479 Result: Up-regulated in Transcription
  misc_feature: MA Experiment 20000479 PARAMETER Experiment Name: Zm_Drought_P Parameter: Age (day) Value: 10
  misc_feature: MA Experiment 20000479 PARAMETER Experiment Name: Zm_Drought_P Parameter: Organism Value: Zea mays
  misc_feature: MA Experiment 20000479 PARAMETER Experiment Name: Zm_Drought_P Parameter: Plant Line Value: 35A19
  misc_feature: MA Experiment 20000479 PARAMETER Experiment Name: Zm_Drought_P Parameter: Timepoint (hr) Value: 48
  misc_feature: MA Experiment 20000479 PARAMETER Experiment Name: Zm_Drought_P Parameter: Tissue Value: Aerial
  misc_feature: MA Experiment 20000479 PARAMETER Experiment Name: Zm_Drought_P Parameter: Treatment Value: Drought vs. No Drought
gcacgagaccattacctagaacatcctaatcgaaaaatgaacaatttggcgctctcgatgctctcgccgtcgacctcaggtttcccgccaagtcccctaccctccaaggccgccacgaacgccacagctacccgatgccgcgccgcgccctcgggagacgcctcgctgtgcgccttccgcgcgcaccacagcgccggccacgccctccacactaacccgtctctgatgcccgcgctcgccgcctgcgcgcggctgccctccgccgtggccgaggccgagcagatccacgcactcctcgtcaagtcaggcggctcgcgggctgtctcccacgtccaagccttcacgtccctgattcgcgcctacgcgaggctcggccgcgtgtgcgacgcgcggaaggtgttcgatggaatggccgaccggacggtggtcacctggaacgtgctgcttgatgcgcttatcagagatggcgacttggacgctgcgtgggaggtgtttgtgaaaatgccgcagcgcaatgcggtttcttggaacaccataatttctggttttgcaaggaacgggtgggcgccggtggcagtggacttgtttatcgagatgactgtggcttatggtttagcgccagatgaggccacgatggttggcttcgtgtcggctgttcgggacattggtctacttgcaattgggaagagcgcacacgggtatgttctccgtcgggagttctcacttgatggtcctctcggggttgcactggtcagtatgtacacgaggtgcgggagcatgggtgctgcacacagttgcttcttaagtgtcaccaccaagaatgtggagcattggacctctttgatcgcaggtttcgcagcacatggtcaaccagagaatgccttgaggttgttcgtcgagatgaggcaggtgggcattgagcctaatggtgtcaccttcgtagccgtcttgagtgcctgcagccatggcgggctcgtcgatgagggcttcaagtacttcgacctaatgaggagcatgggcatcaggccgatgatccagcactatggctgcttggttgatctccttggccgtgctgggttcttgaaggaggctttcaatcttgccagcaatctacctgaagatcctggttttgtaatctggagctcgctactagcagcctgccgtagccatggcaacgtcgagatggcagagctcactgcgtcgaagttggcagaggcaaaaccaagtcatggcagctcgtatgtgctgctatcgaacacatatgcacgagcggaacaatgggaggactcgaagaggacgcggaggaggatggaggaacatagagtagccaagaaacctgggctcagctggatagagatagatggaagcgtacattcctttgccactgcagacaagctgcatatagaaagcgagggtatttatcatatgttggaggatttgaaacataatattacatcagctgcatatgaacctgaaccgttcgctatttctgaacaattgtaataaatttttctttggaggaagattatcacttgttaataaaaaatccatcatatc

SEQ ID NO: 19838 - protein, 500 aa, Zea mays subsp. mays
  peptide (1)..(500): Ceres Seq. ID no. 12418578
  misc_feature (346)..(380): Pfam Name: PPR repeat Pfam Description: PPR repeat
  misc_feature (71)..(492): Homolog of NCBI NO: 15233234 NR Description: hypothetical protein; protein id: At3g15930.1
  misc_feature (71)..(492): Homolog of NCBI NO: 9294596 NR Description: gb|AAC35225.1~gene_id:MVC8.5~strong similarity to
  misc_feature (29)..(174): Homolog of NCBI NO: 34912348 NR Description: P0518F01.9 [Oryza sativa (japonica
  misc_feature (147)..(464): Homolog of NCBI NO: 34912348 NR Description: P0518F01.9 [Oryza sativa (japonica
  misc_feature (33)..(481): Homolog of NCBI NO: 38345581 NR Description: OSJNBa0027H06.17 [Oryza sativa (japonica
  misc_feature (71)..(491): Homolog of NCBI NO: 15239745 NR Description: selenium-binding protein-like
  misc_feature (63)..(489): Homolog of NCBI NO: 34902972 NR Description: unnamed protein product [Oryza sativa (japonica
  misc_feature (64)..(492): Homolog of NCBI NO: 15239979 NR Description: selenium-binding protein-like; protein id:
  misc_feature (74)..(492): Homolog of NCBI NO: 15228829 NR Description: hypothetical protein; protein id: At3g22690.1
  misc_feature (74)..(492): Homolog of NCBI NO: 9279687 NR Description: gb|AAC35225.1~gene_id:MWI23.6~strong similarity
ARDHYLEHPNRKMNNLALSMLSPSTSGFPPSPLPSKAATNATATRCRAAPSGDASLCAFRAHHSAGHALHTNPSLMPALAACARLPSAVAEAEQIHALLVKSGGSRAVSHVQAFTSLIRAYARLGRVCDARKVFDGMADRTVVTWNVLLDALIRDGDLDAAWEVFVKMPQRNAVSWNTIISGFARNGWAPVAVDLFIEMTVAYGLAPDEATMVGFVSAVRDIGLLAIGKSAHGYVLRREFSLDGPLGVALVSMYTRCGSMGAAHSCFLSVTTKNVEHWTSLIAGFAAHGQPENALRLFVEMRQVGIEPNGVTFVAVLSACSHGGLVDEGFKYFDLMRSMGIRPMIQHYGCLVDLLGRAGFLKEAFNLASNLPEDPGFVIWSSLLAACRSHGNVEMAELTASKLAEAKPSHGSSYVLLSNTYARAEQWEDSKRTRRRMEEHRVAKKPGLSWIEIDGSVHSFATADKLHIESEGIYHMLEDLKHNITSAAYEPEPFAISEQL

SEQ ID NO: 19839 - protein, 488 aa, Zea mays subsp. mays
  peptide (1)..(488): Ceres Seq. ID no. 12418579
  misc_feature (334)..(368): Pfam Name: PPR repeat Pfam Description: PPR repeat
  misc_feature (59)..(480): Homolog of NCBI NO: 15233234 NR Description: hypothetical protein; protein id: At3g15930.1
  misc_feature (59)..(480): Homolog of NCBI NO: 9294596 NR Description: gb|AAC35225.1~gene_id:MVC8.5~strong similarity to
  misc_feature (17)..(162): Homolog of NCBI NO: 34912348 NR Description: P0518F01.9 [Oryza sativa (japonica
  misc_feature (135)..(452): Homolog of NCBI NO: 34912348 NR Description: P0518F01.9 [Oryza sativa (japonica
  misc_feature (21)..(469): Homolog of NCBI NO: 38345581 NR Description: OSJNBa0027H06.17 [Oryza sativa (japonica
  misc_feature (59)..(479): Homolog of NCBI NO: 15239745 NR Description: selenium-binding protein-like
  misc_feature (51)..(477): Homolog of NCBI NO: 34902972 NR Description: unnamed protein product [Oryza sativa (japonica
  misc_feature (52)..(480): Homolog of NCBI NO: 15239979 NR Description: selenium-binding protein-like; protein id:
  misc_feature (62)..(480): Homolog of NCBI NO: 15228829 NR Description: hypothetical protein; protein id: At3g22690.1
  misc_feature (62)..(480): Homolog of NCBI NO: 9279687 NR Description: gb|AAC35225.1~gene_id:MWI23.6~strong similarity
MNNLALSMLSPSTSGFPPSPLPSKAATNATATRCRAAPSGDASLCAFRAHHSAGHALHTNPSLMPALAACARLPSAVAEAEQIHALLVKSGGSRAVSHVQAFTSLIRAYARLGRVCDARKVFDGMADRTVVTWNVLLDALIRDGDLDAAWEVFVKMPQRNAVSWNTIISGFARNGWAPVAVDLFIEMTVAYGLAPDEATMVGFVSAVRDIGLLAIGKSAHGYVLRREFSLDGPLGVALVSMYTRCGSMGAAHSCFLSVTTKNVEHWTSLIAGFAAHGQPENALRLFVEMRQVGIEPNGVTFVAVLSACSHGGLVDEGFKYFDLMRSMGIRPMIQHYGCLVDLLGRAGFLKEAFNLASNLPEDPGFVIWSSLLAACRSHGNVEMAELTASKLAEAKPSHGSSYVLLSNTYARAEQWEDSKRTRRRMEEHRVAKKPGLSWIEIDGSVHSFATADKLHIESEGIYHMLEDLKHNITSAAYEPEPFAISEQL

SEQ ID NO: 19840 - protein, 481 aa, Zea mays subsp. mays
  peptide (1)..(481): Ceres Seq. ID no. 12418580
  misc_feature (327)..(361): Pfam Name: PPR repeat Pfam Description: PPR repeat
  misc_feature (10)..(155): Homolog of NCBI NO: 34912348 NR Description: P0518F01.9 [Oryza sativa (japonica
  misc_feature (128)..(445): Homolog of NCBI NO: 34912348 NR Description: P0518F01.9 [Oryza sativa (japonica
  misc_feature (14)..(462): Homolog of NCBI NO: 38345581 NR Description: OSJNBa0027H06.17 [Oryza sativa (japonica
  misc_feature (52)..(472): Homolog of NCBI NO: 15239745 NR Description: selenium-binding protein-like
  misc_feature (52)..(473): Homolog of NCBI NO: 15233234 NR Description: hypothetical protein; protein id: At3g15930.1
  misc_feature (52)..(473): Homolog of NCBI NO: 9294596 NR Description: gb|AAC35225.1~gene_id:MVC8.5~strong similarity to
  misc_feature (44)..(470): Homolog of NCBI NO: 34902972 NR Description: unnamed protein product [Oryza sativa (japonica
  misc_feature (45)..(473): Homolog of NCBI NO: 15239979 NR Description: selenium-binding protein-like; protein id:
  misc_feature (55)..(473): Homolog of NCBI NO: 15228829 NR Description: hypothetical protein; protein id: At3g22690.1
  misc_feature (55)..(473): Homolog of NCBI NO: 9279687 NR Description: gb|AAC35225.1~gene_id:MWI23.6~strong similarity
MLSPSTSGFPPSPLPSKAATNATATRCRAAPSGDASLCAFRAHHSAGHALHTNPSLMPALAACARLPSAVAEAEQIHALLVKSGGSRAVSHVQAFTSLIRAYARLGRVCDARKVFDGMADRTVVTWNVLLDALIRDGDLDAAWEVFVKMPQRNAVSWNTIISGFARNGWAPVAVDLFIEMTVAYGLAPDEATMVGFVSAVRDIGLLAIGKSAHGYVLRREFSLDGPLGVALVSMYTRCGSMGAAHSCFLSVTTKNVEHWTSLIAGFAAHGQPENALRLFVEMRQVGIEPNGVTFVAVLSACSHGGLVDEGFKYFDLMRSMGIRPMIQHYGCLVDLLGRAGFLKEAFNLASNLPEDPGFVIWSSLLAACRSHGNVEMAELTASKLAEAKPSHGSSYVLLSNTYARAEQWEDSKRTRRRMEEHRVAKKPGLSWIEIDGSVHSFATADKLHIESEGIYHMLEDLKHNITSAAYEPEPFAISEQL

SEQ ID NO: 19841 - DNA, 1463 bp, Zea mays subsp. mays
  misc_feature (1)..(1463): Ceres Seq. ID no. 12376728
  misc_feature: MA Experiment ID: 108522 Result: Down-regulated in Transcription
  misc_feature: MA Experiment 108522 PARAMETER Experiment Name: Zm_42deg_Heat_P Parameter: Age (day) Value: 8
  misc_feature: MA Experiment 108522 PARAMETER Experiment Name: Zm_42deg_Heat_P Parameter: Organism Value: Zea mays
  misc_feature: MA Experiment 108522 PARAMETER Experiment Name: Zm_42deg_Heat_P Parameter: Plant Line Value: 35A19
  misc_feature: MA Experiment 108522 PARAMETER Experiment Name: Zm_42deg_Heat_P Parameter: Temperature (deg C) Value: 42 vs. 22
  misc_feature: MA Experiment 108522 PARAMETER Experiment Name: Zm_42deg_Heat_P Parameter: Timepoint (hr) Value: 1
  misc_feature: MA Experiment 108522 PARAMETER Experiment Name: Zm_42deg_Heat_P Parameter: Tissue Value: Aerial
  misc_feature: MA Experiment ID: 108529 Result: Up-regulated in Transcription
  misc_feature: MA Experiment 108529 PARAMETER Experiment Name: Zm_Imbibed_Seeds_P Parameter: Age (day) Value: 5 vs. 2
  misc_feature: MA Experiment 108529 PARAMETER Experiment Name: Zm_Imbibed_Seeds_P Parameter: Organism Value: Zea mays
  misc_feature: MA Experiment 108529 PARAMETER Experiment Name: Zm_Imbibed_Seeds_P Parameter: Plant Line Value: 35A19
  misc_feature: MA Experiment 108529 PARAMETER Experiment Name: Zm_Imbibed_Seeds_P Parameter: Tissue Value: Roots vs. Embryo
  misc_feature: MA Experiment ID: 108535 Result: Down-regulated in Transcription
  misc_feature: MA Experiment 108535 PARAMETER Experiment Name: Zm_Meristem_P Parameter: Age (day) Value: 8
  misc_feature: MA Experiment 108535 PARAMETER Experiment Name: Zm_Meristem_P Parameter: Organism Value: Zea mays
  misc_feature: MA Experiment 108535 PARAMETER Experiment Name: Zm_Meristem_P Parameter: Plant Line Value: 35A19
  misc_feature: MA Experiment 108535 PARAMETER Experiment Name: Zm_Meristem_P Parameter: Tissue Value: Root Meristem vs. Above Root Meristem
  misc_feature: MA Experiment ID: 108543 Result: Up-regulated in Transcription
  misc_feature: MA Experiment ID: 108545 Result: Down-regulated in Transcription
  misc_feature: MA Experiment 108545 PARAMETER Experiment Name: Zm_Imbibed_Seeds_P Parameter: Age (day) Value: 3 vs. 2
  misc_feature: MA Experiment 108545 PARAMETER Experiment Name: Zm_Imbibed_Seeds_P Parameter: Organism Value: Zea mays
  misc_feature: MA Experiment 108545 PARAMETER Experiment Name: Zm_Imbibed_Seeds_P Parameter: Plant Line Value: 35A19
  misc_feature: MA Experiment 108545 PARAMETER Experiment Name: Zm_Imbibed_Seeds_P Parameter: Tissue Value: Aerial vs. Embryo
  misc_feature: MA Experiment ID: 108556 Result: Down-regulated in Transcription
  misc_feature: MA Experiment 108556 PARAMETER Experiment Name: Zm_Drought_P Parameter: Age (day) Value: 9
  misc_feature: MA Experiment 108556 PARAMETER Experiment Name: Zm_Drought_P Parameter: Organism Value: Zea mays
  misc_feature: MA Experiment 108556 PARAMETER Experiment Name: Zm_Drought_P Parameter: Plant Line Value: 35A19
  misc_feature: MA Experiment 108556 PARAMETER Experiment Name: Zm_Drought_P Parameter: Timepoint (hr) Value: 24
  misc_feature: MA Experiment 108556 PARAMETER Experiment Name: Zm_Drought_P Parameter: Tissue Value: Aerial
  misc_feature: MA Experiment 108556 PARAMETER Experiment Name: Zm_Drought_P Parameter: Treatment Value: Drought vs. No Drought
  misc_feature: MA Experiment ID: 108559 Result: Down-regulated in Transcription
  misc_feature: MA Experiment 108559 PARAMETER Experiment Name: Zm_5mM_NO_P Parameter: Age (day) Value: 8
  misc_feature: MA Experiment 108559 PARAMETER Experiment Name: Zm_5mM_NO_P Parameter: Organism Value: Zea mays
  misc_feature: MA Experiment 108559 PARAMETER Experiment Name: Zm_5mM_NO_P Parameter: Plant Line Value: 35A19
  misc_feature: MA Experiment 108559 PARAMETER Experiment Name: Zm_5mM_NO_P Parameter: Timepoint (hr) Value: 12
  misc_feature: MA Experiment 108559 PARAMETER Experiment Name: Zm_5mM_NO_P Parameter: Tissue Value: Aerial
  misc_feature: MA Experiment 108559 PARAMETER Experiment Name: Zm_5mM_NO_P Parameter: Treatment Value: 5mM NO vs. No Treatment
  misc_feature: MA Experiment ID: 108687 Result: Down-regulated in Transcription
  misc_feature: MA Experiment 108687 PARAMETER Experiment Name: Zm_Embryos-Flowers__P Parameter: Tissue Value: Embryo vs. Aerial+
  misc_feature: MA Experiment ID: 20000477 Result: Down-regulated in Transcription
  misc_feature: MA Experiment 20000477 PARAMETER Experiment Name: Zm_5mM_SA_P Parameter: Age (day) Value: 10
  misc_feature: MA Experiment 20000477 PARAMETER Experiment Name: Zm_5mM_SA_P Parameter: Organism Value: Zea mays
  misc_feature: MA Experiment 20000477 PARAMETER Experiment Name: Zm_5mM_SA_P Parameter: Plant Line Value: 35A19
  misc_feature: MA Experiment 20000477 PARAMETER Experiment Name: Zm_5mM_SA_P Parameter: Timepoint (hr) Value: 48
  misc_feature: MA Experiment 20000477 PARAMETER Experiment Name: Zm_5mM_SA_P Parameter: Tissue Value: Aerial
  misc_feature: MA Experiment 20000477 PARAMETER Experiment Name: Zm_5mM_SA_P Parameter: Treatment Value: 5mM SA vs. No Treatment
  misc_feature: MA Experiment ID: 20000478 Result: Down-regulated in Transcription
  misc_feature: MA Experiment 20000478 PARAMETER Experiment Name: Zm_5mM_SA_P Parameter: Age (day) Value: 11
  misc_feature: MA Experiment 20000478 PARAMETER Experiment Name: Zm_5mM_SA_P Parameter: Organism Value: Zea mays
  misc_feature: MA Experiment 20000478 PARAMETER Experiment Name: Zm_5mM_SA_P Parameter: Plant Line Value: 35A19
  misc_feature: MA Experiment 20000478 PARAMETER Experiment Name: Zm_5mM_SA_P Parameter: Timepoint (hr) Value: 72
  misc_feature: MA Experiment 20000478 PARAMETER Experiment Name: Zm_5mM_SA_P Parameter: Tissue Value: Aerial
  misc_feature: MA Experiment 20000478 PARAMETER Experiment Name: Zm_5mM_SA_P Parameter: Treatment Value: 5mM SA vs. No Treatment
  misc_feature: MA Experiment ID: 20000480 Result: Down-regulated in Transcription
  misc_feature: MA Experiment 20000480 PARAMETER Experiment Name: Zm_Drought_P Parameter: Age (day) Value: 11
  misc_feature: MA Experiment 20000480 PARAMETER Experiment Name: Zm_Drought_P Parameter: Organism Value: Zea mays
  misc_feature: MA Experiment 20000480 PARAMETER Experiment Name: Zm_Drought_P Parameter: Plant Line Value: 35A19
  misc_feature: MA Experiment 20000480 PARAMETER Experiment Name: Zm_Drought_P Parameter: Timepoint (hr) Value: 72
  misc_feature: MA Experiment 20000480 PARAMETER Experiment Name: Zm_Drought_P Parameter: Tissue Value: Aerial
  misc_feature: MA Experiment 20000480 PARAMETER Experiment Name: Zm_Drought_P Parameter: Treatment Value: Drought vs. No Drought
  misc_feature: MA Experiment ID: 20000535 Result: Down-regulated in Transcription
  misc_feature: MA Experiment 20000535 PARAMETER Experiment Name: Zm_Hybrid_Seed_Dev_P Parameter: DAP Value: 30 vs. 12
  misc_feature: MA Experiment 20000535 PARAMETER Experiment Name: Zm_Hybrid_Seed_Dev_P Parameter: Organism Value: Zea mays
  misc_feature: MA Experiment 20000535 PARAMETER Experiment Name: Zm_Hybrid_Seed_Dev_P Parameter: Plant Line Value: 35A19
  misc_feature: MA Experiment 20000535 PARAMETER Experiment Name: Zm_Hybrid_Seed_Dev_P Parameter: Tissue Value: Embryo vs. Unfert Floret
  misc_feature: MA Experiment ID: 20000626 Result: Down-regulated in Transcription
  misc_feature: MA Experiment 20000626 PARAMETER Experiment Name: Zm_Herbicide-Treatments_P Parameter: Timepoint (hr) Value: 12
  misc_feature: MA Experiment 20000626 PARAMETER Experiment Name: Zm_Herbicide-Treatments_P Parameter: Tissue Value: Aerial
  misc_feature: MA Experiment 20000626 PARAMETER Experiment Name: Zm_Herbicide-Treatments_P Parameter: Treatment Value: Roundup vs. No Treatment
gcacgagaccattacctagaacatcctaatcgaaaaaaccaaatgaatagccctgtgaatatataactgcgcccagaaaaccgtcgcaacgaccgcgtctcttgcgttctagtaggaagctagaatagcaggtagcgcctggtggccatggccacggcgtctgcagcttgtcatggcggggggatcgtgtactacaaggtccttccgatgagcatgttcctgctgctgctccgagggctcgtgcagccggtggcggccgcggcgtgctccgtggacgccatctacagcttcggcgactccatcgctgacacgggcaacctcctgcgcgagggccccgttggcttcttcgcctccatcggcagctacccgtacggccagaccctccgcaaacccacaggccgggtgctccgacggcctcctcatcatcgactacttcgcgatggcgctgaacctatcgctggtgagcccgtacctggacaagggagccgacttcgccagcggcgccaacttcgcggtggccggggccacggcgctggaccgggccgtgttgctgcagagcggcatcatggctccaccggcgagcgtgccgctcagctcccagctcgactggttcaaggcgcacctcaacgccaccgcctgcccctcgctacaagattgcgccaagaagctcgccggagcgctgttcttggtcggcgagatcggagggaacgactacaactacggcttcttacagggattcaggtcgatcgaggccatgaaggcctacgtgccacaggtcataaacgccataatggacgtcgccaaggaagtgatcgagctaggcgcgacccagatcgtgatcccggggaacttcccgatcgggtgctccccgagctacctctccctcttcgccgcgtccggcgacctcgacgaccggggctgcctcaggagctacaacgccttcgcccagcaccacaacgagcagctccaggcggccatcgacgggctgaggaaggccaacaccgacgtcaccgtcgtgtacgcggactactacggcgccttcatgcacctgctggaccatgcttcgctcctcgggttcgagcagggcgcgctcctgcaggcgtgctgcggggcgggcggcgcgtacaacttcaacatgaactcgatgtgcggcgcgccgggcacgacgacgtgcgcggacccggcgcgcaacgtcagctgggacggcatccacctcacgcagcaggcgtacagggccatcgcgctgtcccttctcatggaggggttcgcgcagccggatgacgccgtgcaagagatctggagctgctgacgtgcacccgttttggtttcattgggcctgtacctgctatcgatacgtatatatttttcctctagactagaattttgtacctgctattgatccatgtataggtgtttgcattgttcatatatataataataacgtgggaaattagaaatggttt

SEQ ID NO: 19842 - protein, 377 aa, Zea mays subsp. mays
  peptide (1)..(377): Ceres Seq. ID no. 12376729
  misc_feature (21)..(85): Homolog of NCBI NO: 25336243 NR Description: pnrotein F1K23.16 [imported] - Arabidopsis
  misc_feature (22)..(85): Homolog of NCBI NO: 30692564 NR Description: lipase, putative [Arabidopsis thaliana]
  misc_feature (21)..(85): Homolog of NCBI NO: 10764854 NR Description: F1K23.13 [Arabidopsis thaliana]
  misc_feature (25)..(85): Homolog of NCBI NO: 34903958 NR Description: OSJNBa0038J17.24 [Oryza sativa (japonica
  misc_feature (22)..(85): Homolog of NCBI NO: 12322540 NR Description: unknown protein [Arabidopsis thaliana]
  misc_feature (44)..(85): Homolog of NCBI NO: 15218728 NR Description: lipase, putative; protein id: At1g28590.1
  misc_feature (44)..(85): Homolog of NCBI NO: 10764858 NR Description: F1K23.17 [Arabidopsis thaliana]
  misc_feature (21)..(85): Homolog of NCBI NO: 15218751 NR Description: lipase, putative; protein id: At1g28640.1
  misc_feature (24)..(85): Homolog of NCBI NO: 15218753 NR Description: lipase, putative; protein id: At1g28650.1
  misc_feature (17)..(63): Homolog of NCBI NO: 15237586 NR Description: lipase -like protein; protein id: At5g03980.1
MATASAACHGGGIVYYKVLPMSMFLLLLRGLVQPVAAAACSVDAIYSFGDSIADTGNLLREGPVGFFASIGSYPYGQTLRKPTGRVLRRPPHHRLLRDGAEPIAGEPVPGQGSRLRQRRQLRGGRGHGAGPGRVAAERHHGSTGERAAQLPARLVQGAPQRHRLPLATRLRQEARRSAVLGRRDRRERLQLRLLTGIQVDRGHEGLRATGHKRHNGRRQGSDRARRDPDRDPGELPDRVLPELPLPLRRVRRPRRPGLPQELQRLRPAPQRAAPGGHRRAEEGQHRRHRRVRGLLRRLHAPAGPCFAPRVRAGRAPAGVLRGGRRVQLQHELDVRRAGHDDVRGPGAQRQLGRHPPHAAGVQGHRAVPSHGGVRAAG

SEQ ID NO: 19843 - protein, 357 aa, Zea mays subsp. mays
  peptide (1)..(357): Ceres Seq. ID no. 12376730
  misc_feature (1)..(65): Homolog of NCBI NO: 25336243 NR Description: pnrotein F1K23.16 [imported] - Arabidopsis
  misc_feature (2)..(65): Homolog of NCBI NO: 30692564 NR Description: lipase, putative [Arabidopsis thaliana]
  misc_feature (1)..(65): Homolog of NCBI NO: 10764854 NR Description: F1K23.13 [Arabidopsis thaliana]
  misc_feature (5)..(65): Homolog of NCBI NO: 34903958 NR Description: OSJNBa0038J17.24 [Oryza sativa (japonica
  misc_feature (2)..(65): Homolog of NCBI NO: 12322540 NR Description: unknown protein [Arabidopsis thaliana]
  misc_feature (24)..(65): Homolog of NCBI NO: 15218728 NR Description: lipase, putative; protein id: At1g28590.1
  misc_feature (24)..(65): Homolog of NCBI NO: 10764858 NR Description: F1K23.17 [Arabidopsis thaliana]
  misc_feature (1)..(65): Homolog of NCBI NO: 15218751 NR Description: lipase, putative; protein id: At1g28640.1
  misc_feature (4)..(65): Homolog of NCBI NO: 15218753 NR Description: lipase, putative; protein id: At1g28650.1
  misc_feature (1)..(43): Homolog of NCBI NO: 15237586 NR Description: lipase -like protein; protein id: At5g03980.1
MSMFLLLLRGLVQPVAAAACSVDAIYSFGDSIADTGNLLREGPVGFFASIGSYPYGQTLRKPTGRVLRRPPHHRLLRDGAEPIAGEPVPGQGSRLRQRRQLRGGRGHGAGPGRVAAERHHGSTGERAAQLPARLVQGAPQRHRLPLATRLRQEARRSAVLGRRDRRERLQLRLLTGIQVDRGHEGLRATGHKRHNGRRQGSDRARRDPDRDPGELPDRVLPELPLPLRRVRRPRRPGLPQELQRLRPAPQRAAPGGHRRAEEGQHRRHRRVRGLLRRLHAPAGPCFAPRVRAGRAPAGVLRGGRRVQLQHELDVRRAGHDDVRGPGAQRQLGRHPPHAAGVQGHRAVPSHGGVRAAG

SEQ ID NO: 19844 - protein, 355 aa, Zea mays subsp. mays
  peptide (1)..(355): Ceres Seq. ID no. 12376731
  misc_feature (1)..(63): Homolog of NCBI NO: 25336243 NR Description: pnrotein F1K23.16 [imported] - Arabidopsis
  misc_feature (1)..(63): Homolog of NCBI NO: 30692564 NR Description: lipase, putative [Arabidopsis thaliana]
  misc_feature (1)..(63): Homolog of NCBI NO: 10764854 NR Description: F1K23.13 [Arabidopsis thaliana]
  misc_feature (3)..(63): Homolog of NCBI NO: 34903958 NR Description: OSJNBa0038J17.24 [Oryza sativa (japonica
  misc_feature (1)..(63): Homolog of NCBI NO: 12322540 NR Description: unknown protein [Arabidopsis thaliana]
  misc_feature (22)..(63): Homolog of NCBI NO: 15218728 NR Description: lipase, putative; protein id: At1g28590.1
  misc_feature (22)..(63): Homolog of NCBI NO: 10764858 NR Description: F1K23.17 [Arabidopsis thaliana]
  misc_feature (1)..(63): Homolog of NCBI NO: 15218751 NR Description: lipase, putative; protein id: At1g28640.1
  misc_feature (2)..(63): Homolog of NCBI NO: 15218753 NR Description: lipase, putative; protein id: At1g28650.1
  misc_feature (1)..(41): Homolog of NCBI NO: 15237586 NR Description: lipase -like protein; protein id: At5g03980.1
MFLLLLRGLVQPVAAAACSVDAIYSFGDSIADTGNLLREGPVGFFASIGSYPYGQTLRKPTGRVLRRPPHHRLLRDGAEPIAGEPVPGQGSRLRQRRQLRGGRGHGAGPGRVAAERHHGSTGERAAQLPARLVQGAPQRHRLPLATRLRQEARRSAVLGRRDRRERLQLRLLTGIQVDRGHEGLRATGHKRHNGRRQGSDRARRDPDRDPGELPDRVLPELPLPLRRVRRPRRPGLPQELQRLRPAPQRAAPGGHRRAEEGQHRRHRRVRGLLRRLHAPAGPCFAPRVRAGRAPAGVLRGGRRVQLQHELDVRRAGHDDVRGPGAQRQLGRHPPHAAGVQGHRAVPSHGGVRAAG

SEQ ID NO: 19845 - protein, 289 aa, Zea mays subsp. mays
  peptide (1)..(289): Ceres Seq. ID no. 12376732
  misc_feature (1)..(271): Pfam Name: GDSL-like Lipase/Acylhydrolase Pfam Description: GDSL-like Lipase/Acylhydrolase
  misc_feature (1)..(289): Homolog of NCBI NO: 30692564 NR Description: lipase, putative [Arabidopsis thaliana]
  misc_feature (1)..(289): Homolog of NCBI NO: 10764854 NR Description: F1K23.13 [Arabidopsis thaliana]
  misc_feature (1)..(279): Homolog of NCBI NO: 34903958 NR Description: OSJNBa0038J17.24 [Oryza sativa (japonica
  misc_feature (1)..(289): Homolog of NCBI NO: 12322540 NR Description: unknown protein [Arabidopsis thaliana]
  misc_feature (1)..(289): Homolog of NCBI NO: 15218728 NR Description: lipase, putative; protein id: At1g28590.1
  misc_feature (1)..(289): Homolog of NCBI NO: 10764858 NR Description: F1K23.17 [Arabidopsis thaliana]
  misc_feature (1)..(289): Homolog of NCBI NO: 15218751 NR Description: lipase, putative; protein id: At1g28640.1
  misc_feature (1)..(289): Homolog of NCBI NO: 15218753 NR Description: lipase, putative; protein id: At1g28650.1
  misc_feature (1)..(279): Homolog of NCBI NO: 34903978 NR Description: unnamed protein product [Oryza sativa (japonica
  misc_feature (23)..(265): Homolog of NCBI NO: 15237586 NR Description: lipase -like protein; protein id: At5g03980.1
MALNLSLVSPYLDKGADFASGANFAVAGATALDRAVLLQSGIMAPPASVPLSSQLDWFKAHLNATACPSLQDCAKKLAGALFLVGEIGGNDYNYGFLQGFRSIEAMKAYVPQVINAIMDVAKEVIELGATQIVIPGNFPIGCSPSYLSLFAASGDLDDRGCLRSYNAFAQHHNEQLQAAIDGLRKANTDVTVVYADYYGAFMHLLDHASLLGFEQGALLQACCGAGGAYNFNMNSMCGAPGTTTCADPARNVSWDGIHLTQQAYRAIALSLLMEGFAQPDDAVQEIWSC

SEQ ID NO: 19846 - DNA, 492 bp, Zea mays subsp. mays
  misc_feature (1)..(492): Ceres Seq. ID no. 13568253
  misc_feature: MA Experiment ID: 108504 Result: Up-regulated in Transcription
  misc_feature: MA Experiment 108504 PARAMETER Experiment Name: Zm_Drought_P Parameter: Age (day) Value: 8
  misc_feature: MA Experiment 108504 PARAMETER Experiment Name: Zm_Drought_P Parameter: Organism Value: Zea mays
  misc_feature: MA Experiment 108504 PARAMETER Experiment Name: Zm_Drought_P Parameter: Plant Line Value: 35A19
  misc_feature: MA Experiment 108504 PARAMETER Experiment Name: Zm_Drought_P Parameter: Timepoint (hr) Value: 12
  misc_feature: MA Experiment 108504 PARAMETER Experiment Name: Zm_Drought_P Parameter: Tissue Value: Aerial
  misc_feature: MA Experiment 108504 PARAMETER Experiment Name: Zm_Drought_P Parameter: Treatment Value: Drought vs. No Drought
  misc_feature: MA Experiment ID: 108522 Result: Up-regulated in Transcription
  misc_feature: MA Experiment 108522 PARAMETER Experiment Name: Zm_42deg_Heat_P Parameter: Age (day) Value: 8
  misc_feature: MA Experiment 108522 PARAMETER Experiment Name: Zm_42deg_Heat_P Parameter: Organism Value: Zea mays
  misc_feature: MA Experiment 108522 PARAMETER Experiment Name: Zm_42deg_Heat_P Parameter: Plant Line Value: 35A19
  misc_feature: MA Experiment 108522 PARAMETER Experiment Name: Zm_42deg_Heat_P Parameter: Temperature (deg C) Value: 42 vs. 22
  misc_feature: MA Experiment 108522 PARAMETER Experiment Name: Zm_42deg_Heat_P Parameter: Timepoint (hr) Value: 1
  misc_feature: MA Experiment 108522 PARAMETER Experiment Name: Zm_42deg_Heat_P Parameter: Tissue Value: Aerial
  misc_feature: MA Experiment ID: 108523 Result: Up-regulated in Transcription
  misc_feature: MA Experiment 108523 PARAMETER Experiment Name: Zm_42deg_Heat_P Parameter: Age (day) Value: 8
  misc_feature: MA Experiment 108523 PARAMETER Experiment Name: Zm_42deg_Heat_P Parameter: Organism Value: Zea mays
  misc_feature: MA Experiment 108523 PARAMETER Experiment Name: Zm_42deg_Heat_P Parameter: Plant Line Value: 35A19
  misc_feature: MA Experiment 108523 PARAMETER Experiment Name: Zm_42deg_Heat_P Parameter: Temperature (deg C) Value: 42 vs. 22
  misc_feature: MA Experiment 108523 PARAMETER Experiment Name: Zm_42deg_Heat_P Parameter: Timepoint (hr) Value: 6
  misc_feature: MA Experiment 108523 PARAMETER Experiment Name: Zm_42deg_Heat_P Parameter: Tissue Value: Aerial
  misc_feature: MA Experiment ID: 108556 Result: Up-regulated in Transcription
  misc_feature: MA Experiment 108556 PARAMETER Experiment Name: Zm_Drought_P Parameter: Age (day) Value: 9
  misc_feature: MA Experiment 108556 PARAMETER Experiment Name: Zm_Drought_P Parameter: Organism Value: Zea mays
  misc_feature: MA Experiment 108556 PARAMETER Experiment Name: Zm_Drought_P Parameter: Plant Line Value: 35A19
  misc_feature: MA Experiment 108556 PARAMETER Experiment Name: Zm_Drought_P Parameter: Timepoint (hr) Value: 24
  misc_feature: MA Experiment 108556 PARAMETER Experiment Name: Zm_Drought_P Parameter: Tissue Value: Aerial
  misc_feature: MA Experiment 108556 PARAMETER Experiment Name: Zm_Drought_P Parameter: Treatment Value: Drought vs. No Drought
  misc_feature: MA Experiment ID: 108597 Result: Up-regulated in Transcription
  misc_feature: MA Experiment 108597 PARAMETER Experiment Name: Zm_100uM_ABA_P Parameter: Age (day) Value: 9
  misc_feature: MA Experiment 108597 PARAMETER Experiment Name: Zm_100uM_ABA_P Parameter: Organism Value: Zea mays
  misc_feature: MA Experiment 108597 PARAMETER Experiment Name: Zm_100uM_ABA_P Parameter: Plant Line Value: 35A19
  misc_feature: MA Experiment 108597 PARAMETER Experiment Name: Zm_100uM_ABA_P Parameter: Timepoint (hr) Value: 24
  misc_feature: MA Experiment 108597 PARAMETER Experiment Name: Zm_100uM_ABA_P Parameter: Tissue Value: Aerial
  misc_feature: MA Experiment 108597 PARAMETER Experiment Name: Zm_100uM_ABA_P Parameter: Treatment Value: 100uM ABA vs. No Treatment
  misc_feature: MA Experiment ID: 108689 Result: Up-regulated in Transcription
  misc_feature: MA Experiment 108689 PARAMETER Experiment Name: Zm_Drought_Roots_P Parameter: Age (day) Value: 9
  misc_feature: MA Experiment 108689 PARAMETER Experiment Name: Zm_Drought_Roots_P Parameter: Organism Value: Zea mays
  misc_feature: MA Experiment 108689 PARAMETER Experiment Name: Zm_Drought_Roots_P Parameter: Plant Line Value: 35A19
  misc_feature: MA Experiment 108689 PARAMETER Experiment Name: Zm_Drought_Roots_P Parameter: Timepoint (hr) Value: 24
  misc_feature: MA Experiment 108689 PARAMETER Experiment Name: Zm_Drought_Roots_P Parameter: Tissue Value: Roots
  misc_feature: MA Experiment 108689 PARAMETER Experiment Name: Zm_Drought_Roots_P Parameter: Treatment Value: Drought vs. No Drought
  misc_feature: MA Experiment ID: 20000478 Result: Up-regulated in Transcription
  misc_feature: MA Experiment 20000478 PARAMETER Experiment Name: Zm_5mM_SA_P Parameter: Age (day) Value: 11
  misc_feature: MA Experiment 20000478 PARAMETER Experiment Name: Zm_5mM_SA_P Parameter: Organism Value: Zea mays
  misc_feature: MA Experiment 20000478 PARAMETER Experiment Name: Zm_5mM_SA_P Parameter: Plant Line Value: 35A19
  misc_feature: MA Experiment 20000478 PARAMETER Experiment Name: Zm_5mM_SA_P Parameter: Timepoint (hr) Value: 72
  misc_feature: MA Experiment 20000478 PARAMETER Experiment Name: Zm_5mM_SA_P Parameter: Tissue Value: Aerial
  misc_feature: MA Experiment 20000478 PARAMETER Experiment Name: Zm_5mM_SA_P Parameter: Treatment Value: 5mM SA vs. No Treatment
  misc_feature: MA Experiment ID: 20000479 Result: Up-regulated in Transcription
  misc_feature: MA Experiment 20000479 PARAMETER Experiment Name: Zm_Drought_P Parameter: Age (day) Value: 10
  misc_feature: MA Experiment 20000479 PARAMETER Experiment Name: Zm_Drought_P Parameter: Organism Value: Zea mays
  misc_feature: MA Experiment 20000479 PARAMETER Experiment Name: Zm_Drought_P Parameter: Plant Line Value: 35A19
  misc_feature: MA Experiment 20000479 PARAMETER Experiment Name: Zm_Drought_P Parameter: Timepoint (hr) Value: 48
  misc_feature: MA Experiment 20000479 PARAMETER Experiment Name: Zm_Drought_P Parameter: Tissue Value: Aerial
  misc_feature: MA Experiment 20000479 PARAMETER Experiment Name: Zm_Drought_P Parameter: Treatment Value: Drought vs. No Drought
  misc_feature: MA Experiment ID: 20000480 Result: Up-regulated in Transcription
  misc_feature: MA Experiment 20000480 PARAMETER Experiment Name: Zm_Drought_P Parameter: Age (day) Value: 11
  misc_feature: MA Experiment 20000480 PARAMETER Experiment Name: Zm_Drought_P Parameter: Organism Value: Zea mays
  misc_feature: MA Experiment 20000480 PARAMETER Experiment Name: Zm_Drought_P Parameter: Plant Line Value: 35A19
  misc_feature: MA Experiment 20000480 PARAMETER Experiment Name: Zm_Drought_P Parameter: Timepoint (hr) Value: 72
  misc_feature: MA Experiment 20000480 PARAMETER Experiment Name: Zm_Drought_P Parameter: Tissue Value: Aerial
  misc_feature: MA Experiment 20000480 PARAMETER Experiment Name: Zm_Drought_P Parameter: Treatment Value: Drought vs. No Drought
  misc_feature: MA Experiment ID: 20000535 Result: Up-regulated in Transcription
  misc_feature: MA Experiment 20000535 PARAMETER Experiment Name: Zm_Hybrid_Seed_Dev_P Parameter: DAP Value: 30 vs. 12
  misc_feature: MA Experiment 20000535 PARAMETER Experiment Name: Zm_Hybrid_Seed_Dev_P Parameter: Organism Value: Zea mays
  misc_feature: MA Experiment 20000535 PARAMETER Experiment Name: Zm_Hybrid_Seed_Dev_P Parameter: Plant Line Value: 35A19
  misc_feature: MA Experiment 20000535 PARAMETER Experiment Name: Zm_Hybrid_Seed_Dev_P Parameter: Tissue Value: Embryo vs. Unfert Floret
ccggttttgtttgacgatagttgagtagacccctggcaatccacccttgcacggttcttttaggttttttgttcgtcatttgcagctgccattctgcctaaattgtttaagcgaacctcctccggggctctctttgttgaagttcgccacggtggcccatgtcagtgtgatgtaaggttggagttggagctgcaatgacataaaacatagaagccttgatgcatgattgaatacgaaaacaatgagcaggcgcaacagccgtaccatctatgtaggcaatctccctggggacatccgtgagagggaggttgaggatctcttctacaagtatggccgtattttggatattgacttgaaaatacctccgagacctcctggatacgcattcgttgagtttgaggatccacgtgatgctgatgatgcaatttatggccgtgatgggtataactttgatggctacaggttgagggttgaattagctcatggtggcag

SEQ ID NO: 19847 - protein, 83 aa, Zea mays subsp. mays
  peptide (1)..(83): Ceres Seq. ID no. 13568254
  misc_feature (9)..(77): Pfam Name: RNA recognition motif. (a.k.a. RRM, RBD, or RNP domain) Pfam Description: RNA recognition motif. (a.k.a. RRM, RBD, or RNP
  misc_feature (1)..(82): Homolog of NCBI NO: 2129717 NR Description: splicing factor SF-2 homolog - Arabidopsis
  misc_feature (1)..(82): Homolog of NCBI NO: 30679143 NR Description: arginine/serine-rich splicing factor (atSRp34),
  misc_feature (1)..(82): Homolog of NCBI NO: 30679138 NR Description: arginine/serine-rich splicing factor (atSRp34),
  misc_feature (1)..(82): Homolog of NCBI NO: 7484802 NR Description: alternative splicing factor ASF-2 homolog
  misc_feature (1)..(82): Homolog of NCBI NO: 25386570 NR Description: hypothetical protein [imported] - Arabidopsis
  misc_feature (1)..(82): Homolog of NCBI NO: 22329428 NR Description: arginine/serine-rich splicing factor, atSRp30
  misc_feature (1)..(82): Homolog of NCBI NO: 4775271 NR Description: SF2/ASF-like splicing modulator Srp30, variant 1
  misc_feature (1)..(82): Homolog of NCBI NO: 4775270 NR Description: SF2/ASF-like splicing modulator Srp30
  misc_feature (1)..(82): Homolog of NCBI NO: 33146854 NR Description: putative pre-mRNA splicing factor SF2
  misc_feature (1)..(82): Homolog of NCBI NO: 34894608 NR Description: putative pre-mRNA splicing factor SF2
MSRRNSRTIYVGNLPGDIREREVEDLFYKYGRILDIDLKIPPRPPGYAFVEFEDPRDADDAIYGRDGYNFDGYRLRVELAHGG

SEQ ID NO: 19848 - DNA, 1006 bp, Zea mays subsp. mays; identical to SEQ ID NO: 4226
  misc_feature (1)..(1006): Ceres Seq. ID no. 13495435
  misc_feature: MA Experiment ID: 20000477 Result: Down-regulated in Transcription
  misc_feature: MA Experiment 20000477 PARAMETER Experiment Name: Zm_5mM_SA_P Parameter: Age (day) Value: 10
  misc_feature: MA Experiment 20000477 PARAMETER Experiment Name: Zm_5mM_SA_P Parameter: Organism Value: Zea mays
  misc_feature: MA Experiment 20000477 PARAMETER Experiment Name: Zm_5mM_SA_P Parameter: Plant Line Value: 35A19
  misc_feature: MA Experiment 20000477 PARAMETER Experiment Name: Zm_5mM_SA_P Parameter: Timepoint (hr) Value: 48
  misc_feature: MA Experiment 20000477 PARAMETER Experiment Name: Zm_5mM_SA_P Parameter: Tissue Value: Aerial
  misc_feature: MA Experiment 20000477 PARAMETER Experiment Name: Zm_5mM_SA_P Parameter: Treatment Value: 5mM SA vs. No Treatment
  misc_feature: MA Experiment ID: 20000478 Result: Down-regulated in Transcription
  misc_feature: MA Experiment 20000478 PARAMETER Experiment Name: Zm_5mM_SA_P Parameter: Age (day) Value: 11
  misc_feature: MA Experiment 20000478 PARAMETER Experiment Name: Zm_5mM_SA_P Parameter: Organism Value: Zea mays
  misc_feature: MA Experiment 20000478 PARAMETER Experiment Name: Zm_5mM_SA_P Parameter: Plant Line Value: 35A19
  misc_feature: MA Experiment 20000478 PARAMETER Experiment Name: Zm_5mM_SA_P Parameter: Timepoint (hr) Value: 72
  misc_feature: MA Experiment 20000478 PARAMETER Experiment Name: Zm_5mM_SA_P Parameter: Tissue Value: Aerial
  misc_feature: MA Experiment 20000478 PARAMETER Experiment Name: Zm_5mM_SA_P Parameter: Treatment Value: 5mM SA vs. No Treatment
  misc_feature: MA Experiment ID: 20000479 Result: Down-regulated in Transcription
  misc_feature: MA Experiment 20000479 PARAMETER Experiment Name: Zm_Drought_P Parameter: Age (day) Value: 10
  misc_feature: MA Experiment 20000479 PARAMETER Experiment Name: Zm_Drought_P Parameter: Organism Value: Zea mays
  misc_feature: MA Experiment 20000479 PARAMETER Experiment Name: Zm_Drought_P Parameter: Plant Line Value: 35A19
  misc_feature: MA Experiment 20000479 PARAMETER Experiment Name: Zm_Drought_P Parameter: Timepoint (hr) Value: 48
  misc_feature: MA Experiment 20000479 PARAMETER Experiment Name: Zm_Drought_P Parameter: Tissue Value: Aerial
  misc_feature: MA Experiment 20000479 PARAMETER Experiment Name: Zm_Drought_P Parameter: Treatment Value: Drought vs. No Drought

SEQ ID NO: 19849 - protein, 200 aa, Zea mays subsp. mays; identical to SEQ ID NO: 4227
  peptide (1)..(200): Ceres Seq. ID no. 13495436
  misc_feature (4)..(117): Pfam Name: SART-1 family Pfam Description: SART-1 family
  misc_feature (4)..(117): Pfam Name: SART-1 family Pfam Description: SART-1 family
  misc_feature (22)..(194): Homolog of NCBI NO: 7513213 NR Description: nucleic acid binding protein - human (fragment)
  misc_feature (30)..(194): Homolog of NCBI NO: 34856367 NR Description: similar to putative nucleic acid binding protein
  misc_feature (3)..(113): Homolog of NCBI NO: 23508822 NR Description: eukaryotic translation initiation factor 3
  misc_feature (3)..(117): Homolog of NCBI NO: 23510137 NR Description: Plasmodium falciparum protein kinase, putative
  misc_feature (8)..(198): Homolog of NCBI NO: 40738944 NR Description: hypothetical protein AN6605.2 [Aspergillus
  misc_feature (3)..(161): Homolog of NCBI NO: 23479655 NR Description: eukaryotic translation initiation factor 3
  misc_feature (3)..(161): Homolog of NCBI NO: 23482058 NR Description: hypothetical protein [Plasmodium yoelii yoelii]
  misc_feature (1)..(196): Homolog of NCBI NO: 23478750 NR Description: cyclophilin-RNA interacting protein [Plasmodium
  misc_feature (3)..(200): Homolog of NCBI NO: 21592725 NR Description: unknown [Arabidopsis thaliana]
  misc_feature (3)..(200): Homolog of NCBI NO: 18423973 NR Description: expressed protein [Arabidopsis thaliana]
  misc_feature (22)..(194): Homolog of NCBI NO: 7513213 NR Description: nucleic acid binding protein - human (fragment)
  misc_feature (30)..(194): Homolog of NCBI NO: 34856367 NR Description: similar to putative nucleic acid binding protein
  misc_feature (3)..(113): Homolog of NCBI NO: 23508822 NR Description: eukaryotic translation initiation factor 3
  misc_feature (3)..(117): Homolog of NCBI NO: 23510137 NR Description: Plasmodium falciparum protein kinase, putative
  misc_feature (8)..(198): Homolog of NCBI NO: 40738944 NR Description: hypothetical protein AN6605.2 [Aspergillus
  misc_feature (3)..(161): Homolog of NCBI NO: 23479655 NR Description: eukaryotic translation initiation factor 3
  misc_feature (3)..(161): Homolog of NCBI NO: 23482058 NR Description: hypothetical protein [Plasmodium yoelii yoelii]
  misc_feature (1)..(196): Homolog of NCBI NO: 23478750 NR Description: cyclophilin-RNA interacting protein [Plasmodium
  misc_feature (3)..(200): Homolog of NCBI NO: 21592725 NR Description: unknown [Arabidopsis thaliana]
  misc_feature (3)..(200): Homolog of NCBI NO: 18423973 NR Description: expressed protein [Arabidopsis thaliana]

SEQ ID NO: 19850 - DNA, 472 bp, Zea mays subsp. mays
  misc_feature (1)..(472): Ceres Seq. ID no. 13568255
  misc_feature: MA Experiment ID: 108543 Result: Up-regulated in Transcription
  misc_feature: MA Experiment ID: 20000627 Result: Up-regulated in Transcription
  misc_feature: MA Experiment 20000627 PARAMETER Experiment Name: Zm_Herbicide-Treatments_P Parameter: Timepoint (hr) Value: 12
  misc_feature: MA Experiment 20000627 PARAMETER Experiment Name: Zm_Herbicide-Treatments_P Parameter: Tissue Value: Aerial
  misc_feature: MA Experiment 20000627 PARAMETER Experiment Name: Zm_Herbicide-Treatments_P Parameter: Treatment Value: Finale vs. No Treatment
caaagaggggagacccgtttatattgaaaggcttggaaaggttgaccctaggcaaacttatgaatgtyacaacsaatkggrwycgatatgtgcgataccatgtgaaggagtttgagaggagcttcttgattaaatttccagcttgctctgttgctgcaaaaaggcacattgattccagcacaacaattctggatgtccagggcgtgggtttgaaaaatttcagcaaaactgcacgtgaattaattcagcgactgcagaaaattgacaatgataactacccagagactctataccaaatgtttattgtcaatgctggtccgggtttccggctactatggaacactgtgaagtcctttcttgatcccaaaactaccgccaagatacatgttcttgggaacaaataccaaagtaagctgcttgaaataattgacgccagtgaattgccggaattccttggtggcacttgtacctg

SEQ ID NO: 19851 - protein, 156 aa, Zea mays subsp. mays
  peptide (1)..(156): Ceres Seq. ID no. 13568256
  misc_feature (1)..(155): Pfam Name: CRAL/TRIO domain Pfam Description: CRAL/TRIO domain
  misc_feature (1)..(155): Homolog of NCBI NO: 18420392 NR Description: SEC14 - like protein [Arabidopsis thaliana]
  misc_feature (1)..(155): Homolog of NCBI NO: 14335006 NR Description: AT4g39170/T22F8_70 [Arabidopsis thaliana]
  misc_feature (1)..(155): Homolog of NCBI NO: 14486705 NR Description: phosphatidylinositol transfer-like protein III
  misc_feature (1)..(155): Homolog of NCBI NO: 25518427 NR Description: hypothetical protein F14P1.2 [imported] -
  misc_feature (1)..(155): Homolog of NCBI NO: 18394768 NR Description: sec14 cytosolic factor -related [Arabidopsis
  misc_feature (1)..(155): Homolog of NCBI NO: 15810425 NR Description: putative sec14 cytosolic factor [Arabidopsis
  misc_feature (1)..(155): Homolog of NCBI NO: 38707281 NR Description: can of worms 1 protein [Arabidopsis thaliana]
  misc_feature (1)..(155): Homolog of NCBI NO: 15236152 NR Description: hypothetical protein [Arabidopsis thaliana]
  misc_feature (1)..(155): Homolog of NCBI NO: 15234966 NR Description: SEC14 - like protein [Arabidopsis thaliana]
  misc_feature (1)..(155): Homolog of NCBI NO: 15224125 NR Description: phosphatidylinositol/phophatidylcholine transfer
  misc_feature (22)..(22): Xaa is any aa, unknown or other
  misc_feature (24)..(24): Xaa is any aa, unknown or other
  misc_feature (26)..(26): Xaa is any aa, unknown or other
  misc_feature (27)..(27): Xaa is any aa, unknown or other
KRGDPFILKGLERLTLGKLMNXTXNXXRYVRYHVKEFERSFLIKFPACSVAAKRHIDSSTTILDVQGVGLKNFSKTARELIQRLQKIDNDNYPETLYQMFIVNAGPGFRLLWNTVKSFLDPKTTAKIHVLGNKYQSKLLEIIDASELPEFLGGTCT

SEQ ID NO: 19852 - protein, 137 aa, Zea mays subsp. mays
  peptide (1)..(137): Ceres Seq. ID no. 13568257
  misc_feature (1)..(136): Pfam Name: CRAL/TRIO domain Pfam Description: CRAL/TRIO domain
  misc_feature (1)..(136): Homolog of NCBI NO: 18420392 NR Description: SEC14 - like protein [Arabidopsis thaliana]
  misc_feature (1)..(136): Homolog of NCBI NO: 14335006 NR Description: AT4g39170/T22F8_70 [Arabidopsis thaliana]
  misc_feature (1)..(136): Homolog of NCBI NO: 14486705 NR Description: phosphatidylinositol transfer-like protein III
  misc_feature (1)..(136): Homolog of NCBI NO: 18394768 NR Description: sec14 cytosolic factor -related [Arabidopsis
  misc_feature (1)..(136): Homolog of NCBI NO: 25518427 NR Description: hypothetical protein F14P1.2 [imported] -
  misc_feature (1)..(136): Homolog of NCBI NO: 15810425 NR Description: putative sec14 cytosolic factor [Arabidopsis
  misc_feature (1)..(136): Homolog of NCBI NO: 38707281 NR Description: can of worms 1 protein [Arabidopsis thaliana]
  misc_feature (1)..(136): Homolog of NCBI NO: 15236152 NR Description: hypothetical protein [Arabidopsis thaliana]
  misc_feature (1)..(136): Homolog of NCBI NO: 15234966 NR Description: SEC14 - like protein [Arabidopsis thaliana]
  misc_feature (1)..(136): Homolog of NCBI NO: 15224125 NR Description: phosphatidylinositol/phophatidylcholine transfer
  misc_feature (3)..(3): Xaa is any aa, unknown or other
  misc_feature (5)..(5): Xaa is any aa, unknown or other
  misc_feature (7)..(7): Xaa is any aa, unknown or other
  misc_feature (8)..(8): Xaa is any aa, unknown or other
MNXTXNXXRYVRYHVKEFERSFLIKFPACSVAAKRHIDSSTTILDVQGVGLKNFSKTARELIQRLQKIDNDNYPETLYQMFIVNAGPGFRLLWNTVKSFLDPKTTAKIHVLGNKYQSKLLEIIDASELPEFLGGTCT

SEQ ID NO: 19853 - DNA, 1604 bp, Zea mays subsp. mays
  misc_feature (1)..(1604): Ceres Seq. ID no. 12381743
  misc_feature: MA Experiment ID: 108522 Result: Down-regulated in Transcription
  misc_feature: MA Experiment 108522 PARAMETER Experiment Name: Zm_42deg_Heat_P Parameter: Age (day) Value: 8
  misc_feature: MA Experiment 108522 PARAMETER Experiment Name: Zm_42deg_Heat_P Parameter: Organism Value: Zea mays
  misc_feature: MA Experiment 108522 PARAMETER Experiment Name: Zm_42deg_Heat_P Parameter: Plant Line Value: 35A19
  misc_feature: MA Experiment 108522 PARAMETER Experiment Name: Zm_42deg_Heat_P Parameter: Temperature (deg C) Value: 42 vs. 22
  misc_feature: MA Experiment 108522 PARAMETER Experiment Name: Zm_42deg_Heat_P Parameter: Timepoint (hr) Value: 1
  misc_feature: MA Experiment 108522 PARAMETER Experiment Name: Zm_42deg_Heat_P Parameter: Tissue Value: Aerial
  misc_feature: MA Experiment ID: 108687 Result: Up-regulated in Transcription
  misc_feature: MA Experiment 108687 PARAMETER Experiment Name: Zm_Embryos-Flowers__P Parameter: Tissue Value: Embryo vs. Aerial+
  misc_feature: MA Experiment ID: 20000535 Result: Up-regulated in Transcription
  misc_feature: MA Experiment 20000535 PARAMETER Experiment Name: Zm_Hybrid_Seed_Dev_P Parameter: DAP Value: 30 vs. 12
  misc_feature: MA Experiment 20000535 PARAMETER Experiment Name: Zm_Hybrid_Seed_Dev_P Parameter: Organism Value: Zea mays
  misc_feature: MA Experiment 20000535 PARAMETER Experiment Name: Zm_Hybrid_Seed_Dev_P Parameter: Plant Line Value: 35A19
  misc_feature: MA Experiment 20000535 PARAMETER Experiment Name: Zm_Hybrid_Seed_Dev_P Parameter: Tissue Value: Embryo vs. Unfert Floret
gcacgagaccattacctagaacatcctaatcgaaaaatcaggctttgacacctgttagagcgcggacccgaaatcggattctaattgagctctgagcagcggtgtcctgagtccgtgaccgtgttctctcccccgcgcttcccttcaacgccgcctccctaaagatccgccgcttctctgccctctgctcgtcgattcggcgcctcctctccttcacgcgccccacgctgccgtcgcctcctcctcactgtcgtccatgccgctgtagccgcctacggccatggccgctggagccagcgactatttgacggtggagtaccactccagagagctcccctctttcctctccgacgacgagggagccaccgccggcagcggcgtcctcgtatgcagaacagcagaggacgctcgctcgctctgcgcgcatcgaaccaaaaaccacacctcggcggcagctatataaaagccttcacctgacccgggcgctagggtttattcgctcctcccacccgccgccgtcgccgcctcctctccccagcacccggagctcgctcgaccgccgctcaccatgatcatccccaagaagaaccgcaatgagatctgcaagtacctcttcaagggcttcacacagcaagcattgtaatgagcatcttccgatgggaagctattcaaagcttgatacaatagtgaacttaccttttgcgttgagtggaacagcaagctcacaggaaccaacaggcagcctgagcttctcctttagagctttcacgtcagatgcagccttgcaacatctctcgaccaaccagccacacgagtacagggaagcttaacagcaacaacatcgaagtgtgtcgctcttgaaaaactaggatctggaagcgaagggcaagatgcgggcgtgttgtatgccaagaaggactacaacctggcgaagcatccgcagatcgatgtgcccaacctccaggactccaggtgatcaagctcatgcagagctttaagtccaaggagtatgttagggagaccttctcctggcagtactactactggtacctcaccaacgatggcattgagcacctacgcaactacctgaacctccggtctgagatcgtgcctgccacgctcaagaagtctgccaggccaccgggccgcccatttggctctggccctcctggtgaccgcccaaggtctgcagccaatgaaaaaggttacatttgtgtccaaggtgaagcatggcgaatactacatcgaagccacatggcctttgggtacggctattgaggccgtgtcaccgacaaagcagatcggaaactaatgggccgctgctcgcactgaactgaactctggatttagcgcatgttatcatggttgcagttagcgctcctgacctataatatttgactctcaaataatttctgtactgctgctcggcagcgtgcatgcaaactgagcattttcgagtcagcctctgcgtctgtgtgcgggctaattcaactatgaaattcattcgaatttctttccactttcactttggtatcttcagtgcttacaggaatatgtaaacgtttgatgctttgctttaattctgtgaagctacatattcagcc

SEQ ID NO: 19854 - protein, 97 aa, Zea mays subsp. mays
  peptide (1)..(97): Ceres Seq. ID no. 12381744
  misc_feature (1)..(52): Pfam Name: Plectin/S10 domain Pfam Description: Plectin/S10 domain
  misc_feature (1)..(62): Homolog of NCBI NO: 28200289 NR Description: ribosomal protein S10 [Branchiostoma belcheri
  misc_feature (1)..(62): Homolog of NCBI NO: 24266976 NR Description: ribosomal protein S10 [Branchiostoma belcheri]
  misc_feature (1)..(73): Homolog of NCBI NO: 40642980 NR Description: ribosomal protein S10 [Crassostrea gigas]
  misc_feature (1)..(74): Homolog of NCBI NO: 15238099 NR Description: putative protein
  misc_feature (1)..(74): Homolog of NCBI NO: 34905824 NR Description: putative ribosomal protein S10
  misc_feature (1)..(74): Homolog of NCBI NO: 20140213 NR Description: 40S ribosomal protein S10
  misc_feature (1)..(74): Homolog of NCBI NO: 15235985 NR Description: putative ribosomal protein S10
  misc_feature (1)..(74): Homolog of NCBI NO: 34897532 NR Description: OSJNBa0042L16.3 [Oryza sativa (japonica
  misc_feature (1)..(74): Homolog of NCBI NO: 20139798 NR Description: 40S ribosomal protein S10-3
  misc_feature (1)..(74): Homolog of NCBI NO: 15237217 NR Description: putative protein
MQSFKSKEYVRETFSWQYYYWYLTNDGIEHLRNYLNLRSEIVPATLKKSARPPGRPFGSGPPGDRPRSAANEKGYICVQGEAWRILHRSHMAFGYGY

SEQ ID NO: 19855 - protein, 78 aa, Zea mays subsp. mays
  peptide (1)..(78): Ceres Seq. ID no. 12381745
MRSASTSSRASHSKHCNEHLPMGSYSKLDTIVNLPFALSGTASSQEPTGSLSFSFRAFTSDAALQHLSTNQPHEYREA

SEQ ID NO: 19856 - protein, 60 aa, Zea mays subsp. mays
  peptide (1)..(60): Ceres Seq. ID no. 12381746
MAAGASDYLTVEYHSRELPSFLSDDEGATAGSGVLVCRTAEDARSLCAHRTKNHTSAAAI

SEQ ID NO: 19857 - DNA, 1434 bp, Zea mays subsp. mays
  misc_feature (1)..(1434): Ceres Seq. ID no. 12368425
  misc_feature: MA Experiment ID: 108529 Result: Up-regulated in Transcription
  misc_feature: MA Experiment 108529 PARAMETER Experiment Name: Zm_Imbibed_Seeds_P Parameter: Age (day) Value: 5 vs. 2
  misc_feature: MA Experiment 108529 PARAMETER Experiment Name: Zm_Imbibed_Seeds_P Parameter: Organism Value: Zea mays
  misc_feature: MA Experiment 108529 PARAMETER Experiment Name: Zm_Imbibed_Seeds_P Parameter: Plant Line Value: 35A19
  misc_feature: MA Experiment 108529 PARAMETER Experiment Name: Zm_Imbibed_Seeds_P Parameter: Tissue Value: Roots vs. Embryo
  misc_feature: MA Experiment ID: 108535 Result: Down-regulated in Transcription
  misc_feature: MA Experiment 108535 PARAMETER Experiment Name: Zm_Meristem_P Parameter: Age (day) Value: 8
  misc_feature: MA Experiment 108535 PARAMETER Experiment Name: Zm_Meristem_P Parameter: Organism Value: Zea mays
  misc_feature: MA Experiment 108535 PARAMETER Experiment Name: Zm_Meristem_P Parameter: Plant Line Value: 35A19
  misc_feature: MA Experiment 108535 PARAMETER Experiment Name: Zm_Meristem_P Parameter: Tissue Value: Root Meristem vs. Above Root Meristem
  misc_feature: MA Experiment ID: 108543 Result: Down-regulated in Transcription
  misc_feature: MA Experiment ID: 108687 Result: Down-regulated in Transcription
  misc_feature: MA Experiment 108687 PARAMETER Experiment Name: Zm_Embryos-Flowers__P Parameter: Tissue Value: Embryo vs. Aerial+
  misc_feature: MA Experiment ID: 108689 Result: Down-regulated in Transcription
  misc_feature: MA Experiment 108689 PARAMETER Experiment Name: Zm_Drought_Roots_P Parameter: Age (day) Value: 9
  misc_feature: MA Experiment 108689 PARAMETER Experiment Name: Zm_Drought_Roots_P Parameter: Organism Value: Zea mays
  misc_feature: MA Experiment 108689 PARAMETER Experiment Name: Zm_Drought_Roots_P Parameter: Plant Line Value: 35A19
  misc_feature: MA Experiment 108689 PARAMETER Experiment Name: Zm_Drought_Roots_P Parameter: Timepoint (hr) Value: 24
  misc_feature: MA Experiment 108689 PARAMETER Experiment Name: Zm_Drought_Roots_P Parameter: Tissue Value: Roots
  misc_feature: MA Experiment 108689 PARAMETER Experiment Name: Zm_Drought_Roots_P Parameter: Treatment Value: Drought vs. No Drought
gcacgagaccattacctagaacatcctaatcaaaaagattctgtttgtttcggttcgacagtaataatccggtcaagccgtagaaacttgataccgctgcggctgccccacgagggtgaatcgttacggttcggatattatcttctccgctccgcatcctctgtgtattttcaactcgacgcgttcgttcctatggcgggtccgaggaacagaggaaaccgcacacacccgcaaggatggcggtggcggctaggctctaccactcccgttcgccggagctgtagggcactttcggcgccatggcgatgtggtttggtggcagccggtctgcggcggccggcggatgccgtgaggccagcacatgcaatgcaacgctaggctatggctcaggcctcagggcggtggcgggcctggcggcgcggggagcgggttgcatctcgaccccttggcgtcgtgcactcatgacgagttgcagccaatgcaacatgggcataacagctgttgaagttgccgaccaaacagcaccttaaaaccgttcggttccataggaacaaagggctcctgttgcgccaaataagcagataagtaaaatggtggaagaggccgctaggttctctaagctgttctgtgatagaaacctgccgatctttgcattcctggatacccattatccagataagccggagccaccgtatcctcctcattgtatcattggtactggggaggagaacttcgttccagacctggagtggttggaaaaggagccaaatgtgactataaagaggaaaagttgtattgacggctacatcagctgcatagaggaggacgggtctagtgtttttgttgactgggtgggaaaatatcagatcaaaactgtcttggtactcgggatatgcacggacatctgtgttttggattttgcaagctcaactctggctgctcgaaacattgaccgagtgcctccattacgagatatcgtgatttattcagagaggtgcgctacatatgactttcctgttgagatcgctatgaatatcaaaggagctcttgcccatcctcaggacctgatgcatcatattggactctatatggccaaaggaaggggtgcaaaggttgttgacagggtggttattgaaccttgaataaaaaaacttccctcatcgtagtgatgttgctagagtttcctgtcttctcatccctccattgtaacaatcagatatatatgcgtcttagcataaagttgttgagatactaatgctagcgacaactatgttgacttgtcgagtatgtagagatgggctcatcattttgtggtgagcttgtacatatttcctgagattactttgtcctgccaaacatgcgccagttctccattggttgctaatgttcggctctgggattgtatattcgtatttaataaaagtacttcctccc

SEQ ID NO: 19858 - protein, 183 aa, Zea mays subsp. mays
  peptide (1)..(183): Ceres Seq. ID no. 12368426
  misc_feature (1)..(158): Pfam Name: Isochorismatase family Pfam Description: Isochorismatase family
  misc_feature (1)..(158): Homolog of NCBI NO: 15144508 NR Description: unknown [Lycopersicon esculentum]
  misc_feature (1)..(182): Homolog of NCBI NO: 21537016 NR Description: unknown [Arabidopsis thaliana]
  misc_feature (1)..(157): Homolog of NCBI NO: 25412119 NR Description: hypothetical protein At2g22570 [imported] -
  misc_feature (1)..(179): Homolog of NCBI NO: 23042463 NR Description: hypothetical protein [Trichodesmium erythraeum
  misc_feature (1)..(182): Homolog of NCBI NO: 18400020 NR Description: expressed protein
MVEEAARFSKLFCDRNLPIFAFLDTHYPDKPEPPYPPHCIIGTGEENFVPDLEWLEKEPNVTIKRKSCIDGYISCIEEDGSSVFVDWVGKYQIKTVLVLGICTDICVLDFASSTLAARNIDRVPPLRDIVIYSERCATYDFPVEIAMNIKGALAHPQDLMHHIGLYMAKGRGAKVVDRVVIEP

SEQ ID NO: 19859 - protein, 125 aa, Zea mays subsp. mays
  peptide (1)..(125): Ceres Seq. ID no. 12368427
ARDHYLEHPNQKDSVCFGSTVIIRSSRRNLIPLRLPHEGESLRFGYYLLRSASSVYFQLDAFVPMAGPRNRGNRTHPQGWRWRLGSTTPVRRSCRALSAPWRCGLVAAGLRRPADAVRPAHAMQR

SEQ ID NO: 19860 - DNA, 518 bp, Zea mays subsp. mays
  misc_feature (1)..(518): Ceres Seq. ID no. 12418782
  misc_feature: MA Experiment ID: 108522 Result: Down-regulated in Transcription
  misc_feature: MA Experiment 108522 PARAMETER Experiment Name: Zm_42deg_Heat_P Parameter: Age (day) Value: 8
  misc_feature: MA Experiment 108522 PARAMETER Experiment Name: Zm_42deg_Heat_P Parameter: Organism Value: Zea mays
  misc_feature: MA Experiment 108522 PARAMETER Experiment Name: Zm_42deg_Heat_P Parameter: Plant Line Value: 35A19
  misc_feature: MA Experiment 108522 PARAMETER Experiment Name: Zm_42deg_Heat_P Parameter: Temperature (deg C) Value: 42 vs. 22
  misc_feature: MA Experiment 108522 PARAMETER Experiment Name: Zm_42deg_Heat_P Parameter: Timepoint (hr) Value: 1
  misc_feature: MA Experiment 108522 PARAMETER Experiment Name: Zm_42deg_Heat_P Parameter: Tissue Value: Aerial
  misc_feature: MA Experiment ID: 108535 Result: Up-regulated in Transcription
  misc_feature: MA Experiment 108535 PARAMETER Experiment Name: Zm_Meristem_P Parameter: Age (day) Value: 8
  misc_feature: MA Experiment 108535 PARAMETER Experiment Name: Zm_Meristem_P Parameter: Organism Value: Zea mays
  misc_feature: MA Experiment 108535 PARAMETER Experiment Name: Zm_Meristem_P Parameter: Plant Line Value: 35A19
  misc_feature: MA Experiment 108535 PARAMETER Experiment Name: Zm_Meristem_P Parameter: Tissue Value: Root Meristem vs. Above Root Meristem
gataggaaggcatattatggattcatcaagattttatgtgggattgagagggttgagcatgctgtcaaggtattccgtatgatgaaaggttatgggcatgctcctggagtaaaatcatatagcttgctcattgagaagctggccagacacaatttaggggatcgttctaatgcacttttcagggaggcagttgcacgtggtgtacctgtggcacaaggagagtacaatgttgacaaaaggtatgtcaagacaaagaaggagaagacggtgaagaagaggctgactttgccagagaagatgagattgaagagcaagaggttatacaagctcagaatgagctttgtcaagaagcccaagcgtcgaatgctccgggtttaagcataattttggtttggttggagcggatgatcatgggagcggacaccaccagatccagttatatctcggaagatcagaaaattgtagtcccttaactgtgcctgcccttgtgagtgactatgcaacatcattttttcgaa

SEQ ID NO: 19861 - protein, 125 aa, Zea mays subsp. mays
  peptide (1)..(125): Ceres Seq. ID no. 12418783
  misc_feature (3)..(37): Pfam Name: PPR repeat Pfam Description: PPR repeat
  misc_feature (1)..(121): Homolog of NCBI NO: 21593376 NR Description: unknown [Arabidopsis thaliana]
  misc_feature (1)..(121): Homolog of NCBI NO: 15240232 NR Description: putative protein
  misc_feature (1)..(124): Homolog of NCBI NO: 21554346 NR Description: unknown [Arabidopsis thaliana]
  misc_feature (1)..(124): Homolog of NCBI NO: 15239488 NR Description: putative protein
  misc_feature (1)..(125): Homolog of NCBI NO: 34394565 NR Description: unknown protein [Oryza sativa (japonica
DRKAYYGFIKILCGIERVEHAVKVFRMMKGYGHAPGVKSYSLLIEKLARHNLGDRSNALFREAVARGVPVAQGEYNVDKRYVKTKKEKTVKKRLTLPEKMRLKSKRLYKLRMSFVKKPKRRMLRV

SEQ ID NO: 19862 - protein, 99 aa, Zea mays subsp. mays
  peptide (1)..(99): Ceres Seq. ID no. 12418784
  misc_feature (1)..(95): Homolog of NCBI NO: 21593376 NR Description: unknown [Arabidopsis thaliana]
  misc_feature (1)..(95): Homolog of NCBI NO: 15240232 NR Description: putative protein
  misc_feature (1)..(98): Homolog of NCBI NO: 21554346 NR Description: unknown [Arabidopsis thaliana]
  misc_feature (1)..(98): Homolog of NCBI NO: 15239488 NR Description: putative protein
  misc_feature (1)..(99): Homolog of NCBI NO: 34394565 NR Description: unknown protein [Oryza sativa (japonica
MMKGYGHAPGVKSYSLLIEKLARHNLGDRSNALFREAVARGVPVAQGEYNVDKRYVKTKKEKTVKKRLTLPEKMRLKSKRLYKLRMSFVKKPKRRMLRV

SEQ ID NO: 19863 - protein, 98 aa, Zea mays subsp. mays
  peptide (1)..(98): Ceres Seq. ID no. 12418785
  misc_feature (1)..(94): Homolog of NCBI NO: 21593376 NR Description: unknown [Arabidopsis thaliana]
  misc_feature (1)..(94): Homolog of NCBI NO: 15240232 NR Description: putative protein
  misc_feature (1)..(97): Homolog of NCBI NO: 21554346 NR Description: unknown [Arabidopsis thaliana]
  misc_feature (1)..(97): Homolog of NCBI NO: 15239488 NR Description: putative protein
  misc_feature (1)..(98): Homolog of NCBI NO: 34394565 NR Description: unknown protein [Oryza sativa (japonica
MKGYGHAPGVKSYSLLIEKLARHNLGDRSNALFREAVARGVPVAQGEYNVDKRYVKTKKEKTVKKRLTLPEKMRLKSKRLYKLRMSFVKKPKRRMLRV

SEQ ID NO: 19864 - DNA, 984 bp, Zea mays subsp. mays
  misc_feature (1)..(984): Ceres Seq. ID no. 12363527
  misc_feature: MA Experiment ID: 108687 Result: Down-regulated in Transcription
  misc_feature: MA Experiment 108687 PARAMETER Experiment Name: Zm_Embryos-Flowers__P Parameter: Tissue Value: Embryo vs. Aerial+
  misc_feature: MA Experiment ID: 20000535 Result: Down-regulated in Transcription
  misc_feature: MA Experiment 20000535 PARAMETER Experiment Name: Zm_Hybrid_Seed_Dev_P Parameter: DAP Value: 30 vs. 12
  misc_feature: MA Experiment 20000535 PARAMETER Experiment Name: Zm_Hybrid_Seed_Dev_P Parameter: Organism Value: Zea mays
  misc_feature: MA Experiment 20000535 PARAMETER Experiment Name: Zm_Hybrid_Seed_Dev_P Parameter: Plant Line Value: 35A19
  misc_feature: MA Experiment 20000535 PARAMETER Experiment Name: Zm_Hybrid_Seed_Dev_P Parameter: Tissue Value: Embryo vs. Unfert Floret
gcacgagaccattacctagaacatcctaatcgaaaaaaaatatcttctcttctttgttgttacatgcatactgaagttcaaactggacaagaatcttctgtttactctccggccgctgcctatatcgacttctagagctcatccctcaatttctttctcttcgagattatattttaatttgctactgcttcgatggacagtgccatgtaaaggaaaggagttgatctgattgcatgctgtgattattgattttgtgcttcttgggtagctgcaggttggggttccatgcaagaggctcatggacacggtgactgtcaagtgcggccactgcaacaacctctcctacctcagtccacggccccccatggtgcagccgctctcgccgactgatcatcccttggggccattccagtgtcagggaccctgcagtgagtgcaggaggaaccaaccgctgccgctggcctcgccgacatcgactgacctcaccccgagaatgcccttcgttgtcaagcccccggagaagaaacatcgcctcccatctgcttacaatcgcttcatgagggaggagattcagcgcatcaaagctgcgaagcctgatatccctcacagagaggccttcagcatggctgccaagaattgggcgaagtgtgacccgcgctgctcgacgactgcctctactgccacttctaacagcgctcctgaggctgctagagtcgtgcccactcctcatgtaactgagccacgctttgatctggaggatagggccaaggagcatgtcattgagagcttcgacatcttcaagcagattgagcgcaccatctagatgtctccatgtcgaaatggtgcggtagcccaggatcgagtaccatcacatcctgtactttttaccccccatgttactgttgctattattcttgctcttgttggattgtacgcaccctttaattatggacagctgctaccctttataatgtttgccatcgt

SEQ ID NO: 19865 - protein, 174 aa, Zea mays subsp. mays
  peptide (1)..(174): Ceres Seq. ID no. 12363528
  misc_feature (1)..(124): Pfam Name: YABBY protein Pfam Description: YABBY protein
  misc_feature (1)..(35): Homolog of NCBI NO: 18411242 NR Description: putative YABBY3 axial regulator
  misc_feature (64)..(115): Homolog of NCBI NO: 18411242 NR Description: putative YABBY3 axial regulator
  misc_feature (1)..(115): Homolog of NCBI NO: 27804377 NR Description: MADS-box transcription factor CDM51
  misc_feature (1)..(29): Homolog of NCBI NO: 32330677 NR Description: yabby15 protein [Zea mays]
  misc_feature (44)..(115): Homolog of NCBI NO: 32330677 NR Description: yabby15 protein [Zea mays]
  misc_feature (1)..(131): Homolog of NCBI NO: 21617944 NR Description: transcription factor CRC [Arabidopsis thaliana]
  misc_feature (1)..(131): Homolog of NCBI NO: 15222228 NR Description: transcription factor CRC
  misc_feature (1)..(133): Homolog of NCBI NO: 37542843 NR Description: crabs claw [Nicotiana langsdorffii x Nicotiana
  misc_feature (1)..(173): Homolog of NCBI NO: 33333529 NR Description: CRC-related protein [Triticum aestivum]
  misc_feature (1)..(173): Homolog of NCBI NO: 40362873 NR Description: drooping leaf [Oryza sativa (japonica
MDTVTVKCGHCNNLSYLSPRPPMVQPLSPTDHPLGPFQCQGPCSECRRNQPLPLASPTSTDLTPRMPFVVKPPEKKHRLPSAYNRFMREEIQRIKAAKPDIPHREAFSMAAKNWAKCDPRCSTTASTATSNSAPEAARVVPTPHVTEPRFDLEDRAKEHVIESFDIFKQIERTI

SEQ ID NO: 19866 - protein, 152 aa, Zea mays subsp. mays
  peptide (1)..(152): Ceres Seq. ID no. 12363529
  misc_feature (1)..(102): Pfam Name: YABBY protein Pfam Description: YABBY protein
  misc_feature (1)..(93): Homolog of NCBI NO: 30683176 NR Description: expressed protein [Arabidopsis thaliana]
  misc_feature (1)..(13): Homolog of NCBI NO: 18411242 NR Description: putative YABBY3 axial regulator
  misc_feature (42)..(93): Homolog of NCBI NO: 18411242 NR Description: putative YABBY3 axial regulator
  misc_feature (1)..(93): Homolog of NCBI NO: 27804377 NR Description: MADS-box transcription factor CDM51
  misc_feature (22)..(93): Homolog of NCBI NO: 32330677 NR Description: yabby15 protein [Zea mays]
  misc_feature (1)..(109): Homolog of NCBI NO: 21617944 NR Description: transcription factor CRC [Arabidopsis thaliana]
  misc_feature (1)..(109): Homolog of NCBI NO: 15222228 NR Description: transcription factor CRC
  misc_feature (1)..(111): Homolog of NCBI NO: 37542843 NR Description: crabs claw [Nicotiana langsdorffii x Nicotiana
  misc_feature (1)..(151): Homolog of NCBI NO: 33333529 NR Description: CRC-related protein [Triticum aestivum]
  misc_feature (1)..(151): Homolog of NCBI NO: 40362873 NR Description: drooping leaf [Oryza sativa (japonica
MVQPLSPTDHPLGPFQCQGPCSECRRNQPLPLASPTSTDLTPRMPFVVKPPEKKHRLPSAYNRFMREEIQRIKAAKPDIPHREAFSMAAKNWAKCDPRCSTTASTATSNSAPEAARVVPTPHVTEPRFDLEDRAKEHVIESFDIFKQIERTI

SEQ ID NO: 19867 - protein, 109 aa, Zea mays subsp. mays
  peptide (1)..(109): Ceres Seq. ID no. 12363530
  misc_feature (1)..(59): Pfam Name: YABBY protein Pfam Description: YABBY protein
  misc_feature (1)..(50): Homolog of NCBI NO: 4928751 NR Description: YABBY2 [Arabidopsis thaliana]
  misc_feature (1)..(50): Homolog of NCBI NO: 30683176 NR Description: expressed protein [Arabidopsis thaliana]
  misc_feature (1)..(50): Homolog of NCBI NO: 18411242 NR Description: putative YABBY3 axial regulator
  misc_feature (1)..(50): Homolog of NCBI NO: 27804377 NR Description: MADS-box transcription factor CDM51
  misc_feature (1)..(50): Homolog of NCBI NO: 32330677 NR Description: yabby15 protein [Zea mays]
  misc_feature (1)..(66): Homolog of NCBI NO: 21617944 NR Description: transcription factor CRC [Arabidopsis thaliana]
  misc_feature (1)..(66): Homolog of NCBI NO: 15222228 NR Description: transcription factor CRC
  misc_feature (1)..(68): Homolog of NCBI NO: 37542843 NR Description: crabs claw [Nicotiana langsdorffii x Nicotiana
  misc_feature (1)..(108): Homolog of NCBI NO: 33333529 NR Description: CRC-related protein [Triticum aestivum]
  misc_feature (1)..(108): Homolog of NCBI NO: 40362873 NR Description: drooping leaf [Oryza sativa (japonica
MPFVVKPPEKKHRLPSAYNRFMREEIQRIKAAKPDIPHREAFSMAAKNWAKCDPRCSTTASTATSNSAPEAARVVPTPHVTEPRFDLEDRAKEHVIESFDIFKQIERTI

SEQ ID NO: 19868 - DNA, 1149 bp, Zea mays subsp. mays
  misc_feature (1)..(1149): Ceres Seq. ID no. 13492380
  misc_feature: MA Experiment ID: 108523 Result: Down-regulated in Transcription
  misc_feature: MA Experiment 108523 PARAMETER Experiment Name: Zm_42deg_Heat_P Parameter: Age (day) Value: 8
  misc_feature: MA Experiment 108523 PARAMETER Experiment Name: Zm_42deg_Heat_P Parameter: Organism Value: Zea mays
  misc_feature: MA Experiment 108523 PARAMETER Experiment Name: Zm_42deg_Heat_P Parameter: Plant Line Value: 35A19
  misc_feature: MA Experiment 108523 PARAMETER Experiment Name: Zm_42deg_Heat_P Parameter: Temperature (deg C) Value: 42 vs. 22
  misc_feature: MA Experiment 108523 PARAMETER Experiment Name: Zm_42deg_Heat_P Parameter: Timepoint (hr) Value: 6
  misc_feature: MA Experiment 108523 PARAMETER Experiment Name: Zm_42deg_Heat_P Parameter: Tissue Value: Aerial
  misc_feature: MA Experiment ID: 108527 Result: Down-regulated in Transcription
  misc_feature: MA Experiment 108527 PARAMETER Experiment Name: Zm_5mM_NO_P Parameter: Age (day) Value: 8
  misc_feature: MA Experiment 108527 PARAMETER Experiment Name: Zm_5mM_NO_P Parameter: Organism Value: Zea mays
  misc_feature: MA Experiment 108527 PARAMETER Experiment Name: Zm_5mM_NO_P Parameter: Plant Line Value: 35A19
  misc_feature: MA Experiment 108527 PARAMETER Experiment Name: Zm_5mM_NO_P Parameter: Timepoint (hr) Value: 6
  misc_feature: MA Experiment 108527 PARAMETER Experiment Name: Zm_5mM_NO_P Parameter: Tissue Value: Aerial
  misc_feature: MA Experiment 108527 PARAMETER Experiment Name: Zm_5mM_NO_P Parameter: Treatment Value: 5mM NO vs. No Treatment
  misc_feature: MA Experiment ID: 108528 Result: Up-regulated in Transcription
  misc_feature: MA Experiment 108528 PARAMETER Experiment Name: Zm_Imbibed_Seeds_P Parameter: Age (day) Value: 5 vs. 2
  misc_feature: MA Experiment 108528 PARAMETER Experiment Name: Zm_Imbibed_Seeds_P Parameter: Organism Value: Zea mays
  misc_feature: MA Experiment 108528 PARAMETER Experiment Name: Zm_Imbibed_Seeds_P Parameter: Plant Line Value: 35A19
  misc_feature: MA Experiment 108528 PARAMETER Experiment Name: Zm_Imbibed_Seeds_P Parameter: Tissue Value: Aerial vs. Embryo
  misc_feature: MA Experiment ID: 108529 Result: Up-regulated in Transcription
  misc_feature: MA Experiment 108529 PARAMETER Experiment Name: Zm_Imbibed_Seeds_P Parameter: Age (day) Value: 5 vs. 2
  misc_feature: MA Experiment 108529 PARAMETER Experiment Name: Zm_Imbibed_Seeds_P Parameter: Organism Value: Zea mays
  misc_feature: MA Experiment 108529 PARAMETER Experiment Name: Zm_Imbibed_Seeds_P Parameter: Plant Line Value: 35A19
  misc_feature: MA Experiment 108529 PARAMETER Experiment Name: Zm_Imbibed_Seeds_P Parameter: Tissue Value: Roots vs. Embryo
  misc_feature: MA Experiment ID: 108530 Result: Up-regulated in Transcription
  misc_feature: MA Experiment 108530 PARAMETER Experiment Name: Zm_Imbibed_Seeds_P Parameter: Age (day) Value: 6 vs. 2
  misc_feature: MA Experiment 108530 PARAMETER Experiment Name: Zm_Imbibed_Seeds_P Parameter: Organism Value: Zea mays
  misc_feature: MA Experiment 108530 PARAMETER Experiment Name: Zm_Imbibed_Seeds_P Parameter: Plant Line Value: 35A19
  misc_feature: MA Experiment 108530 PARAMETER Experiment Name: Zm_Imbibed_Seeds_P Parameter: Tissue Value: Aerial vs. Embryo
  misc_feature: MA Experiment ID: 108533 Result: Up-regulated in Transcription
  misc_feature: MA Experiment 108533 PARAMETER Experiment Name: Zm_4deg_Cold_P Parameter: Age (hr) Value: 8
  misc_feature: MA Experiment 108533 PARAMETER Experiment Name: Zm_4deg_Cold_P Parameter: Organism Value: Zea mays
  misc_feature: MA Experiment 108533 PARAMETER Experiment Name: Zm_4deg_Cold_P Parameter: Plant Line Value: 35A19
  misc_feature: MA Experiment 108533 PARAMETER Experiment Name: Zm_4deg_Cold_P Parameter: Temperature (deg C) Value: 4 vs. 22
  misc_feature: MA Experiment 108533 PARAMETER Experiment Name: Zm_4deg_Cold_P Parameter: Timepoint (hr) Value: 1
  misc_feature: MA Experiment 108533 PARAMETER Experiment Name: Zm_4deg_Cold_P Parameter: Tissue Value: Aerial
  misc_feature: MA Experiment ID: 108539 Result: Down-regulated in Transcription
  misc_feature: MA Experiment 108539 PARAMETER Experiment Name: Zm_20percent_PEG_P Parameter: Age (day) Value: 8
  misc_feature: MA Experiment 108539 PARAMETER Experiment Name: Zm_20percent_PEG_P Parameter: Organism Value: Zea mays
  misc_feature: MA Experiment 108539 PARAMETER Experiment Name: Zm_20percent_PEG_P Parameter: Plant Line Value: 35A19
  misc_feature: MA Experiment 108539 PARAMETER Experiment Name: Zm_20percent_PEG_P Parameter: Timepoint (hr) Value: 1
  misc_feature: MA Experiment 108539 PARAMETER Experiment Name: Zm_20percent_PEG_P Parameter: Tissue Value: Aerial
  misc_feature: MA Experiment 108539 PARAMETER Experiment Name: Zm_20percent_PEG_P Parameter: Treatment Value: 20percent PEG vs. No Treatment
  misc_feature: MA Experiment ID: 108540 Result: Down-regulated in Transcription
  misc_feature: MA Experiment 108540 PARAMETER Experiment Name: Zm_20percent_PEG_P Parameter: Age (day) Value: 8
  misc_feature: MA Experiment 108540 PARAMETER Experiment Name: Zm_20percent_PEG_P Parameter: Organism Value: Zea mays
  misc_feature: MA Experiment 108540 PARAMETER Experiment Name: Zm_20percent_PEG_P Parameter: Plant Line Value: 35A19
  misc_feature: MA Experiment 108540 PARAMETER Experiment Name: Zm_20percent_PEG_P Parameter: Timepoint (hr) Value: 6
  misc_feature: MA Experiment 108540 PARAMETER Experiment Name: Zm_20percent_PEG_P Parameter: Tissue Value: Aerial
  misc_feature: MA Experiment 108540 PARAMETER Experiment Name: Zm_20percent_PEG_P Parameter: Treatment Value: 20percent PEG vs. No Treatment
  misc_feature: MA Experiment ID: 108545 Result: Up-regulated in Transcription
  misc_feature: MA Experiment 108545 PARAMETER Experiment Name: Zm_Imbibed_Seeds_P Parameter: Age (day) Value: 3 vs. 2
  misc_feature: MA Experiment 108545 PARAMETER Experiment Name: Zm_Imbibed_Seeds_P Parameter: Organism Value: Zea mays
  misc_feature: MA Experiment 108545 PARAMETER Experiment Name: Zm_Imbibed_Seeds_P Parameter: Plant Line Value: 35A19
  misc_feature: MA Experiment 108545 PARAMETER Experiment Name: Zm_Imbibed_Seeds_P Parameter: Tissue Value: Aerial vs. Embryo
  misc_feature: MA Experiment ID: 108546 Result: Up-regulated in Transcription
  misc_feature: MA Experiment 108546 PARAMETER Experiment Name: Zm_Imbibed_Seeds_P Parameter: Age (day) Value: 3 vs. 2
  misc_feature: MA Experiment 108546 PARAMETER Experiment Name: Zm_Imbibed_Seeds_P Parameter: Organism Value: Zea mays
  misc_feature: MA Experiment 108546 PARAMETER Experiment Name: Zm_Imbibed_Seeds_P Parameter: Plant Line Value: 35A19
  misc_feature: MA Experiment 108546 PARAMETER Experiment Name: Zm_Imbibed_Seeds_P Parameter: Tissue Value: Roots vs. Embryo
  misc_feature: MA Experiment ID: 108547 Result: Up-regulated in Transcription
  misc_feature: MA Experiment 108547 PARAMETER Experiment Name: Zm_Imbibed_Seeds_P Parameter: Age (day) Value: 4 vs. 2
  misc_feature: MA Experiment 108547 PARAMETER Experiment Name: Zm_Imbibed_Seeds_P Parameter: Organism Value: Zea mays
  misc_feature: MA Experiment 108547 PARAMETER Experiment Name: Zm_Imbibed_Seeds_P Parameter: Plant Line Value: 35A19
  misc_feature: MA Experiment 108547 PARAMETER Experiment Name: Zm_Imbibed_Seeds_P Parameter: Tissue Value: Aerial vs. Embryo
  misc_feature: MA Experiment ID: 108559 Result: Down-regulated in Transcription
  misc_feature: MA Experiment 108559 PARAMETER Experiment Name: Zm_5mM_NO_P Parameter: Age (day) Value: 8
  misc_feature: MA Experiment 108559 PARAMETER Experiment Name: Zm_5mM_NO_P Parameter: Organism Value: Zea mays
  misc_feature: MA Experiment 108559 PARAMETER Experiment Name: Zm_5mM_NO_P Parameter: Plant Line Value: 35A19
  misc_feature: MA Experiment 108559 PARAMETER Experiment Name: Zm_5mM_NO_P Parameter: Timepoint (hr) Value: 12
  misc_feature: MA Experiment 108559 PARAMETER Experiment Name: Zm_5mM_NO_P Parameter: Tissue Value: Aerial
  misc_feature: MA Experiment 108559 PARAMETER Experiment Name: Zm_5mM_NO_P Parameter: Treatment Value: 5mM NO vs. No Treatment
  misc_feature: MA Experiment ID: 20000477 Result: Down-regulated in Transcription
  misc_feature: MA Experiment 20000477 PARAMETER Experiment Name: Zm_5mM_SA_P Parameter: Age (day) Value: 10
  misc_feature: MA Experiment 20000477 PARAMETER Experiment Name: Zm_5mM_SA_P Parameter: Organism Value: Zea mays
  misc_feature: MA Experiment 20000477 PARAMETER Experiment Name: Zm_5mM_SA_P Parameter: Plant Line Value: 35A19
  misc_feature: MA Experiment 20000477 PARAMETER Experiment Name: Zm_5mM_SA_P Parameter: Timepoint (hr) Value: 48
  misc_feature: MA Experiment 20000477 PARAMETER Experiment Name: Zm_5mM_SA_P Parameter: Tissue Value: Aerial
  misc_feature: MA Experiment 20000477 PARAMETER Experiment Name: Zm_5mM_SA_P Parameter: Treatment Value: 5mM SA vs. No Treatment
  misc_feature: MA Experiment ID: 20000478 Result: Down-regulated in Transcription
  misc_feature: MA Experiment 20000478 PARAMETER Experiment Name: Zm_5mM_SA_P Parameter: Age (day) Value: 11
  misc_feature: MA Experiment 20000478 PARAMETER Experiment Name: Zm_5mM_SA_P Parameter: Organism Value: Zea mays
  misc_feature: MA Experiment 20000478 PARAMETER Experiment Name: Zm_5mM_SA_P Parameter: Plant Line Value: 35A19
  misc_feature: MA Experiment 20000478 PARAMETER Experiment Name: Zm_5mM_SA_P Parameter: Timepoint (hr) Value: 72
  misc_feature: MA Experiment 20000478 PARAMETER Experiment Name: Zm_5mM_SA_P Parameter: Tissue Value: Aerial
  misc_feature: MA Experiment 20000478 PARAMETER Experiment Name: Zm_5mM_SA_P Parameter: Treatment Value: 5mM SA vs. No Treatment
  misc_feature: MA Experiment ID: 20000535 Result: Down-regulated in Transcription
  misc_feature: MA Experiment 20000535 PARAMETER Experiment Name: Zm_Hybrid_Seed_Dev_P Parameter: DAP Value: 30 vs. 12
  misc_feature: MA Experiment 20000535 PARAMETER Experiment Name: Zm_Hybrid_Seed_Dev_P Parameter: Organism Value: Zea mays
  misc_feature: MA Experiment 20000535 PARAMETER Experiment Name: Zm_Hybrid_Seed_Dev_P Parameter: Plant Line Value: 35A19
  misc_feature: MA Experiment 20000535 PARAMETER Experiment Name: Zm_Hybrid_Seed_Dev_P Parameter: Tissue Value: Embryo vs. Unfert Floret
  misc_feature: MA Experiment ID: 20001608 Result: Down-regulated in Transcription
  misc_feature: MA Experiment 20001608 PARAMETER Experiment Name: Zm_50ppm_KNO3_L-to-H_P Parameter: Age (day) Value: 21
  misc_feature: MA Experiment 20001608 PARAMETER Experiment Name: Zm_50ppm_KNO3_L-to-H_P Parameter: Organism Value: Zea mays
  misc_feature: MA Experiment 20001608 PARAMETER Experiment Name: Zm_50ppm_KNO3_L-to-H_P Parameter: Plant Line Value: 35A19
  misc_feature: MA Experiment 20001608 PARAMETER Experiment Name: Zm_50ppm_KNO3_L-to-H_P Parameter: Timepoint (hr) Value: 48
  misc_feature: MA Experiment 20001608 PARAMETER Experiment Name: Zm_50ppm_KNO3_L-to-H_P Parameter: Tissue Value: Shoots
  misc_feature: MA Experiment 20001608 PARAMETER Experiment Name: Zm_50ppm_KNO3_L-to-H_P Parameter: Treatment Value: 50ppm KNO3 vs. 50ppm KCl
ccacgtcccacccctcctgcatttcaaaataggcgtatctccctgcgcttttcctagccctttgtcatccaaggaaacaataaacaaccggcgcttttacacccccgccaagaacaggagcaacaacaacaaggctcctcgcaacaatccattctcatccatggcgaagctcatgaacaagttggtcgattcgttcgagcacgacgagataccggacgtcggctgcgtgcgcgccgtgctggccgagctcgtcctcaccttcctcttcgtcttcaccggcgtctccgccgccatggccgccggatccgacgggaagcccggcgacgctatgccgatggcgacgctggcggcggtggcaatcgcgcacgcgctggccgctggcgtcctggtgacggccgggttccacgtctccggcggccacctgaaccccgcggtgacggtggggctcatggtgcgcggccacatcaccaagctccgggcggtgctgtacgtcgccgcccagctgctggcctcctccgccgcctgcgtcctcctccgcttcctcagcggcggcatggtgaccccggtgcacgccctgggcaggggcatcagcccgatgcagggcctggtgatggaggtgatcctcaccttctccctgctcttcgtcacctacgccatgatcctggacccgcggagccaggtccgcgccatcggcccgctgctgacgggcctcatcgtcggcgccaacagcctcgccggcggcaacttcaccggcgcgtccatgaacccggcacgctccttcggcccggccctggccaccggggactggacaaaccactgggtctactggatcggcccgctgctcggcgggcccctggcaggcttcgtgtacgagtcgctgttcctggtgcagaagatgcacgagccgctgctcaatggggaagtctgacgaccatcagcccctgtgttgtggcgcatgcttcatgcttgtttctgtaaaacaggtcattctctgcaagcatggtacatacattggccaaggtaattagagaggcttgctgtaaagcagtaggattgctggctgtagaaattgttgatgggctttttttgggggtttcctgccaaggaattctttcttttatataatctcaaaaaagttttttttttggt

SEQ ID NO: 19869 - protein, 308 aa, Zea mays subsp. mays
  peptide (1)..(308): Ceres Seq. ID no. 13492381
  misc_feature (69)..(290): Pfam Name: Major intrinsic protein Pfam Description: Major intrinsic protein
  misc_feature (68)..(303): Homolog of NCBI NO: 7441262 NR Description: aquaporin-like protein - Norway spruce
  misc_feature (67)..(307): Homolog of NCBI NO: 4138262 NR Description: aquaporin 1 [Nicotiana tabacum]
  misc_feature (58)..(303): Homolog of NCBI NO: 34904336 NR Description: unnamed protein product [Oryza sativa (japonica
  misc_feature (58)..(307): Homolog of NCBI NO: 4584429 NR Description: aquaglyceroporin; tonoplast intrinsic protein
  misc_feature (60)..(307): Homolog of NCBI NO: 15225195 NR Description: tonoplast intrinsic protein, putative
  misc_feature (77)..(304): Homolog of NCBI NO: 13447833 NR Description: tonoplast membrane integral protein ZmTIP4-3 [Zea
  misc_feature (67)..(303): Homolog of NCBI NO: 34904332 NR Description: unnamed protein product [Oryza sativa (japonica
  misc_feature (67)..(303): Homolog of NCBI NO: 13447835 NR Description: tonoplast membrane integral protein ZmTIP4-4 [Zea
  misc_feature (54)..(308): Homolog of NCBI NO: 13447831 NR Description: tonoplast membrane integral protein ZmTIP4-2 [Zea
  misc_feature (54)..(308): Homolog of NCBI NO: 13447829 NR Description: tonoplast membrane integral protein ZmTIP4-1 [Zea
HVPPLLHFKIGVSPCAFPSPLSSKETINNRRFYTPAKNRSNNNKAPRNNPFSSMAKLMNKLVDSFEHDEIPDVGCVRAVLAELVLTFLFVFTGVSAAMAAGSDGKPGDAMPMATLAAVAIAHALAAGVLVTAGFHVSGGHLNPAVTVGLMVRGHITKLRAVLYVAAQLLASSAACVLLRFLSGGMVTPVHALGRGISPMQGLVMEVILTFSLLFVTYAMILDPRSQVRAIGPLLTGLIVGANSLAGGNFTGASMNPARSFGPALATGDWTNHWVYWIGPLLGGPLAGFVYESLFLVQKMHEPLLNGEV

SEQ ID NO: 19870 - protein, 255 aa, Zea mays subsp. mays
  peptide (1)..(255): Ceres Seq. ID no. 13492382
  misc_feature (16)..(237): Pfam Name: Major intrinsic protein Pfam Description: Major intrinsic protein
  misc_feature (15)..(250): Homolog of NCBI NO: 7441262 NR Description: aquaporin-like protein - Norway spruce
  misc_feature (14)..(254): Homolog of NCBI NO: 4138262 NR Description: aquaporin 1 [Nicotiana tabacum]
  misc_feature (5)..(250): Homolog of NCBI NO: 34904336 NR Description: unnamed protein product [Oryza sativa (japonica
  misc_feature (5)..(254): Homolog of NCBI NO: 4584429 NR Description: aquaglyceroporin; tonoplast intrinsic protein
  misc_feature (7)..(254): Homolog of NCBI NO: 15225195 NR Description: tonoplast intrinsic protein, putative
  misc_feature (24)..(251): Homolog of NCBI NO: 13447833 NR Description: tonoplast membrane integral protein ZmTIP4-3 [Zea
  misc_feature (14)..(250): Homolog of NCBI NO: 34904332 NR Description: unnamed protein product [Oryza sativa (japonica
  misc_feature (14)..(250): Homolog of NCBI NO: 13447835 NR Description: tonoplast membrane integral protein ZmTIP4-4 [Zea
  misc_feature (1)..(255): Homolog of NCBI NO: 13447831 NR Description: tonoplast membrane integral protein ZmTIP4-2 [Zea
  misc_feature (1)..(255): Homolog of NCBI NO: 13447829 NR Description: tonoplast membrane integral protein ZmTIP4-1 [Zea
MAKLMNKLVDSFEHDEIPDVGCVRAVLAELVLTFLFVFTGVSAAMAAGSDGKPGDAMPMATLAAVAIAHALAAGVLVTAGFHVSGGHLNPAVTVGLMVRGHITKLRAVLYVAAQLLASSAACVLLRFLSGGMVTPVHALGRGISPMQGLVMEVILTFSLLFVTYAMILDPRSQVRAIGPLLTGLIVGANSLAGGNFTGASMNPARSFGPALATGDWTNHWVYWIGPLLGGPLAGFVYESLFLVQKMHEPLLNGEV

SEQ ID NO: 19871 - protein, 251 aa, Zea mays subsp. mays
  peptide (1)..(251): Ceres Seq. ID no. 13492383
  misc_feature (12)..(233): Pfam Name: Major intrinsic protein Pfam Description: Major intrinsic protein
  misc_feature (11)..(246): Homolog of NCBI NO: 7441262 NR Description: aquaporin-like protein - Norway spruce
  misc_feature (10)..(250): Homolog of NCBI NO: 4138262 NR Description: aquaporin 1 [Nicotiana tabacum]
  misc_feature (1)..(246): Homolog of NCBI NO: 34904336 NR Description: unnamed protein product [Oryza sativa (japonica
  misc_feature (1)..(250): Homolog of NCBI NO: 4584429 NR Description: aquaglyceroporin; tonoplast intrinsic protein
  misc_feature (3)..(250): Homolog of NCBI NO: 15225195 NR Description: tonoplast intrinsic protein, putative
  misc_feature (20)..(247): Homolog of NCBI NO: 13447833 NR Description: tonoplast membrane integral protein ZmTIP4-3 [Zea
  misc_feature (10)..(246): Homolog of NCBI NO: 34904332 NR Description: unnamed protein product [Oryza sativa (japonica
  misc_feature (10)..(246): Homolog of NCBI NO: 13447835 NR Description: tonoplast membrane integral protein ZmTIP4-4 [Zea
  misc_feature (1)..(251): Homolog of NCBI NO: 13447831 NR Description: tonoplast membrane integral protein ZmTIP4-2 [Zea
  misc_feature (1)..(251): Homolog of NCBI NO: 13447829 NR Description: tonoplast membrane integral protein ZmTIP4-1 [Zea
MNKLVDSFEHDEIPDVGCVRAVLAELVLTFLFVFTGVSAAMAAGSDGKPGDAMPMATLAAVAIAHALAAGVLVTAGFHVSGGHLNPAVTVGLMVRGHITKLRAVLYVAAQLLASSAACVLLRFLSGGMVTPVHALGRGISPMQGLVMEVILTFSLLFVTYAMILDPRSQVRAIGPLLTGLIVGANSLAGGNFTGASMNPARSFGPALATGDWTNHWVYWIGPLLGGPLAGFVYESLFLVQKMHEPLLNGEV

SEQ ID NO: 19872 - DNA, 1770 bp, Zea mays subsp. mays; identical to SEQ ID NO: 8430
  misc_feature (1)..(1770): Ceres Seq. ID no. 12405403
  misc_feature: MA Experiment ID: 20000487 Result: Up-regulated in Transcription
  misc_feature: MA Experiment 20000487 PARAMETER Experiment Name: Zm_50mM_NH4NO3_L_to_H_P Parameter: Organism Value: Zea mays
  misc_feature: MA Experiment 20000487 PARAMETER Experiment Name: Zm_50mM_NH4NO3_L_to_H_P Parameter: Timepoint (hr) Value: 4
  misc_feature: MA Experiment 20000487 PARAMETER Experiment Name: Zm_50mM_NH4NO3_L_to_H_P Parameter: Tissue Value: Leaves
  misc_feature: MA Experiment 20000487 PARAMETER Experiment Name: Zm_50mM_NH4NO3_L_to_H_P Parameter: Treatment Value: 50mM NH4NO3 vs. 100mM Mannitol

SEQ ID NO: 19873 - protein, 292 aa, Zea mays subsp. mays; identical to SEQ ID NO: 8431
  peptide (1)..(292): Ceres Seq. ID no. 12405404
  misc_feature (1)..(230): Homolog of NCBI NO: 34905486 NR Description: P0682B08.18 [Oryza sativa (japonica
  misc_feature (10)..(269): Homolog of NCBI NO: 34905490 NR Description: P0682B08.20 [Oryza sativa (japonica
  misc_feature (3)..(252): Homolog of NCBI NO: 18411800 NR Description: expressed protein; protein id: At4g01990.1, by cDNA: gi_14517493, supported by cDNA: gi_16323353 [Arabidopsis >gi|14517494|gb|AAK62637.1| AT4g01990/T7B11_26 [Arabidopsis
  misc_feature (3)..(252): Homolog of NCBI NO: 25407143 NR Description: hypothetical protein AT4g01990 [imported] - thaliana >gi|4558568|gb|AAD22661.1|AC007138_25 hypothetical [Arabidopsis thaliana] >gi|7268583|emb|CAB80692.1| hypothetical
  misc_feature (10)..(265): Homolog of NCBI NO: 15217734 NR Description: hypothetical protein; protein id: At1g02370.1, by cDNA: gi_17529323 [Arabidopsis thaliana]
  misc_feature (10)..(265): Homolog of NCBI NO: 17529324 NR Description: unknown protein [Arabidopsis thaliana]
  misc_feature (10)..(267): Homolog of NCBI NO: 15219808 NR Description: hypothetical protein; protein id: At1g60770.1
  misc_feature (3)..(254): Homolog of NCBI NO: 15235508 NR Description: hypothetical protein; protein id: At4g02820.1, by cDNA: gi_17064737 [Arabidopsis thaliana]
  misc_feature (3)..(254): Homolog of NCBI NO: 17064738 NR Description: Unknown protein [Arabidopsis thaliana]
  misc_feature (1)..(230): Homolog of NCBI NO: 22329290 NR Description: hypothetical protein; protein id: At1g02150.1, by cDNA: gi_20453084 [Arabidopsis thaliana]

SEQ ID NO: 19874 - protein, 280 aa, Zea mays subsp. mays; identical to SEQ ID NO: 8432
  peptide (1)..(280): Ceres Seq. ID no. 12405405
  misc_feature (151)..(185): Pfam Name: PPR repeat Pfam Description: PPR repeat
  misc_feature (78)..(245): Homolog of NCBI NO: 34905486 NR Description: P0682B08.18 [Oryza sativa (japonica
  misc_feature (17)..(243): Homolog of NCBI NO: 34905490 NR Description: P0682B08.20 [Oryza sativa (japonica
  misc_feature (13)..(243): Homolog of NCBI NO: 18411800 NR Description: expressed protein; protein id: At4g01990.1, by cDNA: gi_14517493, supported by cDNA: gi_16323353 [Arabidopsis >gi|14517494|gb|AAK62637.1| AT4g01990/T7B11_26 [Arabidopsis
  misc_feature (13)..(243): Homolog of NCBI NO: 25407143 NR Description: hypothetical protein AT4g01990 [imported] - thaliana >gi|4558568|gb|AAD22661.1|AC007138_25 hypothetical [Arabidopsis thaliana] >gi|7268583|emb|CAB80692.1| hypothetical
  misc_feature (19)..(243): Homolog of NCBI NO: 15217734 NR Description: hypothetical protein; protein id: At1g02370.1, by cDNA: gi_17529323 [Arabidopsis thaliana]
  misc_feature (19)..(243): Homolog of NCBI NO: 17529324 NR Description: unknown protein [Arabidopsis thaliana]
  misc_feature (50)..(264): Homolog of NCBI NO: 15219808 NR Description: hypothetical protein; protein id: At1g60770.1
  misc_feature (7)..(279): Homolog of NCBI NO: 15235508 NR Description: hypothetical protein; protein id: At4g02820.1, by cDNA: gi_17064737 [Arabidopsis thaliana]
  misc_feature (7)..(279): Homolog of NCBI NO: 17064738 NR Description: Unknown protein [Arabidopsis thaliana]
  misc_feature (50)..(240): Homolog of NCBI NO: 22329290 NR Description: hypothetical protein; protein id: At1g02150.1, by cDNA: gi_20453084 [Arabidopsis thaliana]

SEQ ID NO: 19875 - protein, 206 aa, Zea mays subsp. mays; identical to SEQ ID NO: 8433
  peptide (1)..(206): Ceres Seq. ID no. 12405406
  misc_feature (1)..(144): Homolog of NCBI NO: 34905486 NR Description: P0682B08.18 [Oryza sativa (japonica
  misc_feature (1)..(183): Homolog of NCBI NO: 34905490 NR Description: P0682B08.20 [Oryza sativa (japonica
  misc_feature (1)..(166): Homolog of NCBI NO: 18411800 NR Description: expressed protein; protein id: At4g01990.1, by cDNA: gi_14517493, supported by cDNA: gi_16323353 [Arabidopsis >gi|14517494|gb|AAK62637.1| AT4g01990/T7B11_26 [Arabidopsis
  misc_feature (1)..(166): Homolog of NCBI NO: 25407143 NR Description: hypothetical protein AT4g01990 [imported] - thaliana >gi|4558568|gb|AAD22661.1|AC007138_25 hypothetical [Arabidopsis thaliana] >gi|7268583|emb|CAB80692.1| hypothetical
  misc_feature (1)..(179): Homolog of NCBI NO: 15217734 NR Description: hypothetical protein; protein id: At1g02370.1, by cDNA: gi_17529323 [Arabidopsis thaliana]
  misc_feature (1)..(179): Homolog of NCBI NO: 17529324 NR Description: unknown protein [Arabidopsis thaliana]
  misc_feature (1)..(181): Homolog of NCBI NO: 15219808 NR Description: hypothetical protein; protein id: At1g60770.1
  misc_feature (1)..(168): Homolog of NCBI NO: 15235508 NR Description: hypothetical protein; protein id: At4g02820.1, by cDNA: gi_17064737 [Arabidopsis thaliana]
  misc_feature (1)..(168): Homolog of NCBI NO: 17064738 NR Description: Unknown protein [Arabidopsis thaliana]
  misc_feature (1)..(144): Homolog of NCBI NO: 22329290 NR Description: hypothetical protein; protein id: At1g02150.1, by cDNA: gi_20453084 [Arabidopsis thaliana]

SEQ ID NO: 19876 - DNA, 482 bp, Zea mays subsp. mays
  misc_feature (1)..(482): Ceres Seq. ID no. 2113060
  misc_feature: MA Experiment ID: 20000478 Result: Up-regulated in Transcription
  misc_feature: MA Experiment 20000478 PARAMETER Experiment Name: Zm_5mM_SA_P Parameter: Age (day) Value: 11
  misc_feature: MA Experiment 20000478 PARAMETER Experiment Name: Zm_5mM_SA_P Parameter: Organism Value: Zea mays
  misc_feature: MA Experiment 20000478 PARAMETER Experiment Name: Zm_5mM_SA_P Parameter: Plant Line Value: 35A19
  misc_feature: MA Experiment 20000478 PARAMETER Experiment Name: Zm_5mM_SA_P Parameter: Timepoint (hr) Value: 72
  misc_feature: MA Experiment 20000478 PARAMETER Experiment Name: Zm_5mM_SA_P Parameter: Tissue Value: Aerial
  misc_feature: MA Experiment 20000478 PARAMETER Experiment Name: Zm_5mM_SA_P Parameter: Treatment Value: 5mM SA vs. No Treatment
  misc_feature: MA Experiment ID: 20000535 Result: Up-regulated in Transcription
  misc_feature: MA Experiment 20000535 PARAMETER Experiment Name: Zm_Hybrid_Seed_Dev_P Parameter: DAP Value: 30 vs. 12
  misc_feature: MA Experiment 20000535 PARAMETER Experiment Name: Zm_Hybrid_Seed_Dev_P Parameter: Organism Value: Zea mays
  misc_feature: MA Experiment 20000535 PARAMETER Experiment Name: Zm_Hybrid_Seed_Dev_P Parameter: Plant Line Value: 35A19
  misc_feature: MA Experiment 20000535 PARAMETER Experiment Name: Zm_Hybrid_Seed_Dev_P Parameter: Tissue Value: Embryo vs. Unfert Floret
gagaactagacgccactcctacagttttacgtttacccaccaccaccagtccaccaccgagcattagcttcccgaccagatcaaccaggcccgccccgacccgaagatgcagcggtggctcccggcgctcctccgccgcgccgcgcccggcggcggggcggcgcggctcttcgcctcgtcctccctcctcttcgacgacacgcaggagcaggttgtttatgcaaaaacagatctaactgcgggatcaaaaggaataactgcattcataatcgagaaagggatgcccgggttcagtactgctcagaaattggacaaacttggcatgagaggaagcgacacatgtgaacttgtttttgagaactgctttgtgccacgcgagaatgtcctcggtgaagaaggcaaaggtgtttatgtcatgatgtcagggcttgatctggaaaggcttgtattagctgcgggccctattggccttatgcaggcat

SEQ ID NO: 19877 - protein, 125 aa, Zea mays subsp. mays
  peptide (1)..(125): Ceres Seq. ID no. 2113061
  misc_feature (33)..(94): Pfam Name: Acyl-CoA dehydrogenase, middle domain Pfam Description: Acyl-CoA dehydrogenase, middle domain
  misc_feature (31)..(124): Homolog of NCBI NO: 12836655 NR Description: unnamed protein product [Mus musculus]
  misc_feature (31)..(124): Homolog of NCBI NO: 12857011 NR Description: unnamed protein product [Mus musculus]
  misc_feature (31)..(124): Homolog of NCBI NO: 9789985 NR Description: isovaleryl coenzyme A dehydrogenase
  misc_feature (36)..(124): Homolog of NCBI NO: 17064982 NR Description: isovaleryl-CoA-dehydrogenase precursor (IVD)
  misc_feature (36)..(124): Homolog of NCBI NO: 25090618 NR Description: Isovaleryl-CoA dehydrogenase, mitochondrial
  misc_feature (36)..(124): Homolog of NCBI NO: 15230664 NR Description: isovaleryl-CoA-dehydrogenase precursor (IVD)
  misc_feature (33)..(124): Homolog of NCBI NO: 25453061 NR Description: Isovaleryl-CoA dehydrogenase 2, mitochondrial
  misc_feature (36)..(124): Homolog of NCBI NO: 25453062 NR Description: Isovaleryl-CoA dehydrogenase 1, mitochondrial
  misc_feature (33)..(124): Homolog of NCBI NO: 5869967 NR Description: auxin binding protein (ABP44); isovaleryl-CoA
  misc_feature (33)..(124): Homolog of NCBI NO: 5869965 NR Description: Isovaleryl-CoA Dehydrogenase; auxin binding
MQRWLPALLRRAAPGGGAARLFASSSLLFDDTQEQVVYAKTDLTAGSKGITAFIIEKGMPGFSTAQKLDKLGMRGSDTCELVFENCFVPRENVLGEEGKGVYVMMSGLDLERLVLAAGPIGLMQA

SEQ ID NO: 19878 - protein, 77 aa, Zea mays subsp. mays
  peptide (1)..(77): Ceres Seq. ID no. 2113062
ELDATPTVLRLPTTTSPPPSISFPTRSTRPAPTRRCSGGSRRSSAAPRPAAGRRGSSPRPPSSSTTRRSRLFMQKQI

SEQ ID NO: 19879 - protein, 67 aa, Zea mays subsp. mays
  peptide (1)..(67): Ceres Seq. ID no. 2113063
  misc_feature (1)..(66): Homolog of NCBI NO: 12836655 NR Description: unnamed protein product [Mus musculus]
  misc_feature (1)..(66): Homolog of NCBI NO: 12857011 NR Description: unnamed protein product [Mus musculus]
  misc_feature (1)..(66): Homolog of NCBI NO: 9789985 NR Description: isovaleryl coenzyme A dehydrogenase
  misc_feature (1)..(66): Homolog of NCBI NO: 17064982 NR Description: isovaleryl-CoA-dehydrogenase precursor (IVD)
  misc_feature (1)..(66): Homolog of NCBI NO: 25090618 NR Description: Isovaleryl-CoA dehydrogenase, mitochondrial
  misc_feature (1)..(66): Homolog of NCBI NO: 15230664 NR Description: isovaleryl-CoA-dehydrogenase precursor (IVD)
  misc_feature (1)..(66): Homolog of NCBI NO: 25453061 NR Description: Isovaleryl-CoA dehydrogenase 2, mitochondrial
  misc_feature (1)..(66): Homolog of NCBI NO: 25453062 NR Description: Isovaleryl-CoA dehydrogenase 1, mitochondrial
  misc_feature (1)..(66): Homolog of NCBI NO: 5869967 NR Description: auxin binding protein (ABP44); isovaleryl-CoA
  misc_feature (1)..(66): Homolog of NCBI NO: 5869965 NR Description: Isovaleryl-CoA Dehydrogenase; auxin binding
MPGFSTAQKLDKLGMRGSDTCELVFENCFVPRENVLGEEGKGVYVMMSGLDLERLVLAAGPIGLMQA

SEQ ID NO: 19880 - DNA, 1856 bp, Zea mays subsp. mays; identical to SEQ ID NO: 4052
  misc_feature (1)..(1856): Ceres Seq. ID no. 13635560
  misc_feature: MA Experiment ID: 108522 Result: Up-regulated in Transcription
  misc_feature: MA Experiment 108522 PARAMETER Experiment Name: Zm_42deg_Heat_P Parameter: Age (day) Value: 8
  misc_feature: MA Experiment 108522 PARAMETER Experiment Name: Zm_42deg_Heat_P Parameter: Organism Value: Zea mays
  misc_feature: MA Experiment 108522 PARAMETER Experiment Name: Zm_42deg_Heat_P Parameter: Plant Line Value: 35A19
  misc_feature: MA Experiment 108522 PARAMETER Experiment Name: Zm_42deg_Heat_P Parameter: Temperature (deg C) Value: 42 vs. 22
  misc_feature: MA Experiment 108522 PARAMETER Experiment Name: Zm_42deg_Heat_P Parameter: Timepoint (hr) Value: 1
  misc_feature: MA Experiment 108522 PARAMETER Experiment Name: Zm_42deg_Heat_P Parameter: Tissue Value: Aerial
  misc_feature: MA Experiment ID: 108523 Result: Up-regulated in Transcription
  misc_feature: MA Experiment 108523 PARAMETER Experiment Name: Zm_42deg_Heat_P Parameter: Age (day) Value: 8
  misc_feature: MA Experiment 108523 PARAMETER Experiment Name: Zm_42deg_Heat_P Parameter: Organism Value: Zea mays
  misc_feature: MA Experiment 108523 PARAMETER Experiment Name: Zm_42deg_Heat_P Parameter: Plant Line Value: 35A19
  misc_feature: MA Experiment 108523 PARAMETER Experiment Name: Zm_42deg_Heat_P Parameter: Temperature (deg C) Value: 42 vs. 22
  misc_feature: MA Experiment 108523 PARAMETER Experiment Name: Zm_42deg_Heat_P Parameter: Timepoint (hr) Value: 6
  misc_feature: MA Experiment 108523 PARAMETER Experiment Name: Zm_42deg_Heat_P Parameter: Tissue Value: Aerial
  misc_feature: MA Experiment ID: 108535 Result: Up-regulated in Transcription
  misc_feature: MA Experiment 108535 PARAMETER Experiment Name: Zm_Meristem_P Parameter: Age (day) Value: 8
  misc_feature: MA Experiment 108535 PARAMETER Experiment Name: Zm_Meristem_P Parameter: Organism Value: Zea mays
  misc_feature: MA Experiment 108535 PARAMETER Experiment Name: Zm_Meristem_P Parameter: Plant Line Value: 35A19
  misc_feature: MA Experiment 108535 PARAMETER Experiment Name: Zm_Meristem_P Parameter: Tissue Value: Root Meristem vs. Above Root Meristem
  misc_feature: MA Experiment ID: 108544 Result: Down-regulated in Transcription

SEQ ID NO: 19881 - protein, 549 aa, Zea mays subsp. mays; identical to SEQ ID NO: 4053
  peptide (1)..(549): Ceres Seq. ID no. 13635561
  misc_feature (25)..(381): Pfam Name: Calreticulin family Pfam Description: Calreticulin family
  misc_feature (1)..(531): Homolog of NCBI NO: 21740628 NR Description: OSJNBb0012E08.10 [Oryza sativa (japonica
  misc_feature (107)..(482): Homolog of NCBI NO: 7441503 NR Description: calnexin - maize (fragment)
  misc_feature (2)..(531): Homolog of NCBI NO: 3334138 NR Description: CALNEXIN HOMOLOG PRECURSOR
  misc_feature (7)..(533): Homolog of NCBI NO: 15240353 NR Description: calnexin 1 (CNX1) [Arabidopsis thaliana]
  misc_feature (6)..(533): Homolog of NCBI NO: 31321896 NR Description: putative papillar cell-specific calnexin
  misc_feature (2)..(531): Homolog of NCBI NO: 11131469 NR Description: Calnexin homolog precursor
  misc_feature (7)..(531): Homolog of NCBI NO: 15240773 NR Description: calnexin, putative [Arabidopsis thaliana]
  misc_feature (7)..(531): Homolog of NCBI NO: 473878 NR Description: calnexin homolog
  misc_feature (10)..(531): Homolog of NCBI NO: 11131766 NR Description: Calnexin homolog precursor
  misc_feature (24)..(535): Homolog of NCBI NO: 18564808 NR Description: calnexin [Aspergillus niger]
  misc_feature (496)..(496): Xaa is any aa, unknown or other

SEQ ID NO: 19882 - protein, 548 aa, Zea mays subsp. mays; identical to SEQ ID NO: 4054
  peptide (1)..(548): Ceres Seq. ID no. 13635562
  misc_feature (24)..(380): Pfam Name: Calreticulin family Pfam Description: Calreticulin family
  misc_feature (1)..(530): Homolog of NCBI NO: 3334138 NR Description: CALNEXIN HOMOLOG PRECURSOR
  misc_feature (6)..(532): Homolog of NCBI NO: 15240353 NR Description: calnexin 1 (CNX1) [Arabidopsis thaliana]
  misc_feature (5)..(532): Homolog of NCBI NO: 31321896 NR Description: putative papillar cell-specific calnexin
  misc_feature (1)..(530): Homolog of NCBI NO: 11131469 NR Description: Calnexin homolog precursor
  misc_feature (1)..(530): Homolog of NCBI NO: 21740628 NR Description: OSJNBb0012E08.10 [Oryza sativa (japonica
  misc_feature (106)..(481): Homolog of NCBI NO: 7441503 NR Description: calnexin - maize (fragment)
  misc_feature (6)..(530): Homolog of NCBI NO: 15240773 NR Description: calnexin, putative [Arabidopsis thaliana]
  misc_feature (6)..(530): Homolog of NCBI NO: 473878 NR Description: calnexin homolog
  misc_feature (9)..(530): Homolog of NCBI NO: 11131766 NR Description: Calnexin homolog precursor
  misc_feature (23)..(534): Homolog of NCBI NO: 18564808 NR Description: calnexin [Aspergillus niger]
  misc_feature (495)..(495): Xaa is any aa, unknown or other

SEQ ID NO: 19883 - protein, 418 aa, Zea mays subsp. mays; identical to SEQ ID NO: 4055
  peptide (1)..(418): Ceres Seq. ID no. 13635563
  misc_feature (1)..(250): Pfam Name: Calreticulin family Pfam Description: Calreticulin family
  misc_feature (1)..(400): Homolog of NCBI NO: 21740628 NR Description: OSJNBb0012E08.10 [Oryza sativa (japonica
  misc_feature (1)..(351): Homolog of NCBI NO: 7441503 NR Description: calnexin - maize (fragment)
  misc_feature (1)..(400): Homolog of NCBI NO: 3334138 NR Description: CALNEXIN HOMOLOG PRECURSOR
  misc_feature (1)..(402): Homolog of NCBI NO: 15240353 NR Description: calnexin 1 (CNX1) [Arabidopsis thaliana]
  misc_feature (1)..(402): Homolog of NCBI NO: 31321896 NR Description: putative papillar cell-specific calnexin
  misc_feature (1)..(400): Homolog of NCBI NO: 11131469 NR Description: Calnexin homolog precursor
  misc_feature (1)..(400): Homolog of NCBI NO: 15240773 NR Description: calnexin, putative [Arabidopsis thaliana]
  misc_feature (1)..(400): Homolog of NCBI NO: 473878 NR Description: calnexin homolog
  misc_feature (1)..(400): Homolog of NCBI NO: 11131766 NR Description: Calnexin homolog precursor
  misc_feature (1)..(404): Homolog of NCBI NO: 18564808 NR Description: calnexin [Aspergillus niger]
  misc_feature (365)..(365): Xaa is any aa, unknown or other

SEQ ID NO: 19884 - DNA, 750 bp, Zea mays subsp. mays
  misc_feature (1)..(750): Ceres Seq. ID no. 12556393
  misc_feature: MA Experiment ID: 108543 Result: Up-regulated in Transcription
  misc_feature: MA Experiment ID: 108545 Result: Down-regulated in Transcription
  misc_feature: MA Experiment 108545 PARAMETER Experiment Name: Zm_Imbibed_Seeds_P Parameter: Age (day) Value: 3 vs. 2
  misc_feature: MA Experiment 108545 PARAMETER Experiment Name: Zm_Imbibed_Seeds_P Parameter: Organism Value: Zea mays
  misc_feature: MA Experiment 108545 PARAMETER Experiment Name: Zm_Imbibed_Seeds_P Parameter: Plant Line Value: 35A19
  misc_feature: MA Experiment 108545 PARAMETER Experiment Name: Zm_Imbibed_Seeds_P Parameter: Tissue Value: Aerial vs. Embryo
  misc_feature: MA Experiment ID: 20000488 Result: Down-regulated in Transcription
  misc_feature: MA Experiment 20000488 PARAMETER Experiment Name: Zm_50mM_NH4NO3_L_to_H_P Parameter: Organism Value: Zea mays
  misc_feature: MA Experiment 20000488 PARAMETER Experiment Name: Zm_50mM_NH4NO3_L_to_H_P Parameter: Timepoint (hr) Value: 8
  misc_feature: MA Experiment 20000488 PARAMETER Experiment Name: Zm_50mM_NH4NO3_L_to_H_P Parameter: Tissue Value: Leaves
  misc_feature: MA Experiment 20000488 PARAMETER Experiment Name: Zm_50mM_NH4NO3_L_to_H_P Parameter: Treatment Value: 50mM NH4NO3 vs. 100mM Mannitol
  misc_feature: MA Experiment ID: 20000492 Result: Down-regulated in Transcription
  misc_feature: MA Experiment 20000492 PARAMETER Experiment Name: Zm_Hybrid_Seed_Dev_P Parameter: DAP Value: 12
  misc_feature: MA Experiment 20000492 PARAMETER Experiment Name: Zm_Hybrid_Seed_Dev_P Parameter: Organism Value: Zea mays
  misc_feature: MA Experiment 20000492 PARAMETER Experiment Name: Zm_Hybrid_Seed_Dev_P Parameter: Plant Line Value: 35A19
  misc_feature: MA Experiment 20000492 PARAMETER Experiment Name: Zm_Hybrid_Seed_Dev_P Parameter: Tissue Value: Fert Kernel vs. Unfert Floret
  misc_feature: MA Experiment ID: 20000532 Result: Up-regulated in Transcription
  misc_feature: MA Experiment 20000532 PARAMETER Experiment Name: Zm_0.001percent_MeJA_P Parameter: Age (day) Value: 10
  misc_feature: MA Experiment 20000532 PARAMETER Experiment Name: Zm_0.001percent_MeJA_P Parameter: Organism Value: Zea mays
  misc_feature: MA Experiment 20000532 PARAMETER Experiment Name: Zm_0.001percent_MeJA_P Parameter: Plant Line Value: 35A19
  misc_feature: MA Experiment 20000532 PARAMETER Experiment Name: Zm_0.001percent_MeJA_P Parameter: Timepoint (hr) Value: 48
  misc_feature: MA Experiment 20000532 PARAMETER Experiment Name: Zm_0.001percent_MeJA_P Parameter: Tissue Value: Aerial
  misc_feature: MA Experiment 20000532 PARAMETER Experiment Name: Zm_0.001percent_MeJA_P Parameter: Treatment Value: 0.001percent MeJA vs. No Treatment
  misc_feature: MA Experiment ID: 20000626 Result: Up-regulated in Transcription
  misc_feature: MA Experiment 20000626 PARAMETER Experiment Name: Zm_Herbicide-Treatments_P Parameter: Timepoint (hr) Value: 12
  misc_feature: MA Experiment 20000626 PARAMETER Experiment Name: Zm_Herbicide-Treatments_P Parameter: Tissue Value: Aerial
  misc_feature: MA Experiment 20000626 PARAMETER Experiment Name: Zm_Herbicide-Treatments_P Parameter: Treatment Value: Roundup vs. No Treatment
  misc_feature: MA Experiment ID: 20001605 Result: Down-regulated in Transcription
  misc_feature: MA Experiment 20001605 PARAMETER Experiment Name: Zm_50ppm_KNO3_L-to-H_P Parameter: Age (day) Value: 19
  misc_feature: MA Experiment 20001605 PARAMETER Experiment Name: Zm_50ppm_KNO3_L-to-H_P Parameter: Organism Value: Zea mays
  misc_feature: MA Experiment 20001605 PARAMETER Experiment Name: Zm_50ppm_KNO3_L-to-H_P Parameter: Plant Line Value: 35A19
  misc_feature: MA Experiment 20001605 PARAMETER Experiment Name: Zm_50ppm_KNO3_L-to-H_P Parameter: Timepoint (hr) Value: 4
  misc_feature: MA Experiment 20001605 PARAMETER Experiment Name: Zm_50ppm_KNO3_L-to-H_P Parameter: Tissue Value: Shoots
  misc_feature: MA Experiment 20001605 PARAMETER Experiment Name: Zm_50ppm_KNO3_L-to-H_P Parameter: Treatment Value: 50ppm KNO3 vs. 50ppm KCl
tctctgtggtggagttttacttcctgcacagattccccctgccttttgctggctacctcatcttcatttccatattggctggattctggggccagtgtttggttaggaagatcgtgcatgtgctcaagagagcatcgcttattgtcttcatcctctcctctgttatcttcgtcagtgctcttacgatgggtgtcgttggaacccagaagagcatttcgatgatcaacaatcacgaatatatggggttcctcaacttctgcgagtaactcaaacaccatcagactgtcgatccgtccgggagaatccaggccaatgcctaattgacctcatctccctcaaaatctagaagaataaagtcgccaagtatgtgcacaggttagctcctcgctaacatgtgcgcatttaggccgacagagtcgctgtagtgaattaagctcgtgttagctcctggctaacgagcagaccatatggctttagttttgtggaagtgggcgcgatttcgtcatgtcatgcatgtgttagctgctggctaaccctgcaaatgcgtgtgttggtgcaggtttttgtcacgtctgcgtcagctcctggctgaccagcagttgtttgtcgttcattctctgcgtcagctcctggctgaccagcagttatttgttgttcattcttgcgctagcaccaggntaggctgcaaaactgcaaatatttgttgcatggaacattgtaaatatcagtcaattcccattctgtttgttc

SEQ ID NO: 19885 - protein, 87 aa, Zea mays subsp. mays
  peptide (1)..(87): Ceres Seq. ID no. 12556394
  misc_feature (1)..(87): Homolog of NCBI NO: 40253486 NR Description: unknown protein [Oryza sativa (japonica
  misc_feature (1)..(86): Homolog of NCBI NO: 40253412 NR Description: membrane protein-like [Oryza sativa (japonica
  misc_feature (1)..(87): Homolog of NCBI NO: 16660290 NR Description: hypothetical protein [Musa acuminata]
  misc_feature (1)..(87): Homolog of NCBI NO: 25412342 NR Description: hypothetical protein At2g25740 [imported] -
  misc_feature (1)..(87): Homolog of NCBI NO: 30682879 NR Description: expressed protein [Arabidopsis thaliana]
  misc_feature (1)..(86): Homolog of NCBI NO: 30686851 NR Description: expressed protein [Arabidopsis thaliana]
SVVEFYFLHRFPLPFAGYLIFISILAGFWGQCLVRKIVHVLKRASLIVFILSSVIFVSALTMGVVGTQKSISMINNHEYMGFLNFCE

SEQ ID NO: 19886 - protein, 73 aa, Zea mays subsp. mays
  peptide (1)..(73): Ceres Seq. ID no. 12556395
SLWWSFTSCTDSPCLLLATSSSFPYWLDSGASVWLGRSCMCSREHRLLSSSSPLLSSSVLLRWVSLEPRRAFR

SEQ ID NO: 19887 - DNA, 537 bp, Zea mays subsp. mays
  misc_feature (1)..(537): Ceres Seq. ID no. 2727698
  misc_feature: MA Experiment ID: 20000535 Result: Down-regulated in Transcription
  misc_feature: MA Experiment 20000535 PARAMETER Experiment Name: Zm_Hybrid_Seed_Dev_P Parameter: DAP Value: 30 vs. 12
  misc_feature: MA Experiment 20000535 PARAMETER Experiment Name: Zm_Hybrid_Seed_Dev_P Parameter: Organism Value: Zea mays
  misc_feature: MA Experiment 20000535 PARAMETER Experiment Name: Zm_Hybrid_Seed_Dev_P Parameter: Plant Line Value: 35A19
  misc_feature: MA Experiment 20000535 PARAMETER Experiment Name: Zm_Hybrid_Seed_Dev_P Parameter: Tissue Value: Embryo vs. Unfert Floret
gaaaagaagaacactttctctctgaaatctcaaattcatctcttctcttccgatttcgctgaatcatgtcagacgacgagcatcacttcgaatccagcgacgccggagcttctaagacttatcctcaacaagccggtaacattcgtaaaggtggtcacatcgncatcaagggacgtccctgcaaggtggttgaggtatcgacttcgaagactgggaagcatggtcacgccaagtgtcactttgttgccattgatatctttacttctaagaagcttgaanatatccgtccttcttcccacaattgtgatgttccacatgtgaatcgcgttgattatcagttgattgatatctctgaagatggctttggtagtcttcttactgataatggtagccactaaggatgatctgannctgccaacagatgaacttttactcacacagctcaagaatggatttgagganggtaaggatatngttgtgtctgtcatgctgcatgggaaagagcagatgtgtgctctcaaggaagttggcccaagt

SEQ ID NO: 19888 - protein, 110 aa, Zea mays subsp. mays
  peptide (1)..(110): Ceres Seq. ID no. 2727699
  misc_feature (26)..(62): Pfam Name: KOW motif Pfam Description: KOW motif
  misc_feature (41)..(109): Homolog of NCBI NO: 8778393 NR Description: F16A14.17 [Arabidopsis thaliana]
  misc_feature (1)..(108): Homolog of NCBI NO: 15222741 NR Description: initiation factor 5A-4, putative
  misc_feature (1)..(108): Homolog of NCBI NO: 9295717 NR Description: T24P13.1 [Arabidopsis thaliana]
  misc_feature (1)..(109): Homolog of NCBI NO: 20138708 NR Description: Eukaryotic translation initiation factor 5A-1
  misc_feature (1)..(109): Homolog of NCBI NO: 20138664 NR Description: Eukaryotic translation initiation factor 5A-2
  misc_feature (1)..(109): Homolog of NCBI NO: 15223002 NR Description: initiation factor 5A-4
  misc_feature (1)..(109): Homolog of NCBI NO: 124226 NR Description: Eukaryotic translation initiation factor 5A-2
  misc_feature (1)..(108): Homolog of NCBI NO: 40805177 NR Description: eukaryotic translation initiation factor-5A
  misc_feature (1)..(109): Homolog of NCBI NO: 13937159 NR Description: At1g69410/F10D13.8 [Arabidopsis thaliana]
  misc_feature (1)..(109): Homolog of NCBI NO: 15222317 NR Description: Eukaryotic initiation  factor 5A , putative
  misc_feature (33)..(33): Xaa is any aa, unknown or other
  misc_feature (72)..(72): Xaa is any aa, unknown or other
MSDDEHHFESSDAGASKTYPQQAGNIRKGGHIXIKGRPCKVVEVSTSKTGKHGHAKCHFVAIDIFTSKKLEXIRPSSHNCDVPHVNRVDYQLIDISEDGFGSLLTDNGSH

SEQ ID NO: 19889 - protein, 106 aa, Zea mays subsp. mays
  peptide (1)..(106): Ceres Seq. ID no. 2727700
  misc_feature (55)..(55): Xaa is any aa, unknown or other
  misc_feature (93)..(93): Xaa is any aa, unknown or other
EKKNTFSLKSQIHLFSSDFAESCQTTSITSNPATPELLRLILNKPVTFVKVVTSXSRDVPARWLRYRLRRLGSMVTPSVTLLPLISLLLRSLXISVLLPTIVMFHM

SEQ ID NO: 19890 - protein, 60 aa, Zea mays subsp. mays
  peptide (1)..(60): Ceres Seq. ID no. 2727701
  misc_feature (12)..(59): Homolog of NCBI NO: 15222317 NR Description: Eukaryotic initiation  factor 5A , putative
  misc_feature (12)..(59): Homolog of NCBI NO: 8778393 NR Description: F16A14.17 [Arabidopsis thaliana]
  misc_feature (13)..(58): Homolog of NCBI NO: 15222741 NR Description: initiation factor 5A-4, putative
  misc_feature (13)..(58): Homolog of NCBI NO: 9295717 NR Description: T24P13.1 [Arabidopsis thaliana]
  misc_feature (13)..(59): Homolog of NCBI NO: 20138708 NR Description: Eukaryotic translation initiation factor 5A-1
  misc_feature (12)..(59): Homolog of NCBI NO: 20138664 NR Description: Eukaryotic translation initiation factor 5A-2
  misc_feature (12)..(59): Homolog of NCBI NO: 15223002 NR Description: initiation factor 5A-4
  misc_feature (13)..(59): Homolog of NCBI NO: 124226 NR Description: Eukaryotic translation initiation factor 5A-2
  misc_feature (13)..(58): Homolog of NCBI NO: 40805177 NR Description: eukaryotic translation initiation factor-5A
  misc_feature (12)..(59): Homolog of NCBI NO: 13937159 NR Description: At1g69410/F10D13.8 [Arabidopsis thaliana]
  misc_feature (18)..(18): Xaa is any aa, unknown or other
  misc_feature (35)..(35): Xaa is any aa, unknown or other
  misc_feature (39)..(39): Xaa is any aa, unknown or other
MALVVFLLIMVATKDDLXLPTDELLLTQLKNGFEXGKDXVVSVMLHGKEQMCALKEVGPS

SEQ ID NO: 19891 - DNA, 686 bp, Zea mays subsp. mays
  misc_feature (1)..(686): Ceres Seq. ID no. 12556415
  misc_feature: MA Experiment ID: 20000492 Result: Down-regulated in Transcription
  misc_feature: MA Experiment 20000492 PARAMETER Experiment Name: Zm_Hybrid_Seed_Dev_P Parameter: DAP Value: 12
  misc_feature: MA Experiment 20000492 PARAMETER Experiment Name: Zm_Hybrid_Seed_Dev_P Parameter: Organism Value: Zea mays
  misc_feature: MA Experiment 20000492 PARAMETER Experiment Name: Zm_Hybrid_Seed_Dev_P Parameter: Plant Line Value: 35A19
  misc_feature: MA Experiment 20000492 PARAMETER Experiment Name: Zm_Hybrid_Seed_Dev_P Parameter: Tissue Value: Fert Kernel vs. Unfert Floret
  misc_feature: MA Experiment ID: 20000629 Result: Down-regulated in Transcription
  misc_feature: MA Experiment 20000629 PARAMETER Experiment Name: Zm_Herbicide-Treatments_P Parameter: Timepoint (hr) Value: 12
  misc_feature: MA Experiment 20000629 PARAMETER Experiment Name: Zm_Herbicide-Treatments_P Parameter: Tissue Value: Aerial
  misc_feature: MA Experiment 20000629 PARAMETER Experiment Name: Zm_Herbicide-Treatments_P Parameter: Treatment Value: Trimec vs. No Treatment
aaacacaggagatatagctgaaagcagtgagcaagtggggcattactggctagagctgggaaggcgatccaagtaccagttgcacatggtgatagccatactgtcatacatcctcttcgggctgctgccaccagtcatctacggactgtcattcaggacgagcgacaacagagagaacaaagtgctggtggtcgctgctgcatctctcctgtgcattgcgctgctcgcaatcgggaaggcacatgttaagaggcataggacatacctcacaaaccctcctctactacctgtccattggattcagcagctccggactgtcgtacgtcgcaggcgtcctcctcgcgaaggtcctagcacacttcggtatcattgatcagggtggtgcatcaagctcctgctcctccaggtctctcattccctgaagcagccgcctgggcttcctactgagactggagccctcatttagtagttttgatggttaaatggattatctcagcacacatctgcatggagacactatcttgcaattcacacagtttttatcacaagcccttggctctcagaattcgtctctcttttttcacagcacttggccatagtataattttcagaattngtctgtaccccaaccttgtcatcgtatttttgacaggaacatgttgtcaattacaatctccttttttcac

SEQ ID NO: 19892 - protein, 123 aa, Zea mays subsp. mays
  peptide (1)..(123): Ceres Seq. ID no. 12556416
  misc_feature (1)..(84): Homolog of NCBI NO: 30689367 NR Description: expressed protein [Arabidopsis thaliana]
  misc_feature (1)..(84): Homolog of NCBI NO: 30689371 NR Description: expressed protein [Arabidopsis thaliana]
  misc_feature (1)..(84): Homolog of NCBI NO: 21592516 NR Description: unknown [Arabidopsis thaliana]
  misc_feature (10)..(89): Homolog of NCBI NO: 30687764 NR Description: expressed protein [Arabidopsis thaliana]
  misc_feature (10)..(89): Homolog of NCBI NO: 7487471 NR Description: hypothetical protein T27E11.110 - Arabidopsis
  misc_feature (10)..(89): Homolog of NCBI NO: 15912253 NR Description: AT4g27870/T27E11_110 [Arabidopsis thaliana]
  misc_feature (1)..(89): Homolog of NCBI NO: 7487470 NR Description: hypothetical protein T27E11.100 - Arabidopsis
  misc_feature (1)..(89): Homolog of NCBI NO: 18417079 NR Description: putative protein
  misc_feature (3)..(89): Homolog of NCBI NO: 24413974 NR Description: contains ESTs
NTGDIAESSEQVGHYWLELGRRSKYQLHMVIAILSYILFGLLPPVIYGLSFRTSDNRENKVLVVAAASLLCIALLAIGKAHVKRHRTYLTNPPLLPVHWIQQLRTVVRRRRPPREGPSTLRYH

SEQ ID NO: 19893 - protein, 95 aa, Zea mays subsp. mays
  peptide (1)..(95): Ceres Seq. ID no. 12556417
  misc_feature (1)..(56): Homolog of NCBI NO: 30689367 NR Description: expressed protein [Arabidopsis thaliana]
  misc_feature (1)..(56): Homolog of NCBI NO: 30689371 NR Description: expressed protein [Arabidopsis thaliana]
  misc_feature (1)..(56): Homolog of NCBI NO: 21592516 NR Description: unknown [Arabidopsis thaliana]
  misc_feature (1)..(61): Homolog of NCBI NO: 30687764 NR Description: expressed protein [Arabidopsis thaliana]
  misc_feature (1)..(61): Homolog of NCBI NO: 7487471 NR Description: hypothetical protein T27E11.110 - Arabidopsis
  misc_feature (1)..(61): Homolog of NCBI NO: 15912253 NR Description: AT4g27870/T27E11_110 [Arabidopsis thaliana]
  misc_feature (1)..(61): Homolog of NCBI NO: 7487470 NR Description: hypothetical protein T27E11.100 - Arabidopsis
  misc_feature (1)..(61): Homolog of NCBI NO: 18417079 NR Description: putative protein
  misc_feature (1)..(61): Homolog of NCBI NO: 24413974 NR Description: contains ESTs
MVIAILSYILFGLLPPVIYGLSFRTSDNRENKVLVVAAASLLCIALLAIGKAHVKRHRTYLTNPPLLPVHWIQQLRTVVRRRRPPREGPSTLRYH

SEQ ID NO: 19894 - protein, 70 aa, Zea mays subsp. mays
  peptide (1)..(70): Ceres Seq. ID no. 12556418
  misc_feature (48)..(48): Xaa is any aa, unknown or other
MVKWIISAHICMETLSCNSHSFYHKPLALRIRLSFFTALGHSIIFRIXLYPNLVIVFLTGTCCQLQSPFF

SEQ ID NO: 19895 - DNA, 1315 bp, Zea mays subsp. mays; identical to SEQ ID NO: 14233
  misc_feature (1)..(1315): Ceres Seq. ID no. 13635214
  misc_feature: MA Experiment ID: 108530 Result: Down-regulated in Transcription
  misc_feature: MA Experiment 108530 PARAMETER Experiment Name: Zm_Imbibed_Seeds_P Parameter: Age (day) Value: 6 vs. 2
  misc_feature: MA Experiment 108530 PARAMETER Experiment Name: Zm_Imbibed_Seeds_P Parameter: Organism Value: Zea mays
  misc_feature: MA Experiment 108530 PARAMETER Experiment Name: Zm_Imbibed_Seeds_P Parameter: Plant Line Value: 35A19
  misc_feature: MA Experiment 108530 PARAMETER Experiment Name: Zm_Imbibed_Seeds_P Parameter: Tissue Value: Aerial vs. Embryo
  misc_feature: MA Experiment ID: 108544 Result: Up-regulated in Transcription

SEQ ID NO: 19896 - protein, 153 aa, Zea mays subsp. mays; identical to SEQ ID NO: 14234
  peptide (1)..(153): Ceres Seq. ID no. 15220341
  misc_feature (38)..(152): Pfam Name: lactate/malate dehydrogenase, NAD binding domain Pfam Description: lactate/malate dehydrogenase, NAD binding domain
  misc_feature (38)..(152): Pfam Name: lactate/malate dehydrogenase, NAD binding domain Pfam Description: lactate/malate dehydrogenase, NAD binding domain
  misc_feature (36)..(152): Homolog of NCBI NO: 15219721 NR Description: malate dehydrogenase, cytosolic, putative thaliana] >gi|11133509|sp|P93819|MDHC_ARATH Malate dehydrogenase,
  misc_feature (36)..(152): Homolog of NCBI NO: 15239843 NR Description: malate dehydrogenase, cytosolic, putative thaliana] >gi|11133446|sp|P57106|MDHD_ARATH Malate dehydrogenase,
  misc_feature (36)..(152): Homolog of NCBI NO: 37535388 NR Description: cytoplasmic malate dehydrogenase [Oryza sativa
  misc_feature (36)..(152): Homolog of NCBI NO: 15982948 NR Description: NAD-dependent malate dehydrogenase [Prunus
  misc_feature (36)..(152): Homolog of NCBI NO: 11133373 NR Description: Malate dehydrogenase, cytoplasmic
  misc_feature (36)..(152): Homolog of NCBI NO: 37535388 NR Description: cytoplasmic malate dehydrogenase [Oryza sativa
  misc_feature (36)..(152): Homolog of NCBI NO: 15982948 NR Description: NAD-dependent malate dehydrogenase [Prunus
  misc_feature (36)..(152): Homolog of NCBI NO: 21593565 NR Description: cytosolic malate dehydrogenase [Arabidopsis
  misc_feature (36)..(152): Homolog of NCBI NO: 15239843 NR Description: malate dehydrogenase, cytosolic, putative thaliana] >gi|11133446|sp|P57106|MDHD_ARATH Malate dehydrogenase,
  misc_feature (36)..(152): Homolog of NCBI NO: 15219721 NR Description: malate dehydrogenase, cytosolic, putative thaliana] >gi|11133509|sp|P93819|MDHC_ARATH Malate dehydrogenase,
  misc_feature (36)..(152): Homolog of NCBI NO: 12229778 NR Description: Malate dehydrogenase, cytoplasmic
  misc_feature (36)..(152): Homolog of NCBI NO: 11133373 NR Description: Malate dehydrogenase, cytoplasmic
  misc_feature (36)..(152): Homolog of NCBI NO: 10798652 NR Description: malate dehydrogenase [Nicotiana tabacum]
  misc_feature (36)..(152): Homolog of NCBI NO: 10334493 NR Description: cytosolic malate dehydrogenase [Cicer arietinum]
  misc_feature (36)..(152): Homolog of NCBI NO: 18202485 NR Description: Malate dehydrogenase, cytoplasmic
  misc_feature (36)..(152): Homolog of NCBI NO: 12229778 NR Description: Malate dehydrogenase, cytoplasmic
  misc_feature (36)..(152): Homolog of NCBI NO: 10798652 NR Description: malate dehydrogenase [Nicotiana tabacum]
  misc_feature (36)..(152): Homolog of NCBI NO: 10334493 NR Description: cytosolic malate dehydrogenase [Cicer arietinum]
  misc_feature (36)..(152): Homolog of NCBI NO: 18202485 NR Description: Malate dehydrogenase, cytoplasmic
  misc_feature (36)..(152): Homolog of NCBI NO: 21593565 NR Description: cytosolic malate dehydrogenase [Arabidopsis
  misc_feature (10)..(10): Xaa is any aa, unknown or other
  misc_feature (11)..(11): Xaa is any aa, unknown or other
  misc_feature (26)..(26): Xaa is any aa, unknown or other
  misc_feature (27)..(27): Xaa is any aa, unknown or other
  misc_feature (29)..(29): Xaa is any aa, unknown or other
  misc_feature (30)..(30): Xaa is any aa, unknown or other
  misc_feature (32)..(32): Xaa is any aa, unknown or other
  misc_feature (33)..(33): Xaa is any aa, unknown or other
  misc_feature (34)..(34): Xaa is any aa, unknown or other
  misc_feature (40)..(40): Xaa is any aa, unknown or other
  misc_feature (47)..(47): Xaa is any aa, unknown or other
  misc_feature (50)..(50): Xaa is any aa, unknown or other
  misc_feature (55)..(55): Xaa is any aa, unknown or other
  misc_feature (56)..(56): Xaa is any aa, unknown or other
  misc_feature (63)..(63): Xaa is any aa, unknown or other
  misc_feature (78)..(78): Xaa is any aa, unknown or other
  misc_feature (87)..(87): Xaa is any aa, unknown or other
  misc_feature (93)..(93): Xaa is any aa, unknown or other
  misc_feature (97)..(97): Xaa is any aa, unknown or other
  misc_feature (104)..(104): Xaa is any aa, unknown or other
  misc_feature (106)..(106): Xaa is any aa, unknown or other
  misc_feature (117)..(117): Xaa is any aa, unknown or other
  misc_feature (118)..(118): Xaa is any aa, unknown or other
  misc_feature (123)..(123): Xaa is any aa, unknown or other
  misc_feature (132)..(132): Xaa is any aa, unknown or other
  misc_feature (133)..(133): Xaa is any aa, unknown or other
  misc_feature (140)..(140): Xaa is any aa, unknown or other
  misc_feature (148)..(148): Xaa is any aa, unknown or other

SEQ ID NO: 19897 - protein, 143 aa, Zea mays subsp. mays; identical to SEQ ID NO: 14235
  peptide (1)..(143): Ceres Seq. ID no. 15220342
  misc_feature (85)..(142): Pfam Name: lactate/malate dehydrogenase, alpha/beta Pfam Description: lactate/malate dehydrogenase, alpha/beta
  misc_feature (85)..(142): Pfam Name: lactate/malate dehydrogenase, alpha/beta Pfam Description: lactate/malate dehydrogenase, alpha/beta
  misc_feature (6)..(142): Homolog of NCBI NO: 18202485 NR Description: Malate dehydrogenase, cytoplasmic
  misc_feature (6)..(142): Homolog of NCBI NO: 37535388 NR Description: cytoplasmic malate dehydrogenase [Oryza sativa
  misc_feature (6)..(142): Homolog of NCBI NO: 21593565 NR Description: cytosolic malate dehydrogenase [Arabidopsis
  misc_feature (6)..(142): Homolog of NCBI NO: 15239843 NR Description: malate dehydrogenase, cytosolic, putative thaliana] >gi|11133446|sp|P57106|MDHD_ARATH Malate dehydrogenase,
  misc_feature (6)..(142): Homolog of NCBI NO: 15982948 NR Description: NAD-dependent malate dehydrogenase [Prunus
  misc_feature (6)..(142): Homolog of NCBI NO: 37535388 NR Description: cytoplasmic malate dehydrogenase [Oryza sativa
  misc_feature (6)..(142): Homolog of NCBI NO: 15239843 NR Description: malate dehydrogenase, cytosolic, putative thaliana] >gi|11133446|sp|P57106|MDHD_ARATH Malate dehydrogenase,
  misc_feature (6)..(142): Homolog of NCBI NO: 12229778 NR Description: Malate dehydrogenase, cytoplasmic
  misc_feature (6)..(142): Homolog of NCBI NO: 11133373 NR Description: Malate dehydrogenase, cytoplasmic
  misc_feature (6)..(142): Homolog of NCBI NO: 15219721 NR Description: malate dehydrogenase, cytosolic, putative thaliana] >gi|11133509|sp|P93819|MDHC_ARATH Malate dehydrogenase,
  misc_feature (6)..(142): Homolog of NCBI NO: 10334493 NR Description: cytosolic malate dehydrogenase [Cicer arietinum]
  misc_feature (6)..(142): Homolog of NCBI NO: 10798652 NR Description: malate dehydrogenase [Nicotiana tabacum]
  misc_feature (6)..(142): Homolog of NCBI NO: 15982948 NR Description: NAD-dependent malate dehydrogenase [Prunus
  misc_feature (6)..(142): Homolog of NCBI NO: 21593565 NR Description: cytosolic malate dehydrogenase [Arabidopsis
  misc_feature (6)..(142): Homolog of NCBI NO: 18202485 NR Description: Malate dehydrogenase, cytoplasmic
  misc_feature (6)..(142): Homolog of NCBI NO: 10798652 NR Description: malate dehydrogenase [Nicotiana tabacum]
  misc_feature (6)..(142): Homolog of NCBI NO: 10334493 NR Description: cytosolic malate dehydrogenase [Cicer arietinum]
  misc_feature (6)..(142): Homolog of NCBI NO: 15219721 NR Description: malate dehydrogenase, cytosolic, putative thaliana] >gi|11133509|sp|P93819|MDHC_ARATH Malate dehydrogenase,
  misc_feature (6)..(142): Homolog of NCBI NO: 11133373 NR Description: Malate dehydrogenase, cytoplasmic
  misc_feature (6)..(142): Homolog of NCBI NO: 12229778 NR Description: Malate dehydrogenase, cytoplasmic
  misc_feature (8)..(8): Xaa is any aa, unknown or other
  misc_feature (9)..(9): Xaa is any aa, unknown or other
  misc_feature (15)..(15): Xaa is any aa, unknown or other
  misc_feature (24)..(24): Xaa is any aa, unknown or other
  misc_feature (25)..(25): Xaa is any aa, unknown or other
  misc_feature (32)..(32): Xaa is any aa, unknown or other
  misc_feature (39)..(39): Xaa is any aa, unknown or other
  misc_feature (49)..(49): Xaa is any aa, unknown or other
  misc_feature (50)..(50): Xaa is any aa, unknown or other
  misc_feature (62)..(62): Xaa is any aa, unknown or other
  misc_feature (75)..(75): Xaa is any aa, unknown or other
  misc_feature (77)..(77): Xaa is any aa, unknown or other
  misc_feature (78)..(78): Xaa is any aa, unknown or other
  misc_feature (79)..(79): Xaa is any aa, unknown or other
  misc_feature (86)..(86): Xaa is any aa, unknown or other
  misc_feature (101)..(101): Xaa is any aa, unknown or other
  misc_feature (104)..(104): Xaa is any aa, unknown or other
  misc_feature (119)..(119): Xaa is any aa, unknown or other

SEQ ID NO: 19898 - protein, 130 aa, Zea mays subsp. mays; identical to SEQ ID NO: 14236
  peptide (1)..(130): Ceres Seq. ID no. 15220343
  misc_feature (72)..(129): Pfam Name: lactate/malate dehydrogenase, alpha/beta Pfam Description: lactate/malate dehydrogenase, alpha/beta
  misc_feature (72)..(129): Pfam Name: lactate/malate dehydrogenase, alpha/beta Pfam Description: lactate/malate dehydrogenase, alpha/beta
  misc_feature (1)..(129): Homolog of NCBI NO: 18202485 NR Description: Malate dehydrogenase, cytoplasmic
  misc_feature (1)..(129): Homolog of NCBI NO: 37535388 NR Description: cytoplasmic malate dehydrogenase [Oryza sativa
  misc_feature (1)..(129): Homolog of NCBI NO: 21593565 NR Description: cytosolic malate dehydrogenase [Arabidopsis
  misc_feature (1)..(129): Homolog of NCBI NO: 15239843 NR Description: malate dehydrogenase, cytosolic, putative thaliana] >gi|11133446|sp|P57106|MDHD_ARATH Malate dehydrogenase,
  misc_feature (1)..(129): Homolog of NCBI NO: 15982948 NR Description: NAD-dependent malate dehydrogenase [Prunus
  misc_feature (1)..(129): Homolog of NCBI NO: 37535388 NR Description: cytoplasmic malate dehydrogenase [Oryza sativa
  misc_feature (1)..(129): Homolog of NCBI NO: 15239843 NR Description: malate dehydrogenase, cytosolic, putative thaliana] >gi|11133446|sp|P57106|MDHD_ARATH Malate dehydrogenase,
  misc_feature (1)..(129): Homolog of NCBI NO: 12229778 NR Description: Malate dehydrogenase, cytoplasmic
  misc_feature (1)..(129): Homolog of NCBI NO: 11133373 NR Description: Malate dehydrogenase, cytoplasmic
  misc_feature (1)..(129): Homolog of NCBI NO: 15219721 NR Description: malate dehydrogenase, cytosolic, putative thaliana] >gi|11133509|sp|P93819|MDHC_ARATH Malate dehydrogenase,
  misc_feature (1)..(129): Homolog of NCBI NO: 10334493 NR Description: cytosolic malate dehydrogenase [Cicer arietinum]
  misc_feature (1)..(129): Homolog of NCBI NO: 10798652 NR Description: malate dehydrogenase [Nicotiana tabacum]
  misc_feature (1)..(129): Homolog of NCBI NO: 15982948 NR Description: NAD-dependent malate dehydrogenase [Prunus
  misc_feature (1)..(129): Homolog of NCBI NO: 21593565 NR Description: cytosolic malate dehydrogenase [Arabidopsis
  misc_feature (1)..(129): Homolog of NCBI NO: 18202485 NR Description: Malate dehydrogenase, cytoplasmic
  misc_feature (1)..(129): Homolog of NCBI NO: 10798652 NR Description: malate dehydrogenase [Nicotiana tabacum]
  misc_feature (1)..(129): Homolog of NCBI NO: 10334493 NR Description: cytosolic malate dehydrogenase [Cicer arietinum]
  misc_feature (1)..(129): Homolog of NCBI NO: 15219721 NR Description: malate dehydrogenase, cytosolic, putative thaliana] >gi|11133509|sp|P93819|MDHC_ARATH Malate dehydrogenase,
  misc_feature (1)..(129): Homolog of NCBI NO: 11133373 NR Description: Malate dehydrogenase, cytoplasmic
  misc_feature (1)..(129): Homolog of NCBI NO: 12229778 NR Description: Malate dehydrogenase, cytoplasmic
  misc_feature (2)..(2): Xaa is any aa, unknown or other
  misc_feature (11)..(11): Xaa is any aa, unknown or other
  misc_feature (12)..(12): Xaa is any aa, unknown or other
  misc_feature (19)..(19): Xaa is any aa, unknown or other
  misc_feature (26)..(26): Xaa is any aa, unknown or other
  misc_feature (36)..(36): Xaa is any aa, unknown or other
  misc_feature (37)..(37): Xaa is any aa, unknown or other
  misc_feature (49)..(49): Xaa is any aa, unknown or other
  misc_feature (62)..(62): Xaa is any aa, unknown or other
  misc_feature (64)..(64): Xaa is any aa, unknown or other
  misc_feature (65)..(65): Xaa is any aa, unknown or other
  misc_feature (66)..(66): Xaa is any aa, unknown or other
  misc_feature (73)..(73): Xaa is any aa, unknown or other
  misc_feature (88)..(88): Xaa is any aa, unknown or other
  misc_feature (91)..(91): Xaa is any aa, unknown or other
  misc_feature (106)..(106): Xaa is any aa, unknown or other

SEQ ID NO: 19899 - DNA, 355 bp, Zea mays subsp. mays
  misc_feature (1)..(355): Ceres Seq. ID no. 2727880
  misc_feature: MA Experiment ID: 108689 Result: Down-regulated in Transcription
  misc_feature: MA Experiment 108689 PARAMETER Experiment Name: Zm_Drought_Roots_P Parameter: Age (day) Value: 9
  misc_feature: MA Experiment 108689 PARAMETER Experiment Name: Zm_Drought_Roots_P Parameter: Organism Value: Zea mays
  misc_feature: MA Experiment 108689 PARAMETER Experiment Name: Zm_Drought_Roots_P Parameter: Plant Line Value: 35A19
  misc_feature: MA Experiment 108689 PARAMETER Experiment Name: Zm_Drought_Roots_P Parameter: Timepoint (hr) Value: 24
  misc_feature: MA Experiment 108689 PARAMETER Experiment Name: Zm_Drought_Roots_P Parameter: Tissue Value: Roots
  misc_feature: MA Experiment 108689 PARAMETER Experiment Name: Zm_Drought_Roots_P Parameter: Treatment Value: Drought vs. No Drought
gcacctaacgcagattcttcttctctaccatattcgttgaaaccagagaagatggtgggtgtgtcgccgaagatcgctccgtcgatgttgtcatcggactttgcaaatcttgccgcggaggctaagcggatgatcgatttgggcgccaattggcttcacatggacattatggacgggcattttgtttctaacctaacgattggtgctcctgtcatcgagagtttgaggaagcacacaaatgcatatcttgattgccacttaatggngacgaaccccatggattatgtggatcagatggctaaagctggggcgtctggtttcacattccacgttgaggtggcccaagagaattggc

SEQ ID NO: 19900 - protein, 118 aa, Zea mays subsp. mays
  peptide (1)..(118): Ceres Seq. ID no. 2727881
  misc_feature (24)..(117): Pfam Name: Ribulose-phosphate 3 epimerase family Pfam Description: Ribulose-phosphate 3 epimerase family
  misc_feature (25)..(112): Homolog of NCBI NO: 29248724 NR Description: GLP_164_20691_19966 [Giardia lamblia ATCC 50803]
  misc_feature (24)..(117): Homolog of NCBI NO: 27532955 NR Description: RIKEN cDNA 5730518J08 [Mus musculus]
  misc_feature (21)..(117): Homolog of NCBI NO: 19114917 NR Description: putative ribulose phosphate 3-epimerase
  misc_feature (21)..(116): Homolog of NCBI NO: 6322341 NR Description: D-ribulose-5-Phosphate 3-epimerase; Rpe1p
  misc_feature (23)..(112): Homolog of NCBI NO: 17552948 NR Description: D-ribulose-5-Phosphate 3-epimerase (24.4 kD)
  misc_feature (25)..(112): Homolog of NCBI NO: 39581355 NR Description: Hypothetical protein CBG15299 [Caenorhabditis
  misc_feature (24)..(117): Homolog of NCBI NO: 28373310 NR Description: Chain A, The Structure Of The Cytosolic
  misc_feature (21)..(117): Homolog of NCBI NO: 6091725 NR Description: putative D-ribulose-5-phosphate 3-epimerase
  misc_feature (21)..(117): Homolog of NCBI NO: 18395962 NR Description: putative D-ribulose-5-phosphate 3-epimerase
  misc_feature (18)..(117): Homolog of NCBI NO: 15221735 NR Description: putative D-ribulose-5-phosphate-3-epimerase
  misc_feature (89)..(89): Xaa is any aa, unknown or other
APNADSSSLPYSLKPEKMVGVSPKIAPSMLSSDFANLAAEAKRMIDLGANWLHMDIMDGHFVSNLTIGAPVIESLRKHTNAYLDCHLMXTNPMDYVDQMAKAGASGFTFHVEVAQENW

SEQ ID NO: 19901 - protein, 101 aa, Zea mays subsp. mays
  peptide (1)..(101): Ceres Seq. ID no. 2727882
  misc_feature (7)..(100): Pfam Name: Ribulose-phosphate 3 epimerase family Pfam Description: Ribulose-phosphate 3 epimerase family
  misc_feature (4)..(100): Homolog of NCBI NO: 19114917 NR Description: putative ribulose phosphate 3-epimerase
  misc_feature (4)..(99): Homolog of NCBI NO: 6322341 NR Description: D-ribulose-5-Phosphate 3-epimerase; Rpe1p
  misc_feature (6)..(95): Homolog of NCBI NO: 17552948 NR Description: D-ribulose-5-Phosphate 3-epimerase (24.4 kD)
  misc_feature (8)..(95): Homolog of NCBI NO: 39581355 NR Description: Hypothetical protein CBG15299 [Caenorhabditis
  misc_feature (8)..(95): Homolog of NCBI NO: 29248724 NR Description: GLP_164_20691_19966 [Giardia lamblia ATCC 50803]
  misc_feature (7)..(100): Homolog of NCBI NO: 27532955 NR Description: RIKEN cDNA 5730518J08 [Mus musculus]
  misc_feature (7)..(100): Homolog of NCBI NO: 28373310 NR Description: Chain A, The Structure Of The Cytosolic
  misc_feature (4)..(100): Homolog of NCBI NO: 6091725 NR Description: putative D-ribulose-5-phosphate 3-epimerase
  misc_feature (4)..(100): Homolog of NCBI NO: 18395962 NR Description: putative D-ribulose-5-phosphate 3-epimerase
  misc_feature (1)..(100): Homolog of NCBI NO: 15221735 NR Description: putative D-ribulose-5-phosphate-3-epimerase
  misc_feature (72)..(72): Xaa is any aa, unknown or other
MVGVSPKIAPSMLSSDFANLAAEAKRMIDLGANWLHMDIMDGHFVSNLTIGAPVIESLRKHTNAYLDCHLMXTNPMDYVDQMAKAGASGFTFHVEVAQENW

SEQ ID NO: 19902 - protein, 90 aa, Zea mays subsp. mays
  peptide (1)..(90): Ceres Seq. ID no. 2727883
  misc_feature (1)..(89): Pfam Name: Ribulose-phosphate 3 epimerase family Pfam Description: Ribulose-phosphate 3 epimerase family
  misc_feature (1)..(84): Homolog of NCBI NO: 29248724 NR Description: GLP_164_20691_19966 [Giardia lamblia ATCC 50803]
  misc_feature (1)..(89): Homolog of NCBI NO: 27532955 NR Description: RIKEN cDNA 5730518J08 [Mus musculus]
  misc_feature (1)..(89): Homolog of NCBI NO: 19114917 NR Description: putative ribulose phosphate 3-epimerase
  misc_feature (1)..(88): Homolog of NCBI NO: 6322341 NR Description: D-ribulose-5-Phosphate 3-epimerase; Rpe1p
  misc_feature (1)..(84): Homolog of NCBI NO: 17552948 NR Description: D-ribulose-5-Phosphate 3-epimerase (24.4 kD)
  misc_feature (1)..(84): Homolog of NCBI NO: 39581355 NR Description: Hypothetical protein CBG15299 [Caenorhabditis
  misc_feature (1)..(89): Homolog of NCBI NO: 28373310 NR Description: Chain A, The Structure Of The Cytosolic
  misc_feature (1)..(89): Homolog of NCBI NO: 6091725 NR Description: putative D-ribulose-5-phosphate 3-epimerase
  misc_feature (1)..(89): Homolog of NCBI NO: 18395962 NR Description: putative D-ribulose-5-phosphate 3-epimerase
  misc_feature (1)..(89): Homolog of NCBI NO: 15221735 NR Description: putative D-ribulose-5-phosphate-3-epimerase
  misc_feature (61)..(61): Xaa is any aa, unknown or other
MLSSDFANLAAEAKRMIDLGANWLHMDIMDGHFVSNLTIGAPVIESLRKHTNAYLDCHLMXTNPMDYVDQMAKAGASGFTFHVEVAQENW

SEQ ID NO: 19903 - DNA, 553 bp, Zea mays subsp. mays
  misc_feature (1)..(553): Ceres Seq. ID no. 12556468
  misc_feature: MA Experiment ID: 20000492 Result: Down-regulated in Transcription
  misc_feature: MA Experiment 20000492 PARAMETER Experiment Name: Zm_Hybrid_Seed_Dev_P Parameter: DAP Value: 12
  misc_feature: MA Experiment 20000492 PARAMETER Experiment Name: Zm_Hybrid_Seed_Dev_P Parameter: Organism Value: Zea mays
  misc_feature: MA Experiment 20000492 PARAMETER Experiment Name: Zm_Hybrid_Seed_Dev_P Parameter: Plant Line Value: 35A19
  misc_feature: MA Experiment 20000492 PARAMETER Experiment Name: Zm_Hybrid_Seed_Dev_P Parameter: Tissue Value: Fert Kernel vs. Unfert Floret
  misc_feature: MA Experiment ID: 20000629 Result: Down-regulated in Transcription
  misc_feature: MA Experiment 20000629 PARAMETER Experiment Name: Zm_Herbicide-Treatments_P Parameter: Timepoint (hr) Value: 12
  misc_feature: MA Experiment 20000629 PARAMETER Experiment Name: Zm_Herbicide-Treatments_P Parameter: Tissue Value: Aerial
  misc_feature: MA Experiment 20000629 PARAMETER Experiment Name: Zm_Herbicide-Treatments_P Parameter: Treatment Value: Trimec vs. No Treatment
aaacacaggagatatagctgaaagcagtgagcaagtggggcattactggctagagctgggaaggcgatccaagtaccagttgcacatggtgatagccatactgtcatacatcctcttcgggctgctgccaccagtcatctacggactgtcattcaggacgagcgacaacagagagaacaaagtgctggtggtcgctgctgcatctctcctgtgcattgcgctgctcgcaatcgggaaggcacatgttaagaggcataggacatacctcacaaccctcctctactacctgtccattggattcagcagctccggactgtcgtacgtcgcaggcgtcctcctcgcgaaggtcctagcacacttcggtatcattgatcagggtggtgcatcagctcctgctcctccaggtctctcattccctgaagcagccgtagggcttcaaactgagactggagccctcatttagtagttttgatggataaatggattatctcagcacacatctgcatggagacactatctgcaattcacacagtttttatcacagcccatggat

SEQ ID NO: 19904 - protein, 153 aa, Zea mays subsp. mays
  peptide (1)..(153): Ceres Seq. ID no. 12556469
  misc_feature (1)..(131): Homolog of NCBI NO: 30689367 NR Description: expressed protein [Arabidopsis thaliana]
  misc_feature (1)..(131): Homolog of NCBI NO: 21592516 NR Description: unknown [Arabidopsis thaliana]
  misc_feature (1)..(131): Homolog of NCBI NO: 30689371 NR Description: expressed protein [Arabidopsis thaliana]
  misc_feature (1)..(124): Homolog of NCBI NO: 7487470 NR Description: hypothetical protein T27E11.100 - Arabidopsis
  misc_feature (1)..(124): Homolog of NCBI NO: 18417079 NR Description: putative protein
  misc_feature (10)..(131): Homolog of NCBI NO: 30687764 NR Description: expressed protein [Arabidopsis thaliana]
  misc_feature (10)..(131): Homolog of NCBI NO: 7487471 NR Description: hypothetical protein T27E11.110 - Arabidopsis
  misc_feature (10)..(131): Homolog of NCBI NO: 15912253 NR Description: AT4g27870/T27E11_110 [Arabidopsis thaliana]
  misc_feature (3)..(123): Homolog of NCBI NO: 24413974 NR Description: contains ESTs
NTGDIAESSEQVGHYWLELGRRSKYQLHMVIAILSYILFGLLPPVIYGLSFRTSDNRENKVLVVAAASLLCIALLAIGKAHVKRHRTYLTTLLYYLSIGFSSSGLSYVAGVLLAKVLAHFGIIDQGGASAPAPPGLSFPEAAVGLQTETGALI

SEQ ID NO: 19905 - protein, 125 aa, Zea mays subsp. mays
  peptide (1)..(125): Ceres Seq. ID no. 12556470
  misc_feature (1)..(103): Homolog of NCBI NO: 30689367 NR Description: expressed protein [Arabidopsis thaliana]
  misc_feature (1)..(103): Homolog of NCBI NO: 21592516 NR Description: unknown [Arabidopsis thaliana]
  misc_feature (1)..(103): Homolog of NCBI NO: 30689371 NR Description: expressed protein [Arabidopsis thaliana]
  misc_feature (1)..(96): Homolog of NCBI NO: 7487470 NR Description: hypothetical protein T27E11.100 - Arabidopsis
  misc_feature (1)..(96): Homolog of NCBI NO: 18417079 NR Description: putative protein
  misc_feature (1)..(103): Homolog of NCBI NO: 30687764 NR Description: expressed protein [Arabidopsis thaliana]
  misc_feature (1)..(103): Homolog of NCBI NO: 7487471 NR Description: hypothetical protein T27E11.110 - Arabidopsis
  misc_feature (1)..(103): Homolog of NCBI NO: 15912253 NR Description: AT4g27870/T27E11_110 [Arabidopsis thaliana]
  misc_feature (1)..(95): Homolog of NCBI NO: 24413974 NR Description: contains ESTs
MVIAILSYILFGLLPPVIYGLSFRTSDNRENKVLVVAAASLLCIALLAIGKAHVKRHRTYLTTLLYYLSIGFSSSGLSYVAGVLLAKVLAHFGIIDQGGASAPAPPGLSFPEAAVGLQTETGALI

SEQ ID NO: 19906 - DNA, 435 bp, Zea mays subsp. mays
  misc_feature (1)..(435): Ceres Seq. ID no. 2732244
  misc_feature: MA Experiment ID: 20000633 Result: Down-regulated in Transcription
  misc_feature: MA Experiment 20000633 PARAMETER Experiment Name: Zm_Herbicide-Treatments_P Parameter: Timepoint (hr) Value: 4
  misc_feature: MA Experiment 20000633 PARAMETER Experiment Name: Zm_Herbicide-Treatments_P Parameter: Tissue Value: Aerial
  misc_feature: MA Experiment 20000633 PARAMETER Experiment Name: Zm_Herbicide-Treatments_P Parameter: Treatment Value: Trimec vs. No Treatment
gtcgcattccgcaacacctgctcctcgcccccttctctcagaggcgacgcctcgggcgctcctaccctgccccgtctccggtccccccgcgccgtcggcgaggcagccggccgtcacagaagcccgatccggaccccgcgagaatgaagacatccagttgcgtctaaactccattagaagactttcaacaattgcacgggctcttggagaagaaagaaccaggaaggagctgattccttttcttagtgaaaacaacgatgatgaagacgaggtgcttcttgcaatggctgaggaattgggtgtgttcattccgtatgttggtggtgtagaacatgctcatgttttgctcccacctttggagacattgtgtacagtggaggaaacttgtgtccgtgataaagcagttgaatctctgtgccgtattggtgccaaatg

SEQ ID NO: 19907 - protein, 144 aa, Zea mays subsp. mays
  peptide (1)..(144): Ceres Seq. ID no. 2732245
  misc_feature (108)..(143): Pfam Name: HEAT repeat Pfam Description: HEAT repeat
  misc_feature (47)..(143): Homolog of NCBI NO: 683506 NR Description: 65 kDa regulatory subunit of protein phosphatase
  misc_feature (47)..(143): Homolog of NCBI NO: 1076396 NR Description: phosphoprotein phosphatase 2A 65K regulatory
  misc_feature (47)..(143): Homolog of NCBI NO: 15222601 NR Description: phosphoprotein phosphatase 2A, regulatory subunit
  misc_feature (47)..(143): Homolog of NCBI NO: 2146743 NR Description: phosphoprotein phosphatase (EC 3.1.3.16) 2A
  misc_feature (47)..(143): Homolog of NCBI NO: 1254996 NR Description: serine/threonine protein phosphatase type 2A
  misc_feature (47)..(143): Homolog of NCBI NO: 11094365 NR Description: Ser/Thr specific protein phosphatase 2A A
  misc_feature (47)..(143): Homolog of NCBI NO: 15230896 NR Description: protein phosphatase 2A 65 kDa regulatory subunit
  misc_feature (47)..(143): Homolog of NCBI NO: 1076389 NR Description: phosphoprotein phosphatase 2A 65K regulatory
  misc_feature (47)..(143): Homolog of NCBI NO: 11094367 NR Description: Ser/Thr specific protein phosphatase 2A A
  misc_feature (47)..(143): Homolog of NCBI NO: 5679684 NR Description: phosphatase 2A regulatory A subunit [Oryza
SHSATPAPRPLLSEATPRALLPCPVSGPPAPSARQPAVTEARSGPRENEDIQLRLNSIRRLSTIARALGEERTRKELIPFLSENNDDEDEVLLAMAEELGVFIPYVGGVEHAHVLLPPLETLCTVEETCVRDKAVESLCRIGAK

SEQ ID NO: 19908 - protein, 50 aa, Zea mays subsp. mays
  peptide (1)..(50): Ceres Seq. ID no. 4903276
  misc_feature (14)..(49): Pfam Name: HEAT repeat Pfam Description: HEAT repeat
  misc_feature (1)..(49): Homolog of NCBI NO: 683506 NR Description: 65 kDa regulatory subunit of protein phosphatase
  misc_feature (1)..(49): Homolog of NCBI NO: 1076396 NR Description: phosphoprotein phosphatase 2A 65K regulatory
  misc_feature (1)..(49): Homolog of NCBI NO: 2146743 NR Description: phosphoprotein phosphatase (EC 3.1.3.16) 2A
  misc_feature (1)..(49): Homolog of NCBI NO: 15222601 NR Description: phosphoprotein phosphatase 2A, regulatory subunit
  misc_feature (1)..(49): Homolog of NCBI NO: 1254996 NR Description: serine/threonine protein phosphatase type 2A
  misc_feature (1)..(49): Homolog of NCBI NO: 11094365 NR Description: Ser/Thr specific protein phosphatase 2A A
  misc_feature (1)..(49): Homolog of NCBI NO: 15230896 NR Description: protein phosphatase 2A 65 kDa regulatory subunit
  misc_feature (1)..(49): Homolog of NCBI NO: 1076389 NR Description: phosphoprotein phosphatase 2A 65K regulatory
  misc_feature (1)..(49): Homolog of NCBI NO: 11094367 NR Description: Ser/Thr specific protein phosphatase 2A A
  misc_feature (1)..(49): Homolog of NCBI NO: 5679684 NR Description: phosphatase 2A regulatory A subunit [Oryza
MAEELGVFIPYVGGVEHAHVLLPPLETLCTVEETCVRDKAVESLCRIGAK

SEQ ID NO: 19909 - DNA, 868 bp, Zea mays subsp. mays; identical to SEQ ID NO: 18096
  misc_feature (1)..(868): Ceres Seq. ID no. 12358010
  misc_feature: MA Experiment ID: 108522 Result: Down-regulated in Transcription
  misc_feature: MA Experiment 108522 PARAMETER Experiment Name: Zm_42deg_Heat_P Parameter: Age (day) Value: 8
  misc_feature: MA Experiment 108522 PARAMETER Experiment Name: Zm_42deg_Heat_P Parameter: Organism Value: Zea mays
  misc_feature: MA Experiment 108522 PARAMETER Experiment Name: Zm_42deg_Heat_P Parameter: Plant Line Value: 35A19
  misc_feature: MA Experiment 108522 PARAMETER Experiment Name: Zm_42deg_Heat_P Parameter: Temperature (deg C) Value: 42 vs. 22
  misc_feature: MA Experiment 108522 PARAMETER Experiment Name: Zm_42deg_Heat_P Parameter: Timepoint (hr) Value: 1
  misc_feature: MA Experiment 108522 PARAMETER Experiment Name: Zm_42deg_Heat_P Parameter: Tissue Value: Aerial
  misc_feature: MA Experiment ID: 108527 Result: Down-regulated in Transcription
  misc_feature: MA Experiment 108527 PARAMETER Experiment Name: Zm_5mM_NO_P Parameter: Age (day) Value: 8
  misc_feature: MA Experiment 108527 PARAMETER Experiment Name: Zm_5mM_NO_P Parameter: Organism Value: Zea mays
  misc_feature: MA Experiment 108527 PARAMETER Experiment Name: Zm_5mM_NO_P Parameter: Plant Line Value: 35A19
  misc_feature: MA Experiment 108527 PARAMETER Experiment Name: Zm_5mM_NO_P Parameter: Timepoint (hr) Value: 6
  misc_feature: MA Experiment 108527 PARAMETER Experiment Name: Zm_5mM_NO_P Parameter: Tissue Value: Aerial
  misc_feature: MA Experiment 108527 PARAMETER Experiment Name: Zm_5mM_NO_P Parameter: Treatment Value: 5mM NO vs. No Treatment
  misc_feature: MA Experiment ID: 108534 Result: Down-regulated in Transcription
  misc_feature: MA Experiment 108534 PARAMETER Experiment Name: Zm_4deg_Cold_P Parameter: Age (hr) Value: 8
  misc_feature: MA Experiment 108534 PARAMETER Experiment Name: Zm_4deg_Cold_P Parameter: Organism Value: Zea mays
  misc_feature: MA Experiment 108534 PARAMETER Experiment Name: Zm_4deg_Cold_P Parameter: Plant Line Value: 35A19
  misc_feature: MA Experiment 108534 PARAMETER Experiment Name: Zm_4deg_Cold_P Parameter: Temperature (deg C) Value: 4 vs. 22
  misc_feature: MA Experiment 108534 PARAMETER Experiment Name: Zm_4deg_Cold_P Parameter: Timepoint (hr) Value: 6
  misc_feature: MA Experiment 108534 PARAMETER Experiment Name: Zm_4deg_Cold_P Parameter: Tissue Value: Aerial
  misc_feature: MA Experiment ID: 108535 Result: Down-regulated in Transcription
  misc_feature: MA Experiment 108535 PARAMETER Experiment Name: Zm_Meristem_P Parameter: Age (day) Value: 8
  misc_feature: MA Experiment 108535 PARAMETER Experiment Name: Zm_Meristem_P Parameter: Organism Value: Zea mays
  misc_feature: MA Experiment 108535 PARAMETER Experiment Name: Zm_Meristem_P Parameter: Plant Line Value: 35A19
  misc_feature: MA Experiment 108535 PARAMETER Experiment Name: Zm_Meristem_P Parameter: Tissue Value: Root Meristem vs. Above Root Meristem
  misc_feature: MA Experiment ID: 108543 Result: Down-regulated in Transcription
  misc_feature: MA Experiment ID: 108687 Result: Down-regulated in Transcription
  misc_feature: MA Experiment 108687 PARAMETER Experiment Name: Zm_Embryos-Flowers__P Parameter: Tissue Value: Embryo vs. Aerial+
  misc_feature: MA Experiment ID: 20000492 Result: Down-regulated in Transcription
  misc_feature: MA Experiment 20000492 PARAMETER Experiment Name: Zm_Hybrid_Seed_Dev_P Parameter: DAP Value: 12
  misc_feature: MA Experiment 20000492 PARAMETER Experiment Name: Zm_Hybrid_Seed_Dev_P Parameter: Organism Value: Zea mays
  misc_feature: MA Experiment 20000492 PARAMETER Experiment Name: Zm_Hybrid_Seed_Dev_P Parameter: Plant Line Value: 35A19
  misc_feature: MA Experiment 20000492 PARAMETER Experiment Name: Zm_Hybrid_Seed_Dev_P Parameter: Tissue Value: Fert Kernel vs. Unfert Floret
  misc_feature: MA Experiment ID: 20000535 Result: Down-regulated in Transcription
  misc_feature: MA Experiment 20000535 PARAMETER Experiment Name: Zm_Hybrid_Seed_Dev_P Parameter: DAP Value: 30 vs. 12
  misc_feature: MA Experiment 20000535 PARAMETER Experiment Name: Zm_Hybrid_Seed_Dev_P Parameter: Organism Value: Zea mays
  misc_feature: MA Experiment 20000535 PARAMETER Experiment Name: Zm_Hybrid_Seed_Dev_P Parameter: Plant Line Value: 35A19
  misc_feature: MA Experiment 20000535 PARAMETER Experiment Name: Zm_Hybrid_Seed_Dev_P Parameter: Tissue Value: Embryo vs. Unfert Floret

SEQ ID NO: 19910 - protein, 189 aa, Zea mays subsp. mays; identical to SEQ ID NO: 18097
  peptide (1)..(189): Ceres Seq. ID no. 12358011
  misc_feature (48)..(102): Pfam Name: Homeobox domain Pfam Description: Homeobox domain
  misc_feature (48)..(102): Pfam Name: Homeobox domain Pfam Description: Homeobox domain
  misc_feature (26)..(159): Homolog of NCBI NO: 18399966 NR Description: homeodomain transcription factor (ATHB-6)
  misc_feature (26)..(159): Homolog of NCBI NO: 25386231 NR Description: homeodomain transcription factor (ATHB-6)
  misc_feature (26)..(159): Homolog of NCBI NO: 5305602 NR Description: homeobox protein ATHB6 [Arabidopsis thaliana]
  misc_feature (10)..(188): Homolog of NCBI NO: 8133126 NR Description: hb-6-like protein [Brassica rapa subsp.
  misc_feature (36)..(164): Homolog of NCBI NO: 22651698 NR Description: homeodomain protein Hfi22 [Nicotiana tabacum]
  misc_feature (26)..(159): Homolog of NCBI NO: 18399966 NR Description: homeodomain transcription factor (ATHB-6)
  misc_feature (26)..(159): Homolog of NCBI NO: 5305602 NR Description: homeobox protein ATHB6 [Arabidopsis thaliana]
  misc_feature (36)..(164): Homolog of NCBI NO: 22651698 NR Description: homeodomain protein Hfi22 [Nicotiana tabacum]
  misc_feature (1)..(186): Homolog of NCBI NO: 5006853 NR Description: homeodomain leucine zipper protein [Oryza sativa]
  misc_feature (20)..(188): Homolog of NCBI NO: 33943626 NR Description: homeodomain leucine-zipper protein Hox8
  misc_feature (20)..(188): Homolog of NCBI NO: 37533686 NR Description: putative homeodomain leucine zipper protein
  misc_feature (3)..(184): Homolog of NCBI NO: 18034439 NR Description: homeodomain leucine zipper protein CPHB-4
  misc_feature (41)..(154): Homolog of NCBI NO: 34902432 NR Description: Unknown protein [Oryza sativa (japonica
  misc_feature (10)..(188): Homolog of NCBI NO: 8133126 NR Description: hb-6-like protein [Brassica rapa subsp.
  misc_feature (26)..(159): Homolog of NCBI NO: 25386231 NR Description: homeodomain transcription factor (ATHB-6)
  misc_feature (41)..(154): Homolog of NCBI NO: 34902432 NR Description: Unknown protein [Oryza sativa (japonica
  misc_feature (3)..(184): Homolog of NCBI NO: 18034439 NR Description: homeodomain leucine zipper protein CPHB-4
  misc_feature (20)..(188): Homolog of NCBI NO: 37533686 NR Description: putative homeodomain leucine zipper protein
  misc_feature (20)..(188): Homolog of NCBI NO: 33943626 NR Description: homeodomain leucine-zipper protein Hox8
  misc_feature (1)..(186): Homolog of NCBI NO: 5006853 NR Description: homeodomain leucine zipper protein [Oryza sativa]

SEQ ID NO: 19911 - protein, 176 aa, Zea mays subsp. mays; identical to SEQ ID NO: 18098
  peptide (1)..(176): Ceres Seq. ID no. 12358012
  misc_feature (35)..(89): Pfam Name: Homeobox domain Pfam Description: Homeobox domain
  misc_feature (35)..(89): Pfam Name: Homeobox domain Pfam Description: Homeobox domain
  misc_feature (13)..(146): Homolog of NCBI NO: 25386231 NR Description: homeodomain transcription factor (ATHB-6)
  misc_feature (13)..(146): Homolog of NCBI NO: 18399966 NR Description: homeodomain transcription factor (ATHB-6)
  misc_feature (13)..(146): Homolog of NCBI NO: 5305602 NR Description: homeobox protein ATHB6 [Arabidopsis thaliana]
  misc_feature (1)..(175): Homolog of NCBI NO: 8133126 NR Description: hb-6-like protein [Brassica rapa subsp.
  misc_feature (23)..(151): Homolog of NCBI NO: 22651698 NR Description: homeodomain protein Hfi22 [Nicotiana tabacum]
  misc_feature (13)..(146): Homolog of NCBI NO: 25386231 NR Description: homeodomain transcription factor (ATHB-6)
  misc_feature (13)..(146): Homolog of NCBI NO: 5305602 NR Description: homeobox protein ATHB6 [Arabidopsis thaliana]
  misc_feature (23)..(151): Homolog of NCBI NO: 22651698 NR Description: homeodomain protein Hfi22 [Nicotiana tabacum]
  misc_feature (1)..(173): Homolog of NCBI NO: 5006853 NR Description: homeodomain leucine zipper protein [Oryza sativa]
  misc_feature (7)..(175): Homolog of NCBI NO: 33943626 NR Description: homeodomain leucine-zipper protein Hox8
  misc_feature (7)..(175): Homolog of NCBI NO: 37533686 NR Description: putative homeodomain leucine zipper protein
  misc_feature (1)..(171): Homolog of NCBI NO: 18034439 NR Description: homeodomain leucine zipper protein CPHB-4
  misc_feature (28)..(141): Homolog of NCBI NO: 34902432 NR Description: Unknown protein [Oryza sativa (japonica
  misc_feature (1)..(175): Homolog of NCBI NO: 8133126 NR Description: hb-6-like protein [Brassica rapa subsp.
  misc_feature (13)..(146): Homolog of NCBI NO: 18399966 NR Description: homeodomain transcription factor (ATHB-6)
  misc_feature (28)..(141): Homolog of NCBI NO: 34902432 NR Description: Unknown protein [Oryza sativa (japonica
  misc_feature (1)..(171): Homolog of NCBI NO: 18034439 NR Description: homeodomain leucine zipper protein CPHB-4
  misc_feature (7)..(175): Homolog of NCBI NO: 37533686 NR Description: putative homeodomain leucine zipper protein
  misc_feature (7)..(175): Homolog of NCBI NO: 33943626 NR Description: homeodomain leucine-zipper protein Hox8
  misc_feature (1)..(173): Homolog of NCBI NO: 5006853 NR Description: homeodomain leucine zipper protein [Oryza sativa]

SEQ ID NO: 19912 - protein, 163 aa, Zea mays subsp. mays; identical to SEQ ID NO: 18099
  peptide (1)..(163): Ceres Seq. ID no. 12358013
  misc_feature (22)..(76): Pfam Name: Homeobox domain Pfam Description: Homeobox domain
  misc_feature (22)..(76): Pfam Name: Homeobox domain Pfam Description: Homeobox domain
  misc_feature (1)..(133): Homolog of NCBI NO: 25386231 NR Description: homeodomain transcription factor (ATHB-6)
  misc_feature (1)..(133): Homolog of NCBI NO: 18399966 NR Description: homeodomain transcription factor (ATHB-6)
  misc_feature (1)..(133): Homolog of NCBI NO: 5305602 NR Description: homeobox protein ATHB6 [Arabidopsis thaliana]
  misc_feature (1)..(162): Homolog of NCBI NO: 8133126 NR Description: hb-6-like protein [Brassica rapa subsp.
  misc_feature (10)..(138): Homolog of NCBI NO: 22651698 NR Description: homeodomain protein Hfi22 [Nicotiana tabacum]
  misc_feature (1)..(133): Homolog of NCBI NO: 25386231 NR Description: homeodomain transcription factor (ATHB-6)
  misc_feature (1)..(133): Homolog of NCBI NO: 5305602 NR Description: homeobox protein ATHB6 [Arabidopsis thaliana]
  misc_feature (10)..(138): Homolog of NCBI NO: 22651698 NR Description: homeodomain protein Hfi22 [Nicotiana tabacum]
  misc_feature (1)..(160): Homolog of NCBI NO: 5006853 NR Description: homeodomain leucine zipper protein [Oryza sativa]
  misc_feature (1)..(162): Homolog of NCBI NO: 33943626 NR Description: homeodomain leucine-zipper protein Hox8
  misc_feature (1)..(162): Homolog of NCBI NO: 37533686 NR Description: putative homeodomain leucine zipper protein
  misc_feature (1)..(158): Homolog of NCBI NO: 18034439 NR Description: homeodomain leucine zipper protein CPHB-4
  misc_feature (15)..(128): Homolog of NCBI NO: 34902432 NR Description: Unknown protein [Oryza sativa (japonica
  misc_feature (1)..(162): Homolog of NCBI NO: 8133126 NR Description: hb-6-like protein [Brassica rapa subsp.
  misc_feature (1)..(133): Homolog of NCBI NO: 18399966 NR Description: homeodomain transcription factor (ATHB-6)
  misc_feature (15)..(128): Homolog of NCBI NO: 34902432 NR Description: Unknown protein [Oryza sativa (japonica
  misc_feature (1)..(158): Homolog of NCBI NO: 18034439 NR Description: homeodomain leucine zipper protein CPHB-4
  misc_feature (1)..(162): Homolog of NCBI NO: 37533686 NR Description: putative homeodomain leucine zipper protein
  misc_feature (1)..(162): Homolog of NCBI NO: 33943626 NR Description: homeodomain leucine-zipper protein Hox8
  misc_feature (1)..(160): Homolog of NCBI NO: 5006853 NR Description: homeodomain leucine zipper protein [Oryza sativa]

SEQ ID NO: 19913 - DNA, 570 bp, Zea mays subsp. mays
  misc_feature (1)..(570): Ceres Seq. ID no. 12378176
  misc_feature: MA Experiment ID: 108530 Result: Down-regulated in Transcription
  misc_feature: MA Experiment 108530 PARAMETER Experiment Name: Zm_Imbibed_Seeds_P Parameter: Age (day) Value: 6 vs. 2
  misc_feature: MA Experiment 108530 PARAMETER Experiment Name: Zm_Imbibed_Seeds_P Parameter: Organism Value: Zea mays
  misc_feature: MA Experiment 108530 PARAMETER Experiment Name: Zm_Imbibed_Seeds_P Parameter: Plant Line Value: 35A19
  misc_feature: MA Experiment 108530 PARAMETER Experiment Name: Zm_Imbibed_Seeds_P Parameter: Tissue Value: Aerial vs. Embryo
tgcatgtttgaagggtctgaatggagttccagacattgtagagtgctcttttgtgcaatcaactgtgacagagttgccattctttgcctccaaggttcggctcggcaagaatggagtggaggaagtgcttggtctgggtgagctcaacgagttcgagaagaagggtctggaaaacctcaagggcgagctcaagtcttccatcgacaagggtatcaagtttgcccacgggaactaggcaccttgcccggcttctaacaattgatgccccttgcatttttgtttgactgcctatttttcctgccccccgtatggttggggcaatgaggcgtagtggtcgataataaaacccagcggaacaaagaaaacgtgtaccagaaactgtttgcaaacaccggtgccttttttttgtgttgaaccaccattagttgagccgtgagggaatggtgaacaagctttccacttgctcatttccgagcgcttctctttgattgtatccatggtttggactcatgactgtacgtcttggcagttggcttggcacccaggaatcnnnncactggagttgctgcc

SEQ ID NO: 19914 - protein, 77 aa, Zea mays subsp. mays
  peptide (1)..(77): Ceres Seq. ID no. 12378177
  misc_feature (1)..(74): Pfam Name: lactate/malate dehydrogenase, alpha/beta Pfam Description: lactate/malate dehydrogenase, alpha/beta
  misc_feature (1)..(75): Homolog of NCBI NO: 15232468 NR Description: mitochondrial NAD-dependent malate dehydrogenase,
  misc_feature (1)..(77): Homolog of NCBI NO: 21388552 NR Description: putative mitochondrial NAD-dependent malate
  misc_feature (1)..(77): Homolog of NCBI NO: 21388546 NR Description: putative mitochondrial NAD-dependent malate
  misc_feature (1)..(77): Homolog of NCBI NO: 21388544 NR Description: putative mitochondrial NAD-dependent malate
  misc_feature (1)..(75): Homolog of NCBI NO: 34911788 NR Description: putative malate dehydrogenase
ACLKGLNGVPDIVECSFVQSTVTELPFFASKVRLGKNGVEEVLGLGELNEFEKKGLENLKGELKSSIDKGIKFAHGN

SEQ ID NO: 19915 - protein, 57 aa, Zea mays subsp. mays
  peptide (1)..(57): Ceres Seq. ID no. 12378178
MEWRKCLVWVSSTSSRRRVWKTSRASSSLPSTRVSSLPTGTRHLARLLTIDAPCIFV

SEQ ID NO: 19916 - protein, 46 aa, Zea mays subsp. mays
  peptide (1)..(46): Ceres Seq. ID no. 12378179
CMFEGSEWSSRHCRVLFCAINCDRVAILCLQGSARQEWSGGSAWSG

SEQ ID NO: 19917 - DNA, 417 bp, Zea mays subsp. mays
  misc_feature (1)..(417): Ceres Seq. ID no. 13624351
  misc_feature: MA Experiment ID: 20000487 Result: Up-regulated in Transcription
  misc_feature: MA Experiment 20000487 PARAMETER Experiment Name: Zm_50mM_NH4NO3_L_to_H_P Parameter: Organism Value: Zea mays
  misc_feature: MA Experiment 20000487 PARAMETER Experiment Name: Zm_50mM_NH4NO3_L_to_H_P Parameter: Timepoint (hr) Value: 4
  misc_feature: MA Experiment 20000487 PARAMETER Experiment Name: Zm_50mM_NH4NO3_L_to_H_P Parameter: Tissue Value: Leaves
  misc_feature: MA Experiment 20000487 PARAMETER Experiment Name: Zm_50mM_NH4NO3_L_to_H_P Parameter: Treatment Value: 50mM NH4NO3 vs. 100mM Mannitol
atctggactctggagtctgttgtctgcgtgtgtgcggctggttctctctgccaccgcacgagtcgcagcagagagggaaaaaccctagcagcctcccttcgtcccaactcccaaccccgcgaccccatggccgcatctaacggcggcggcggcccggcccgatctccgcagaggcggaggcggcgcttggagaggctatcaagctggtgttcgggcggtggacggcgctgcagatggcggtggagaaccagtggggcggccgcgactcccgcgccaaggccgaccagttgggcgagtccatcctattctggttctgccgcactaagggtccatattatttcgaagacttggttgatatgatgtatgacaaaatttctgaatcttttaatgcctactttgaggataatagtattgagg

SEQ ID NO: 19918 - protein, 119 aa, Zea mays subsp. mays
  peptide (1)..(119): Ceres Seq. ID no. 13624352
IWTLESVVCVCAAGSLCHRTSRSREGKTLAASLRPNSQPRDPMAASNGGGGPARSPQRRRRRLERLSSWCSGGGRRCRWRWRTSGAAATPAPRPTSWASPSYSGSAALRVHIISKTWLI

SEQ ID NO: 19919 - protein, 77 aa, Zea mays subsp. mays
  peptide (1)..(77): Ceres Seq. ID no. 13624353
MAASNGGGGPARSPQRRRRRLERLSSWCSGGGRRCRWRWRTSGAAATPAPRPTSWASPSYSGSAALRVHIISKTWLI

SEQ ID NO: 19920 - protein, 61 aa, Zea mays subsp. mays
  peptide (1)..(61): Ceres Seq. ID no. 13624354
  misc_feature (1)..(60): Homolog of NCBI NO: 15241108 NR Description: expressed protein [Arabidopsis thaliana]
MAVENQWGGRDSRAKADQLGESILFWFCRTKGPYYFEDLVDMMYDKISESFNAYFEDNSIE

SEQ ID NO: 19921 - DNA, 675 bp, Zea mays subsp. mays; identical to SEQ ID NO: 19598
  misc_feature (1)..(675): Ceres Seq. ID no. 12375559
  misc_feature: MA Experiment ID: 108543 Result: Up-regulated in Transcription

SEQ ID NO: 19922 - protein, 225 aa, Zea mays subsp. mays; identical to SEQ ID NO: 19599
  peptide (1)..(225): Ceres Seq. ID no. 12375560
  misc_feature (154)..(180): Pfam Name: Zinc finger C-x8-C-x5-C-x3-H type (and similar) Pfam Description: Zinc finger C-x8-C-x5-C-x3-H type (and similar)
  misc_feature (154)..(180): Pfam Name: Zinc finger C-x8-C-x5-C-x3-H type (and similar) Pfam Description: Zinc finger C-x8-C-x5-C-x3-H type (and similar)
  misc_feature (150)..(224): Homolog of NCBI NO: 12321969 NR Description: zinc finger protein, putative, 5' partial;
  misc_feature (150)..(224): Homolog of NCBI NO: 11994409 NR Description: zinc finger protein-like [Arabidopsis thaliana]
  misc_feature (151)..(224): Homolog of NCBI NO: 34902926 NR Description: putative zinc finger protein
  misc_feature (113)..(224): Homolog of NCBI NO: 18390466 NR Description: zinc finger protein 2, putative
  misc_feature (150)..(224): Homolog of NCBI NO: 34902926 NR Description: putative zinc finger protein
  misc_feature (150)..(224): Homolog of NCBI NO: 12321969 NR Description: zinc finger protein, putative, 5' partial;
  misc_feature (151)..(224): Homolog of NCBI NO: 34902926 NR Description: putative zinc finger protein
  misc_feature (150)..(224): Homolog of NCBI NO: 34902926 NR Description: putative zinc finger protein
  misc_feature (33)..(194): Homolog of NCBI NO: 34912676 NR Description: P0686E09.7 [Oryza sativa (japonica
  misc_feature (103)..(224): Homolog of NCBI NO: 22331028 NR Description: hypothetical protein
  misc_feature (70)..(224): Homolog of NCBI NO: 22507458 NR Description: Unknown (protein for MGC:30371) [Mus musculus]
  misc_feature (163)..(224): Homolog of NCBI NO: 11994409 NR Description: zinc finger protein-like [Arabidopsis thaliana]
  misc_feature (176)..(224): Homolog of NCBI NO: 12321969 NR Description: zinc finger protein, putative, 5' partial;
  misc_feature (113)..(224): Homolog of NCBI NO: 18390466 NR Description: zinc finger protein 2, putative
  misc_feature (150)..(224): Homolog of NCBI NO: 11994409 NR Description: zinc finger protein-like [Arabidopsis thaliana]
  misc_feature (176)..(224): Homolog of NCBI NO: 12321969 NR Description: zinc finger protein, putative, 5' partial;
  misc_feature (163)..(224): Homolog of NCBI NO: 11994409 NR Description: zinc finger protein-like [Arabidopsis thaliana]
  misc_feature (70)..(224): Homolog of NCBI NO: 22507458 NR Description: Unknown (protein for MGC:30371) [Mus musculus]
  misc_feature (103)..(224): Homolog of NCBI NO: 22331028 NR Description: hypothetical protein
  misc_feature (33)..(194): Homolog of NCBI NO: 34912676 NR Description: P0686E09.7 [Oryza sativa (japonica

SEQ ID NO: 19923 - protein, 213 aa, Zea mays subsp. mays; identical to SEQ ID NO: 19600
  peptide (1)..(213): Ceres Seq. ID no. 12375561
  misc_feature (142)..(168): Pfam Name: Zinc finger C-x8-C-x5-C-x3-H type (and similar) Pfam Description: Zinc finger C-x8-C-x5-C-x3-H type (and similar)
  misc_feature (142)..(168): Pfam Name: Zinc finger C-x8-C-x5-C-x3-H type (and similar) Pfam Description: Zinc finger C-x8-C-x5-C-x3-H type (and similar)
  misc_feature (138)..(212): Homolog of NCBI NO: 12321969 NR Description: zinc finger protein, putative, 5' partial;
  misc_feature (138)..(212): Homolog of NCBI NO: 11994409 NR Description: zinc finger protein-like [Arabidopsis thaliana]
  misc_feature (139)..(212): Homolog of NCBI NO: 34902926 NR Description: putative zinc finger protein
  misc_feature (101)..(212): Homolog of NCBI NO: 18390466 NR Description: zinc finger protein 2, putative
  misc_feature (138)..(212): Homolog of NCBI NO: 34902926 NR Description: putative zinc finger protein
  misc_feature (138)..(212): Homolog of NCBI NO: 12321969 NR Description: zinc finger protein, putative, 5' partial;
  misc_feature (139)..(212): Homolog of NCBI NO: 34902926 NR Description: putative zinc finger protein
  misc_feature (138)..(212): Homolog of NCBI NO: 34902926 NR Description: putative zinc finger protein
  misc_feature (21)..(182): Homolog of NCBI NO: 34912676 NR Description: P0686E09.7 [Oryza sativa (japonica
  misc_feature (91)..(212): Homolog of NCBI NO: 22331028 NR Description: hypothetical protein
  misc_feature (58)..(212): Homolog of NCBI NO: 22507458 NR Description: Unknown (protein for MGC:30371) [Mus musculus]
  misc_feature (151)..(212): Homolog of NCBI NO: 11994409 NR Description: zinc finger protein-like [Arabidopsis thaliana]
  misc_feature (164)..(212): Homolog of NCBI NO: 12321969 NR Description: zinc finger protein, putative, 5' partial;
  misc_feature (101)..(212): Homolog of NCBI NO: 18390466 NR Description: zinc finger protein 2, putative
  misc_feature (138)..(212): Homolog of NCBI NO: 11994409 NR Description: zinc finger protein-like [Arabidopsis thaliana]
  misc_feature (164)..(212): Homolog of NCBI NO: 12321969 NR Description: zinc finger protein, putative, 5' partial;
  misc_feature (151)..(212): Homolog of NCBI NO: 11994409 NR Description: zinc finger protein-like [Arabidopsis thaliana]
  misc_feature (58)..(212): Homolog of NCBI NO: 22507458 NR Description: Unknown (protein for MGC:30371) [Mus musculus]
  misc_feature (91)..(212): Homolog of NCBI NO: 22331028 NR Description: hypothetical protein
  misc_feature (21)..(182): Homolog of NCBI NO: 34912676 NR Description: P0686E09.7 [Oryza sativa (japonica

SEQ ID NO: 19924 - protein, 181 aa, Zea mays subsp. mays; identical to SEQ ID NO: 19601
  peptide (1)..(181): Ceres Seq. ID no. 12375562
  misc_feature (110)..(136): Pfam Name: Zinc finger C-x8-C-x5-C-x3-H type (and similar) Pfam Description: Zinc finger C-x8-C-x5-C-x3-H type (and similar)
  misc_feature (110)..(136): Pfam Name: Zinc finger C-x8-C-x5-C-x3-H type (and similar) Pfam Description: Zinc finger C-x8-C-x5-C-x3-H type (and similar)
  misc_feature (106)..(180): Homolog of NCBI NO: 12321969 NR Description: zinc finger protein, putative, 5' partial;
  misc_feature (106)..(180): Homolog of NCBI NO: 11994409 NR Description: zinc finger protein-like [Arabidopsis thaliana]
  misc_feature (107)..(180): Homolog of NCBI NO: 34902926 NR Description: putative zinc finger protein
  misc_feature (69)..(180): Homolog of NCBI NO: 18390466 NR Description: zinc finger protein 2, putative
  misc_feature (106)..(180): Homolog of NCBI NO: 34902926 NR Description: putative zinc finger protein
  misc_feature (106)..(180): Homolog of NCBI NO: 12321969 NR Description: zinc finger protein, putative, 5' partial;
  misc_feature (107)..(180): Homolog of NCBI NO: 34902926 NR Description: putative zinc finger protein
  misc_feature (106)..(180): Homolog of NCBI NO: 34902926 NR Description: putative zinc finger protein
  misc_feature (1)..(150): Homolog of NCBI NO: 34912676 NR Description: P0686E09.7 [Oryza sativa (japonica
  misc_feature (59)..(180): Homolog of NCBI NO: 22331028 NR Description: hypothetical protein
  misc_feature (26)..(180): Homolog of NCBI NO: 22507458 NR Description: Unknown (protein for MGC:30371) [Mus musculus]
  misc_feature (119)..(180): Homolog of NCBI NO: 11994409 NR Description: zinc finger protein-like [Arabidopsis thaliana]
  misc_feature (132)..(180): Homolog of NCBI NO: 12321969 NR Description: zinc finger protein, putative, 5' partial;
  misc_feature (69)..(180): Homolog of NCBI NO: 18390466 NR Description: zinc finger protein 2, putative
  misc_feature (106)..(180): Homolog of NCBI NO: 11994409 NR Description: zinc finger protein-like [Arabidopsis thaliana]
  misc_feature (132)..(180): Homolog of NCBI NO: 12321969 NR Description: zinc finger protein, putative, 5' partial;
  misc_feature (119)..(180): Homolog of NCBI NO: 11994409 NR Description: zinc finger protein-like [Arabidopsis thaliana]
  misc_feature (26)..(180): Homolog of NCBI NO: 22507458 NR Description: Unknown (protein for MGC:30371) [Mus musculus]
  misc_feature (59)..(180): Homolog of NCBI NO: 22331028 NR Description: hypothetical protein
  misc_feature (1)..(150): Homolog of NCBI NO: 34912676 NR Description: P0686E09.7 [Oryza sativa (japonica

SEQ ID NO: 19925 - DNA, 403 bp, Zea mays subsp. mays
  misc_feature (1)..(403): Ceres Seq. ID no. 13589415
  misc_feature: MA Experiment ID: 108522 Result: Down-regulated in Transcription
  misc_feature: MA Experiment 108522 PARAMETER Experiment Name: Zm_42deg_Heat_P Parameter: Age (day) Value: 8
  misc_feature: MA Experiment 108522 PARAMETER Experiment Name: Zm_42deg_Heat_P Parameter: Organism Value: Zea mays
  misc_feature: MA Experiment 108522 PARAMETER Experiment Name: Zm_42deg_Heat_P Parameter: Plant Line Value: 35A19
  misc_feature: MA Experiment 108522 PARAMETER Experiment Name: Zm_42deg_Heat_P Parameter: Temperature (deg C) Value: 42 vs. 22
  misc_feature: MA Experiment 108522 PARAMETER Experiment Name: Zm_42deg_Heat_P Parameter: Timepoint (hr) Value: 1
  misc_feature: MA Experiment 108522 PARAMETER Experiment Name: Zm_42deg_Heat_P Parameter: Tissue Value: Aerial
  misc_feature: MA Experiment ID: 108528 Result: Down-regulated in Transcription
  misc_feature: MA Experiment 108528 PARAMETER Experiment Name: Zm_Imbibed_Seeds_P Parameter: Age (day) Value: 5 vs. 2
  misc_feature: MA Experiment 108528 PARAMETER Experiment Name: Zm_Imbibed_Seeds_P Parameter: Organism Value: Zea mays
  misc_feature: MA Experiment 108528 PARAMETER Experiment Name: Zm_Imbibed_Seeds_P Parameter: Plant Line Value: 35A19
  misc_feature: MA Experiment 108528 PARAMETER Experiment Name: Zm_Imbibed_Seeds_P Parameter: Tissue Value: Aerial vs. Embryo
  misc_feature: MA Experiment ID: 108529 Result: Down-regulated in Transcription
  misc_feature: MA Experiment 108529 PARAMETER Experiment Name: Zm_Imbibed_Seeds_P Parameter: Age (day) Value: 5 vs. 2
  misc_feature: MA Experiment 108529 PARAMETER Experiment Name: Zm_Imbibed_Seeds_P Parameter: Organism Value: Zea mays
  misc_feature: MA Experiment 108529 PARAMETER Experiment Name: Zm_Imbibed_Seeds_P Parameter: Plant Line Value: 35A19
  misc_feature: MA Experiment 108529 PARAMETER Experiment Name: Zm_Imbibed_Seeds_P Parameter: Tissue Value: Roots vs. Embryo
  misc_feature: MA Experiment ID: 108530 Result: Down-regulated in Transcription
  misc_feature: MA Experiment 108530 PARAMETER Experiment Name: Zm_Imbibed_Seeds_P Parameter: Age (day) Value: 6 vs. 2
  misc_feature: MA Experiment 108530 PARAMETER Experiment Name: Zm_Imbibed_Seeds_P Parameter: Organism Value: Zea mays
  misc_feature: MA Experiment 108530 PARAMETER Experiment Name: Zm_Imbibed_Seeds_P Parameter: Plant Line Value: 35A19
  misc_feature: MA Experiment 108530 PARAMETER Experiment Name: Zm_Imbibed_Seeds_P Parameter: Tissue Value: Aerial vs. Embryo
  misc_feature: MA Experiment ID: 108535 Result: Up-regulated in Transcription
  misc_feature: MA Experiment 108535 PARAMETER Experiment Name: Zm_Meristem_P Parameter: Age (day) Value: 8
  misc_feature: MA Experiment 108535 PARAMETER Experiment Name: Zm_Meristem_P Parameter: Organism Value: Zea mays
  misc_feature: MA Experiment 108535 PARAMETER Experiment Name: Zm_Meristem_P Parameter: Plant Line Value: 35A19
  misc_feature: MA Experiment 108535 PARAMETER Experiment Name: Zm_Meristem_P Parameter: Tissue Value: Root Meristem vs. Above Root Meristem
  misc_feature: MA Experiment ID: 108544 Result: Down-regulated in Transcription
  misc_feature: MA Experiment ID: 108556 Result: Down-regulated in Transcription
  misc_feature: MA Experiment 108556 PARAMETER Experiment Name: Zm_Drought_P Parameter: Age (day) Value: 9
  misc_feature: MA Experiment 108556 PARAMETER Experiment Name: Zm_Drought_P Parameter: Organism Value: Zea mays
  misc_feature: MA Experiment 108556 PARAMETER Experiment Name: Zm_Drought_P Parameter: Plant Line Value: 35A19
  misc_feature: MA Experiment 108556 PARAMETER Experiment Name: Zm_Drought_P Parameter: Timepoint (hr) Value: 24
  misc_feature: MA Experiment 108556 PARAMETER Experiment Name: Zm_Drought_P Parameter: Tissue Value: Aerial
  misc_feature: MA Experiment 108556 PARAMETER Experiment Name: Zm_Drought_P Parameter: Treatment Value: Drought vs. No Drought
  misc_feature: MA Experiment ID: 20000108 Result: Up-regulated in Transcription
  misc_feature: MA Experiment 20000108 PARAMETER Experiment Name: Zm_Root-Tips_P Parameter: Age (day) Value: 12
  misc_feature: MA Experiment 20000108 PARAMETER Experiment Name: Zm_Root-Tips_P Parameter: Organism Value: Zea mays
  misc_feature: MA Experiment 20000108 PARAMETER Experiment Name: Zm_Root-Tips_P Parameter: Tissue Value: Root tips vs. Root mid region    35
  misc_feature: MA Experiment 20000108 PARAMETER Experiment Name: Zm_Root-Tips_P Parameter: Tissue Value: Root tips vs. Root mid region   Sequence Listing-Misc Features (4)
  misc_feature: MA Experiment ID: 20000487 Result: Up-regulated in Transcription
  misc_feature: MA Experiment 20000487 PARAMETER Experiment Name: Zm_50mM_NH4NO3_L_to_H_P Parameter: Organism Value: Zea mays
  misc_feature: MA Experiment 20000487 PARAMETER Experiment Name: Zm_50mM_NH4NO3_L_to_H_P Parameter: Timepoint (hr) Value: 4
  misc_feature: MA Experiment 20000487 PARAMETER Experiment Name: Zm_50mM_NH4NO3_L_to_H_P Parameter: Tissue Value: Leaves
  misc_feature: MA Experiment 20000487 PARAMETER Experiment Name: Zm_50mM_NH4NO3_L_to_H_P Parameter: Treatment Value: 50mM NH4NO3 vs. 100mM Mannitol
  misc_feature: MA Experiment ID: 20000488 Result: Up-regulated in Transcription
  misc_feature: MA Experiment 20000488 PARAMETER Experiment Name: Zm_50mM_NH4NO3_L_to_H_P Parameter: Organism Value: Zea mays
  misc_feature: MA Experiment 20000488 PARAMETER Experiment Name: Zm_50mM_NH4NO3_L_to_H_P Parameter: Timepoint (hr) Value: 8
  misc_feature: MA Experiment 20000488 PARAMETER Experiment Name: Zm_50mM_NH4NO3_L_to_H_P Parameter: Tissue Value: Leaves
  misc_feature: MA Experiment 20000488 PARAMETER Experiment Name: Zm_50mM_NH4NO3_L_to_H_P Parameter: Treatment Value: 50mM NH4NO3 vs. 100mM Mannitol
  misc_feature: MA Experiment ID: 20000535 Result: Up-regulated in Transcription
  misc_feature: MA Experiment 20000535 PARAMETER Experiment Name: Zm_Hybrid_Seed_Dev_P Parameter: DAP Value: 30 vs. 12
  misc_feature: MA Experiment 20000535 PARAMETER Experiment Name: Zm_Hybrid_Seed_Dev_P Parameter: Organism Value: Zea mays
  misc_feature: MA Experiment 20000535 PARAMETER Experiment Name: Zm_Hybrid_Seed_Dev_P Parameter: Plant Line Value: 35A19
  misc_feature: MA Experiment 20000535 PARAMETER Experiment Name: Zm_Hybrid_Seed_Dev_P Parameter: Tissue Value: Embryo vs. Unfert Floret
  misc_feature: MA Experiment ID: 20001606 Result: Up-regulated in Transcription
  misc_feature: MA Experiment 20001606 PARAMETER Experiment Name: Zm_50ppm_KNO3_L-to-H_P Parameter: Age (day) Value: 19
  misc_feature: MA Experiment 20001606 PARAMETER Experiment Name: Zm_50ppm_KNO3_L-to-H_P Parameter: Organism Value: Zea mays
  misc_feature: MA Experiment 20001606 PARAMETER Experiment Name: Zm_50ppm_KNO3_L-to-H_P Parameter: Plant Line Value: 35A19
  misc_feature: MA Experiment 20001606 PARAMETER Experiment Name: Zm_50ppm_KNO3_L-to-H_P Parameter: Timepoint (hr) Value: 8
  misc_feature: MA Experiment 20001606 PARAMETER Experiment Name: Zm_50ppm_KNO3_L-to-H_P Parameter: Tissue Value: Shoots
  misc_feature: MA Experiment 20001606 PARAMETER Experiment Name: Zm_50ppm_KNO3_L-to-H_P Parameter: Treatment Value: 50ppm KNO3 vs. 50ppm KCl
accctgacttgtgcgccatcacacacaagacacaaccccactcacccggcagggaggccctctttgtcggcggaggccatggtttccctcaagccgcagaagaggctcgccgcgggagtcctaaaatgtggcaaggggaaggtgtggcttgaccccaacgaggtctacgagatctcgatggctaactcgcgtcagaacattcgtaagctggtgaaggatggattcataattaagaagccacagaaaatccactcaaggtcccgggcaaggagggcccatgaggccaagcagaaggggaggcactctggttacggtaagcgcaggggtaccagggaggctaggctccccaccaagatcctttggatgcgcaggatgcgtgtcctcaggcgtctgctgcgcaagt

SEQ ID NO: 19926 - protein, 134 aa, Zea mays subsp. mays
  peptide (1)..(134): Ceres Seq. ID no. 13589416
  misc_feature (28)..(133): Pfam Name: Ribosomal protein L19e Pfam Description: Ribosomal protein L19e
  misc_feature (27)..(133): Homolog of NCBI NO: 19075307 NR Description: 60S ribosomal protein L19B [Schizosaccharomyces
  misc_feature (27)..(133): Homolog of NCBI NO: 28630352 NR Description: ribosomal protein L19 [Branchiostoma lanceolatum]
  misc_feature (27)..(133): Homolog of NCBI NO: 28200276 NR Description: ribosomal protein L19 [Branchiostoma belcheri
  misc_feature (27)..(133): Homolog of NCBI NO: 15235290 NR Description: 60S ribosomal protein L19 (RPL19C) [Arabidopsis
  misc_feature (27)..(133): Homolog of NCBI NO: 7440943 NR Description: ribosomal protein L19.T2H3.3 - Arabidopsis
  misc_feature (27)..(133): Homolog of NCBI NO: 18087585 NR Description: At1g02780/T14P4_3 [Arabidopsis thaliana]
  misc_feature (27)..(133): Homolog of NCBI NO: 15218602 NR Description: 60S ribosomal protein L19 (RPL19A) [Arabidopsis
  misc_feature (27)..(133): Homolog of NCBI NO: 15228314 NR Description: 60S ribosomal protein L19 (RPL19B) [Arabidopsis
  misc_feature (27)..(133): Homolog of NCBI NO: 40287526 NR Description: 60S ribosomal protein L19 [Capsicum annuum]
  misc_feature (27)..(133): Homolog of NCBI NO: 29837764 NR Description: putative ribosomal protein L19
TLTCAPSHTRHNPTHPAGRPSLSAEAMVSLKPQKRLAAGVLKCGKGKVWLDPNEVYEISMANSRQNIRKLVKDGFIIKKPQKIHSRSRARRAHEAKQKGRHSGYGKRRGTREARLPTKILWMRRMRVLRRLLRK

SEQ ID NO: 19927 - protein, 108 aa, Zea mays subsp. mays
  peptide (1)..(108): Ceres Seq. ID no. 13589417
  misc_feature (2)..(107): Pfam Name: Ribosomal protein L19e Pfam Description: Ribosomal protein L19e
  misc_feature (1)..(107): Homolog of NCBI NO: 19075307 NR Description: 60S ribosomal protein L19B [Schizosaccharomyces
  misc_feature (1)..(107): Homolog of NCBI NO: 28630352 NR Description: ribosomal protein L19 [Branchiostoma lanceolatum]
  misc_feature (1)..(107): Homolog of NCBI NO: 28200276 NR Description: ribosomal protein L19 [Branchiostoma belcheri
  misc_feature (1)..(107): Homolog of NCBI NO: 15235290 NR Description: 60S ribosomal protein L19 (RPL19C) [Arabidopsis
  misc_feature (1)..(107): Homolog of NCBI NO: 7440943 NR Description: ribosomal protein L19.T2H3.3 - Arabidopsis
  misc_feature (1)..(107): Homolog of NCBI NO: 18087585 NR Description: At1g02780/T14P4_3 [Arabidopsis thaliana]
  misc_feature (1)..(107): Homolog of NCBI NO: 15218602 NR Description: 60S ribosomal protein L19 (RPL19A) [Arabidopsis
  misc_feature (1)..(107): Homolog of NCBI NO: 15228314 NR Description: 60S ribosomal protein L19 (RPL19B) [Arabidopsis
  misc_feature (1)..(107): Homolog of NCBI NO: 40287526 NR Description: 60S ribosomal protein L19 [Capsicum annuum]
  misc_feature (1)..(107): Homolog of NCBI NO: 29837764 NR Description: putative ribosomal protein L19
MVSLKPQKRLAAGVLKCGKGKVWLDPNEVYEISMANSRQNIRKLVKDGFIIKKPQKIHSRSRARRAHEAKQKGRHSGYGKRRGTREARLPTKILWMRRMRVLRRLLRK

SEQ ID NO: 19928 - protein, 75 aa, Zea mays subsp. mays
  peptide (1)..(75): Ceres Seq. ID no. 13589418
  misc_feature (1)..(74): Pfam Name: Ribosomal protein L19e Pfam Description: Ribosomal protein L19e
  misc_feature (1)..(74): Homolog of NCBI NO: 19075307 NR Description: 60S ribosomal protein L19B [Schizosaccharomyces
  misc_feature (1)..(74): Homolog of NCBI NO: 28630352 NR Description: ribosomal protein L19 [Branchiostoma lanceolatum]
  misc_feature (1)..(74): Homolog of NCBI NO: 28200276 NR Description: ribosomal protein L19 [Branchiostoma belcheri
  misc_feature (1)..(74): Homolog of NCBI NO: 15235290 NR Description: 60S ribosomal protein L19 (RPL19C) [Arabidopsis
  misc_feature (1)..(74): Homolog of NCBI NO: 7440943 NR Description: ribosomal protein L19.T2H3.3 - Arabidopsis
  misc_feature (1)..(74): Homolog of NCBI NO: 18087585 NR Description: At1g02780/T14P4_3 [Arabidopsis thaliana]
  misc_feature (1)..(74): Homolog of NCBI NO: 15218602 NR Description: 60S ribosomal protein L19 (RPL19A) [Arabidopsis
  misc_feature (1)..(74): Homolog of NCBI NO: 15228314 NR Description: 60S ribosomal protein L19 (RPL19B) [Arabidopsis
  misc_feature (1)..(74): Homolog of NCBI NO: 40287526 NR Description: 60S ribosomal protein L19 [Capsicum annuum]
  misc_feature (1)..(74): Homolog of NCBI NO: 29837764 NR Description: putative ribosomal protein L19
MANSRQNIRKLVKDGFIIKKPQKIHSRSRARRAHEAKQKGRHSGYGKRRGTREARLPTKILWMRRMRVLRRLLRK

SEQ ID NO: 19929 - DNA, 1463 bp, Zea mays subsp. mays
  misc_feature (1)..(1463): Ceres Seq. ID no. 12383473
  misc_feature: MA Experiment ID: 108530 Result: Down-regulated in Transcription
  misc_feature: MA Experiment 108530 PARAMETER Experiment Name: Zm_Imbibed_Seeds_P Parameter: Age (day) Value: 6 vs. 2
  misc_feature: MA Experiment 108530 PARAMETER Experiment Name: Zm_Imbibed_Seeds_P Parameter: Organism Value: Zea mays
  misc_feature: MA Experiment 108530 PARAMETER Experiment Name: Zm_Imbibed_Seeds_P Parameter: Plant Line Value: 35A19
  misc_feature: MA Experiment 108530 PARAMETER Experiment Name: Zm_Imbibed_Seeds_P Parameter: Tissue Value: Aerial vs. Embryo
  misc_feature: MA Experiment ID: 108535 Result: Up-regulated in Transcription
  misc_feature: MA Experiment 108535 PARAMETER Experiment Name: Zm_Meristem_P Parameter: Age (day) Value: 8
  misc_feature: MA Experiment 108535 PARAMETER Experiment Name: Zm_Meristem_P Parameter: Organism Value: Zea mays
  misc_feature: MA Experiment 108535 PARAMETER Experiment Name: Zm_Meristem_P Parameter: Plant Line Value: 35A19
  misc_feature: MA Experiment 108535 PARAMETER Experiment Name: Zm_Meristem_P Parameter: Tissue Value: Root Meristem vs. Above Root Meristem
  misc_feature: MA Experiment ID: 108543 Result: Up-regulated in Transcription
  misc_feature: MA Experiment ID: 108544 Result: Down-regulated in Transcription
  misc_feature: MA Experiment ID: 108556 Result: Down-regulated in Transcription
  misc_feature: MA Experiment 108556 PARAMETER Experiment Name: Zm_Drought_P Parameter: Age (day) Value: 9
  misc_feature: MA Experiment 108556 PARAMETER Experiment Name: Zm_Drought_P Parameter: Organism Value: Zea mays
  misc_feature: MA Experiment 108556 PARAMETER Experiment Name: Zm_Drought_P Parameter: Plant Line Value: 35A19
  misc_feature: MA Experiment 108556 PARAMETER Experiment Name: Zm_Drought_P Parameter: Timepoint (hr) Value: 24
  misc_feature: MA Experiment 108556 PARAMETER Experiment Name: Zm_Drought_P Parameter: Tissue Value: Aerial
  misc_feature: MA Experiment 108556 PARAMETER Experiment Name: Zm_Drought_P Parameter: Treatment Value: Drought vs. No Drought
  misc_feature: MA Experiment ID: 20000108 Result: Up-regulated in Transcription
  misc_feature: MA Experiment 20000108 PARAMETER Experiment Name: Zm_Root-Tips_P Parameter: Age (day) Value: 12
  misc_feature: MA Experiment 20000108 PARAMETER Experiment Name: Zm_Root-Tips_P Parameter: Organism Value: Zea mays
  misc_feature: MA Experiment 20000108 PARAMETER Experiment Name: Zm_Root-Tips_P Parameter: Tissue Value: Root tips vs. Root mid region    35
  misc_feature: MA Experiment 20000108 PARAMETER Experiment Name: Zm_Root-Tips_P Parameter: Tissue Value: Root tips vs. Root mid region   Sequence Listing-Misc Features (4)
  misc_feature: MA Experiment ID: 20000477 Result: Down-regulated in Transcription
  misc_feature: MA Experiment 20000477 PARAMETER Experiment Name: Zm_5mM_SA_P Parameter: Age (day) Value: 10
  misc_feature: MA Experiment 20000477 PARAMETER Experiment Name: Zm_5mM_SA_P Parameter: Organism Value: Zea mays
  misc_feature: MA Experiment 20000477 PARAMETER Experiment Name: Zm_5mM_SA_P Parameter: Plant Line Value: 35A19
  misc_feature: MA Experiment 20000477 PARAMETER Experiment Name: Zm_5mM_SA_P Parameter: Timepoint (hr) Value: 48
  misc_feature: MA Experiment 20000477 PARAMETER Experiment Name: Zm_5mM_SA_P Parameter: Tissue Value: Aerial
  misc_feature: MA Experiment 20000477 PARAMETER Experiment Name: Zm_5mM_SA_P Parameter: Treatment Value: 5mM SA vs. No Treatment
  misc_feature: MA Experiment ID: 20000478 Result: Down-regulated in Transcription
  misc_feature: MA Experiment 20000478 PARAMETER Experiment Name: Zm_5mM_SA_P Parameter: Age (day) Value: 11
  misc_feature: MA Experiment 20000478 PARAMETER Experiment Name: Zm_5mM_SA_P Parameter: Organism Value: Zea mays
  misc_feature: MA Experiment 20000478 PARAMETER Experiment Name: Zm_5mM_SA_P Parameter: Plant Line Value: 35A19
  misc_feature: MA Experiment 20000478 PARAMETER Experiment Name: Zm_5mM_SA_P Parameter: Timepoint (hr) Value: 72
  misc_feature: MA Experiment 20000478 PARAMETER Experiment Name: Zm_5mM_SA_P Parameter: Tissue Value: Aerial
  misc_feature: MA Experiment 20000478 PARAMETER Experiment Name: Zm_5mM_SA_P Parameter: Treatment Value: 5mM SA vs. No Treatment
  misc_feature: MA Experiment ID: 20000480 Result: Down-regulated in Transcription
  misc_feature: MA Experiment 20000480 PARAMETER Experiment Name: Zm_Drought_P Parameter: Age (day) Value: 11
  misc_feature: MA Experiment 20000480 PARAMETER Experiment Name: Zm_Drought_P Parameter: Organism Value: Zea mays
  misc_feature: MA Experiment 20000480 PARAMETER Experiment Name: Zm_Drought_P Parameter: Plant Line Value: 35A19
  misc_feature: MA Experiment 20000480 PARAMETER Experiment Name: Zm_Drought_P Parameter: Timepoint (hr) Value: 72
  misc_feature: MA Experiment 20000480 PARAMETER Experiment Name: Zm_Drought_P Parameter: Tissue Value: Aerial
  misc_feature: MA Experiment 20000480 PARAMETER Experiment Name: Zm_Drought_P Parameter: Treatment Value: Drought vs. No Drought
  misc_feature: MA Experiment ID: 20000492 Result: Up-regulated in Transcription
  misc_feature: MA Experiment 20000492 PARAMETER Experiment Name: Zm_Hybrid_Seed_Dev_P Parameter: DAP Value: 12
  misc_feature: MA Experiment 20000492 PARAMETER Experiment Name: Zm_Hybrid_Seed_Dev_P Parameter: Organism Value: Zea mays
  misc_feature: MA Experiment 20000492 PARAMETER Experiment Name: Zm_Hybrid_Seed_Dev_P Parameter: Plant Line Value: 35A19
  misc_feature: MA Experiment 20000492 PARAMETER Experiment Name: Zm_Hybrid_Seed_Dev_P Parameter: Tissue Value: Fert Kernel vs. Unfert Floret
  misc_feature: MA Experiment ID: 20000533 Result: Down-regulated in Transcription
  misc_feature: MA Experiment 20000533 PARAMETER Experiment Name: Zm_0.001percent_MeJA_P Parameter: Age (day) Value: 11
  misc_feature: MA Experiment 20000533 PARAMETER Experiment Name: Zm_0.001percent_MeJA_P Parameter: Organism Value: Zea mays
  misc_feature: MA Experiment 20000533 PARAMETER Experiment Name: Zm_0.001percent_MeJA_P Parameter: Plant Line Value: 35A19
  misc_feature: MA Experiment 20000533 PARAMETER Experiment Name: Zm_0.001percent_MeJA_P Parameter: Timepoint (hr) Value: 72
  misc_feature: MA Experiment 20000533 PARAMETER Experiment Name: Zm_0.001percent_MeJA_P Parameter: Tissue Value: Aerial
  misc_feature: MA Experiment 20000533 PARAMETER Experiment Name: Zm_0.001percent_MeJA_P Parameter: Treatment Value: 0.001percent MeJA vs. No Treatment
  misc_feature: MA Experiment ID: 20000626 Result: Down-regulated in Transcription
  misc_feature: MA Experiment 20000626 PARAMETER Experiment Name: Zm_Herbicide-Treatments_P Parameter: Timepoint (hr) Value: 12
  misc_feature: MA Experiment 20000626 PARAMETER Experiment Name: Zm_Herbicide-Treatments_P Parameter: Tissue Value: Aerial
  misc_feature: MA Experiment 20000626 PARAMETER Experiment Name: Zm_Herbicide-Treatments_P Parameter: Treatment Value: Roundup vs. No Treatment
gcacgagaccattacctagaacatcctaatcgaaaacccgatcagtcgccgcccaagcctagcagatccgccggcgagcgcgcgggggcaatgggtgtcgtctcggcagcggcggacgcgattgtcgcggttttctccctcaccatcgtcgtcgcggcgccgctactcgacgcgcagtccgtcctcccgcataccctctacccggcgccgctcctggaactcaagcgctggtacgccgccgagtttggcgactacctcgtggcccagtcccccggcttcttccgtggccttgtttgcctcgagctcgccttccaatggccgctcgccgtcgccacactctacggcatcctcacccgccgccgctgggctgccaccacctccctcatggccggcgttggcaccctcacctccatggtaaagccgtgtttcccttctcccttgtagtggagtcacgattgtaatgcattatgcatgcatgtctggaatttcgtgagaccagtgtctcaccgctgcagctctgcccctgtgccccagatccaaaacactaccatggtggatgcacaattgtacacttaaaagtcagttcagttgatgtggaatccaaacatagtttctcatgtgcttattttgttatgattggctgattgttcaaatgaaatcgtgctggaaaaggttttgtagacccatgggattcagagttacttccatattgtcttggcataccaattgcatttcctgttggtgatgattcccagaatgtcaagctattgccaacatttttagttttgttctctgaaccatggttccttttgacctcaaatgtgctatggataggtgacgttgttcaggttaaatctcaaccgcactgtctcgtattaaatgataggagggaaaaaaatttcttgtcacaatatcagatatcaaatcatcgcaaaaattgagtactgactacctgttatgctagattctgcaattcttggtgagatgttaggttcaggcaaatcaacaccaaagttgcttcagatgtatgttccttatgctgtttttgctgtcattgctattctacgtggactttgctcatgctctggacgcactactgctggttcatcacttgggccttctgcccggaagaagagggtctagatcagcagtgacacttggagaattttcggtttgagacagtggcgccagagcactaatgctggtcagaagacgattatctggatcaggtttctatccctggtatttagcacggatgttgaaaaatccagatagtgttagtggctgtttctctaggatttggtgttcgttttccctgaaatgtgatattcatcttgcctttatttccattttaccctttgattatatgtcttgctaactaagacattgttttgtttactggatgagctgattcaactctggcattgttctggcgaataagtttcataaatccttgtcttggt

SEQ ID NO: 19930 - protein, 147 aa, Zea mays subsp. mays
  peptide (1)..(147): Ceres Seq. ID no. 12383474
  misc_feature (31)..(139): Homolog of NCBI NO: 19526880 NR Description: RIKEN cDNA 1810014L12 [Mus musculus]
  misc_feature (31)..(139): Homolog of NCBI NO: 27688749 NR Description: similar to RIKEN cDNA 1810014L12
  misc_feature (41)..(139): Homolog of NCBI NO: 2135212 NR Description: gene MAC30 protein - human (fragment)
  misc_feature (31)..(138): Homolog of NCBI NO: 15220447 NR Description: hypothetical protein; protein id: At1g05220.1
  misc_feature (31)..(138): Homolog of NCBI NO: 18390494 NR Description: expressed protein
  misc_feature (31)..(138): Homolog of NCBI NO: 18402955 NR Description: expressed protein
  misc_feature (31)..(138): Homolog of NCBI NO: 28411943 NR Description: OSJNBa0027N13.35 [Oryza sativa (japonica
  misc_feature (31)..(138): Homolog of NCBI NO: 28411944 NR Description: OSJNBa0027N13.37 [Oryza sativa (japonica
ARDHYLEHPNRKPDQSPPKPSRSAGERAGAMGVVSAAADAIVAVFSLTIVVAAPLLDAQSVLPHTLYPAPLLELKRWYAAEFGDYLVAQSPGFFRGLVCLELAFQWPLAVATLYGILTRRRWAATTSLMAGVGTLTSMVKPCFPSPL

SEQ ID NO: 19931 - protein, 117 aa, Zea mays subsp. mays
  peptide (1)..(117): Ceres Seq. ID no. 12383475
  misc_feature (1)..(109): Homolog of NCBI NO: 19526880 NR Description: RIKEN cDNA 1810014L12 [Mus musculus]
  misc_feature (1)..(109): Homolog of NCBI NO: 27688749 NR Description: similar to RIKEN cDNA 1810014L12
  misc_feature (11)..(109): Homolog of NCBI NO: 2135212 NR Description: gene MAC30 protein - human (fragment)
  misc_feature (1)..(108): Homolog of NCBI NO: 15220447 NR Description: hypothetical protein; protein id: At1g05220.1
  misc_feature (1)..(108): Homolog of NCBI NO: 18390494 NR Description: expressed protein
  misc_feature (1)..(108): Homolog of NCBI NO: 18402955 NR Description: expressed protein
  misc_feature (1)..(108): Homolog of NCBI NO: 28411943 NR Description: OSJNBa0027N13.35 [Oryza sativa (japonica
  misc_feature (1)..(108): Homolog of NCBI NO: 28411944 NR Description: OSJNBa0027N13.37 [Oryza sativa (japonica
MGVVSAAADAIVAVFSLTIVVAAPLLDAQSVLPHTLYPAPLLELKRWYAAEFGDYLVAQSPGFFRGLVCLELAFQWPLAVATLYGILTRRRWAATTSLMAGVGTLTSMVKPCFPSPL

SEQ ID NO: 19932 - DNA, 1633 bp, Zea mays subsp. mays
  misc_feature (1)..(1633): Ceres Seq. ID no. 13495210
  misc_feature: MA Experiment ID: 108523 Result: Down-regulated in Transcription
  misc_feature: MA Experiment 108523 PARAMETER Experiment Name: Zm_42deg_Heat_P Parameter: Age (day) Value: 8
  misc_feature: MA Experiment 108523 PARAMETER Experiment Name: Zm_42deg_Heat_P Parameter: Organism Value: Zea mays
  misc_feature: MA Experiment 108523 PARAMETER Experiment Name: Zm_42deg_Heat_P Parameter: Plant Line Value: 35A19
  misc_feature: MA Experiment 108523 PARAMETER Experiment Name: Zm_42deg_Heat_P Parameter: Temperature (deg C) Value: 42 vs. 22
  misc_feature: MA Experiment 108523 PARAMETER Experiment Name: Zm_42deg_Heat_P Parameter: Timepoint (hr) Value: 6
  misc_feature: MA Experiment 108523 PARAMETER Experiment Name: Zm_42deg_Heat_P Parameter: Tissue Value: Aerial
  misc_feature: MA Experiment ID: 108528 Result: Down-regulated in Transcription
  misc_feature: MA Experiment 108528 PARAMETER Experiment Name: Zm_Imbibed_Seeds_P Parameter: Age (day) Value: 5 vs. 2
  misc_feature: MA Experiment 108528 PARAMETER Experiment Name: Zm_Imbibed_Seeds_P Parameter: Organism Value: Zea mays
  misc_feature: MA Experiment 108528 PARAMETER Experiment Name: Zm_Imbibed_Seeds_P Parameter: Plant Line Value: 35A19
  misc_feature: MA Experiment 108528 PARAMETER Experiment Name: Zm_Imbibed_Seeds_P Parameter: Tissue Value: Aerial vs. Embryo
  misc_feature: MA Experiment ID: 108529 Result: Up-regulated in Transcription
  misc_feature: MA Experiment 108529 PARAMETER Experiment Name: Zm_Imbibed_Seeds_P Parameter: Age (day) Value: 5 vs. 2
  misc_feature: MA Experiment 108529 PARAMETER Experiment Name: Zm_Imbibed_Seeds_P Parameter: Organism Value: Zea mays
  misc_feature: MA Experiment 108529 PARAMETER Experiment Name: Zm_Imbibed_Seeds_P Parameter: Plant Line Value: 35A19
  misc_feature: MA Experiment 108529 PARAMETER Experiment Name: Zm_Imbibed_Seeds_P Parameter: Tissue Value: Roots vs. Embryo
  misc_feature: MA Experiment ID: 108535 Result: Down-regulated in Transcription
  misc_feature: MA Experiment 108535 PARAMETER Experiment Name: Zm_Meristem_P Parameter: Age (day) Value: 8
  misc_feature: MA Experiment 108535 PARAMETER Experiment Name: Zm_Meristem_P Parameter: Organism Value: Zea mays
  misc_feature: MA Experiment 108535 PARAMETER Experiment Name: Zm_Meristem_P Parameter: Plant Line Value: 35A19
  misc_feature: MA Experiment 108535 PARAMETER Experiment Name: Zm_Meristem_P Parameter: Tissue Value: Root Meristem vs. Above Root Meristem
  misc_feature: MA Experiment ID: 108543 Result: Up-regulated in Transcription
  misc_feature: MA Experiment ID: 108546 Result: Up-regulated in Transcription
  misc_feature: MA Experiment 108546 PARAMETER Experiment Name: Zm_Imbibed_Seeds_P Parameter: Age (day) Value: 3 vs. 2
  misc_feature: MA Experiment 108546 PARAMETER Experiment Name: Zm_Imbibed_Seeds_P Parameter: Organism Value: Zea mays
  misc_feature: MA Experiment 108546 PARAMETER Experiment Name: Zm_Imbibed_Seeds_P Parameter: Plant Line Value: 35A19
  misc_feature: MA Experiment 108546 PARAMETER Experiment Name: Zm_Imbibed_Seeds_P Parameter: Tissue Value: Roots vs. Embryo
  misc_feature: MA Experiment ID: 108547 Result: Down-regulated in Transcription
  misc_feature: MA Experiment 108547 PARAMETER Experiment Name: Zm_Imbibed_Seeds_P Parameter: Age (day) Value: 4 vs. 2
  misc_feature: MA Experiment 108547 PARAMETER Experiment Name: Zm_Imbibed_Seeds_P Parameter: Organism Value: Zea mays
  misc_feature: MA Experiment 108547 PARAMETER Experiment Name: Zm_Imbibed_Seeds_P Parameter: Plant Line Value: 35A19
  misc_feature: MA Experiment 108547 PARAMETER Experiment Name: Zm_Imbibed_Seeds_P Parameter: Tissue Value: Aerial vs. Embryo
  misc_feature: MA Experiment ID: 108689 Result: Down-regulated in Transcription
  misc_feature: MA Experiment 108689 PARAMETER Experiment Name: Zm_Drought_Roots_P Parameter: Age (day) Value: 9
  misc_feature: MA Experiment 108689 PARAMETER Experiment Name: Zm_Drought_Roots_P Parameter: Organism Value: Zea mays
  misc_feature: MA Experiment 108689 PARAMETER Experiment Name: Zm_Drought_Roots_P Parameter: Plant Line Value: 35A19
  misc_feature: MA Experiment 108689 PARAMETER Experiment Name: Zm_Drought_Roots_P Parameter: Timepoint (hr) Value: 24
  misc_feature: MA Experiment 108689 PARAMETER Experiment Name: Zm_Drought_Roots_P Parameter: Tissue Value: Roots
  misc_feature: MA Experiment 108689 PARAMETER Experiment Name: Zm_Drought_Roots_P Parameter: Treatment Value: Drought vs. No Drought
  misc_feature: MA Experiment ID: 20000535 Result: Down-regulated in Transcription
  misc_feature: MA Experiment 20000535 PARAMETER Experiment Name: Zm_Hybrid_Seed_Dev_P Parameter: DAP Value: 30 vs. 12
  misc_feature: MA Experiment 20000535 PARAMETER Experiment Name: Zm_Hybrid_Seed_Dev_P Parameter: Organism Value: Zea mays
  misc_feature: MA Experiment 20000535 PARAMETER Experiment Name: Zm_Hybrid_Seed_Dev_P Parameter: Plant Line Value: 35A19
  misc_feature: MA Experiment 20000535 PARAMETER Experiment Name: Zm_Hybrid_Seed_Dev_P Parameter: Tissue Value: Embryo vs. Unfert Floret
gcacgagaccattacctagaacatcctaatcgaaaaagctgccagcctagctgccaacgattgtcgtaagtcttggagaaactgcgcatcagtttgacctagctgccagcctgatactactcacgaactggcatggcatggtaggtgggttcgggctttcaagcatggcttccacacttttcctctagctactagctcctcccgcgcgcgacggccatggccagcgagctgctgtcgccgctcatcccgcaccagcagcgtcgacgcgctctcgccgtcgacgtggccgcgcccctgctcgcgctcctcctggccgctgtcgccttctcccgctcaccggtggcggcactggtcagctcttcgaggctcgttgacctgacactcctcgccggcgctcaggggaagggagcggtgtgcttggatgggaccccgcctggttaccaccttcggagaggattcggttccggagctcacaactggctcgtcttccttgagggaggaggttggtgcaacaccacgcagagctgctccgagcgcaaaatgaccaacttcggttcatctaagtatatgggagcagtaaacttcactgggatactcagcaatgatcacacagaaaatcctgatttctacaactggaatacagttgtcataaggtactgcgacggagcatcatttgctggggatgcagagggagaagatctggatggaaccaaacttttcttcagaggattgcgtatctgggaagcagttgtagatgaactcatgggaaaaggaatggacgctgctaaacaagccttgcttacaggctgttctgctggttctctagctgcgctactgcactgtgataatttccatggacggtttcctcatgaagtttcagttaaatgcctttctgatgctggattttttattgacgagaaggatttatctggagaaagatccatgcggtcgctcatcagtggagtagttcaccttcagaatgttaaagaagttttacccaatgactgcctccaaaagaaggatccaacagaggcagtgtttctttcctgctgaactgattaagggcatcaccacccccacgtttattctgaactccgattacgattcttggcagatacgaaacattctcgcaccaaatggatcctatcctggccaggaatggtctagttgcaaagcagatatccggaactgcagttgcgcacaaattgatgtactgcatggattcaagaagaaattagtcagtgaattgaaggttgccgaagataacaaggactggggcctgttcattgattcatgctttacccactgtcaaacaccattcgatatcacatggaattcaccgatctcaccaaggctcggcaacaagtctatctcagaggccgttggggattggtatttcgatagaaggcaaaacgcgaaacagattgactgcgagtacccatgcaaccccacatgcagcagtcttctgcctactgcttgattcgcaaagggctgcactgagatcaccaggcttttctcattttcaaattagttttgctgaggattcaaaaagggagctttgccttattggtaaaacctgcaattgactaaacacgacttgcagtagttgtgcttccatcaaaagcaatatgtc

SEQ ID NO: 19933 - protein, 278 aa, Zea mays subsp. mays
  peptide (1)..(278): Ceres Seq. ID no. 13495211
  misc_feature (27)..(254): Pfam Name: Pectinacetylesterase Pfam Description: Pectinacetylesterase
  misc_feature (45)..(275): Homolog of NCBI NO: 28392968 NR Description: putative pectinacetylesterase [Arabidopsis
  misc_feature (51)..(275): Homolog of NCBI NO: 30696158 NR Description: pectinacetylesterase, putative [Arabidopsis
  misc_feature (51)..(275): Homolog of NCBI NO: 25347293 NR Description: probable pectinacetylesterase precursor T8L23.6
  misc_feature (51)..(275): Homolog of NCBI NO: 18397406 NR Description: pectinacetylesterase, putative [Arabidopsis
  misc_feature (51)..(275): Homolog of NCBI NO: 15226462 NR Description: pectinacetylesterase, putative [Arabidopsis
  misc_feature (51)..(275): Homolog of NCBI NO: 21703105 NR Description: At1g57590/T8L23_6 [Arabidopsis thaliana]
  misc_feature (45)..(275): Homolog of NCBI NO: 22330933 NR Description: pectinacetylesterase family [Arabidopsis thaliana]
  misc_feature (27)..(264): Homolog of NCBI NO: 10176854 NR Description: pectinacetylesterase [Arabidopsis thaliana]
  misc_feature (45)..(275): Homolog of NCBI NO: 6478931 NR Description: putative pectinacetylesterase [Arabidopsis
  misc_feature (1)..(254): Homolog of NCBI NO: 34907550 NR Description: putative pectinacetylesterase
MASELLSPLIPHQQRRRALAVDVAAPLLALLLAAVAFSRSPVAALVSSSRLVDLTLLAGAQGKGAVCLDGTPPGYHLRRGFGSGAHNWLVFLEGGGWCNTTQSCSERKMTNFGSSKYMGAVNFTGILSNDHTENPDFYNWNTVVIRYCDGASFAGDAEGEDLDGTKLFFRGLRIWEAVVDELMGKGMDAAKQALLTGCSAGSLAALLHCDNFHGRFPHEVSVKCLSDAGFFIDEKDLSGERSMRSLISGVVHLQNVKEVLPNDCLQKKDPTEAVFLSC

SEQ ID NO: 19934 - protein, 170 aa, Zea mays subsp. mays
  peptide (1)..(170): Ceres Seq. ID no. 13495212
  misc_feature (1)..(146): Pfam Name: Pectinacetylesterase Pfam Description: Pectinacetylesterase
  misc_feature (1)..(156): Homolog of NCBI NO: 10176854 NR Description: pectinacetylesterase [Arabidopsis thaliana]
  misc_feature (1)..(167): Homolog of NCBI NO: 18397406 NR Description: pectinacetylesterase, putative [Arabidopsis
  misc_feature (1)..(167): Homolog of NCBI NO: 22330933 NR Description: pectinacetylesterase family [Arabidopsis thaliana]
  misc_feature (1)..(167): Homolog of NCBI NO: 15226462 NR Description: pectinacetylesterase, putative [Arabidopsis
  misc_feature (1)..(167): Homolog of NCBI NO: 21703105 NR Description: At1g57590/T8L23_6 [Arabidopsis thaliana]
  misc_feature (1)..(167): Homolog of NCBI NO: 28392968 NR Description: putative pectinacetylesterase [Arabidopsis
  misc_feature (1)..(167): Homolog of NCBI NO: 30696158 NR Description: pectinacetylesterase, putative [Arabidopsis
  misc_feature (1)..(167): Homolog of NCBI NO: 25347293 NR Description: probable pectinacetylesterase precursor T8L23.6
  misc_feature (1)..(167): Homolog of NCBI NO: 6478931 NR Description: putative pectinacetylesterase [Arabidopsis
  misc_feature (1)..(146): Homolog of NCBI NO: 34907550 NR Description: putative pectinacetylesterase
MTNFGSSKYMGAVNFTGILSNDHTENPDFYNWNTVVIRYCDGASFAGDAEGEDLDGTKLFFRGLRIWEAVVDELMGKGMDAAKQALLTGCSAGSLAALLHCDNFHGRFPHEVSVKCLSDAGFFIDEKDLSGERSMRSLISGVVHLQNVKEVLPNDCLQKKDPTEAVFLSC

SEQ ID NO: 19935 - protein, 166 aa, Zea mays subsp. mays
  peptide (1)..(166): Ceres Seq. ID no. 13495213
  misc_feature (19)..(149): Pfam Name: Pectinacetylesterase Pfam Description: Pectinacetylesterase
  misc_feature (20)..(166): Homolog of NCBI NO: 10176854 NR Description: pectinacetylesterase [Arabidopsis thaliana]
  misc_feature (20)..(163): Homolog of NCBI NO: 18397406 NR Description: pectinacetylesterase, putative [Arabidopsis
  misc_feature (14)..(159): Homolog of NCBI NO: 22330933 NR Description: pectinacetylesterase family [Arabidopsis thaliana]
  misc_feature (9)..(163): Homolog of NCBI NO: 15226462 NR Description: pectinacetylesterase, putative [Arabidopsis
  misc_feature (14)..(163): Homolog of NCBI NO: 21703105 NR Description: At1g57590/T8L23_6 [Arabidopsis thaliana]
  misc_feature (1)..(163): Homolog of NCBI NO: 28392968 NR Description: putative pectinacetylesterase [Arabidopsis
  misc_feature (14)..(163): Homolog of NCBI NO: 30696158 NR Description: pectinacetylesterase, putative [Arabidopsis
  misc_feature (14)..(163): Homolog of NCBI NO: 25347293 NR Description: probable pectinacetylesterase precursor T8L23.6
  misc_feature (14)..(162): Homolog of NCBI NO: 6478931 NR Description: putative pectinacetylesterase [Arabidopsis
  misc_feature (19)..(165): Homolog of NCBI NO: 34907550 NR Description: putative pectinacetylesterase
MLKKFYPMTASKRRIQQRQCFFPAELIKGITTPTFILNSDYDSWQIRNILAPNGSYPGQEWSSCKADIRNCSCAQIDVLHGFKKKLVSELKVAEDNKDWGLFIDSCFTHCQTPFDITWNSPISPRLGNKSISEAVGDWYFDRRQNAKQIDCEYPCNPTCSSLLPTA

SEQ ID NO: 19936 - DNA, 1885 bp, Zea mays subsp. mays
  misc_feature (1)..(1885): Ceres Seq. ID no. 13577867
  misc_feature: MA Experiment ID: 108536 Result: Up-regulated in Transcription
  misc_feature: MA Experiment 108536 PARAMETER Experiment Name: Zm_Meristem_P Parameter: Age (day) Value: 8
  misc_feature: MA Experiment 108536 PARAMETER Experiment Name: Zm_Meristem_P Parameter: Organism Value: Zea mays
  misc_feature: MA Experiment 108536 PARAMETER Experiment Name: Zm_Meristem_P Parameter: Plant Line Value: 35A19
  misc_feature: MA Experiment 108536 PARAMETER Experiment Name: Zm_Meristem_P Parameter: Tissue Value: Shoot Meristem vs. Above Shoot Meristem
  misc_feature: MA Experiment ID: 108543 Result: Down-regulated in Transcription
  misc_feature: MA Experiment ID: 20000477 Result: Up-regulated in Transcription
  misc_feature: MA Experiment 20000477 PARAMETER Experiment Name: Zm_5mM_SA_P Parameter: Age (day) Value: 10
  misc_feature: MA Experiment 20000477 PARAMETER Experiment Name: Zm_5mM_SA_P Parameter: Organism Value: Zea mays
  misc_feature: MA Experiment 20000477 PARAMETER Experiment Name: Zm_5mM_SA_P Parameter: Plant Line Value: 35A19
  misc_feature: MA Experiment 20000477 PARAMETER Experiment Name: Zm_5mM_SA_P Parameter: Timepoint (hr) Value: 48
  misc_feature: MA Experiment 20000477 PARAMETER Experiment Name: Zm_5mM_SA_P Parameter: Tissue Value: Aerial
  misc_feature: MA Experiment 20000477 PARAMETER Experiment Name: Zm_5mM_SA_P Parameter: Treatment Value: 5mM SA vs. No Treatment
  misc_feature: MA Experiment ID: 20000478 Result: Up-regulated in Transcription
  misc_feature: MA Experiment 20000478 PARAMETER Experiment Name: Zm_5mM_SA_P Parameter: Age (day) Value: 11
  misc_feature: MA Experiment 20000478 PARAMETER Experiment Name: Zm_5mM_SA_P Parameter: Organism Value: Zea mays
  misc_feature: MA Experiment 20000478 PARAMETER Experiment Name: Zm_5mM_SA_P Parameter: Plant Line Value: 35A19
  misc_feature: MA Experiment 20000478 PARAMETER Experiment Name: Zm_5mM_SA_P Parameter: Timepoint (hr) Value: 72
  misc_feature: MA Experiment 20000478 PARAMETER Experiment Name: Zm_5mM_SA_P Parameter: Tissue Value: Aerial
  misc_feature: MA Experiment 20000478 PARAMETER Experiment Name: Zm_5mM_SA_P Parameter: Treatment Value: 5mM SA vs. No Treatment
  misc_feature: MA Experiment ID: 20000479 Result: Up-regulated in Transcription
  misc_feature: MA Experiment 20000479 PARAMETER Experiment Name: Zm_Drought_P Parameter: Age (day) Value: 10
  misc_feature: MA Experiment 20000479 PARAMETER Experiment Name: Zm_Drought_P Parameter: Organism Value: Zea mays
  misc_feature: MA Experiment 20000479 PARAMETER Experiment Name: Zm_Drought_P Parameter: Plant Line Value: 35A19
  misc_feature: MA Experiment 20000479 PARAMETER Experiment Name: Zm_Drought_P Parameter: Timepoint (hr) Value: 48
  misc_feature: MA Experiment 20000479 PARAMETER Experiment Name: Zm_Drought_P Parameter: Tissue Value: Aerial
  misc_feature: MA Experiment 20000479 PARAMETER Experiment Name: Zm_Drought_P Parameter: Treatment Value: Drought vs. No Drought
  misc_feature: MA Experiment ID: 20000480 Result: Up-regulated in Transcription
  misc_feature: MA Experiment 20000480 PARAMETER Experiment Name: Zm_Drought_P Parameter: Age (day) Value: 11
  misc_feature: MA Experiment 20000480 PARAMETER Experiment Name: Zm_Drought_P Parameter: Organism Value: Zea mays
  misc_feature: MA Experiment 20000480 PARAMETER Experiment Name: Zm_Drought_P Parameter: Plant Line Value: 35A19
  misc_feature: MA Experiment 20000480 PARAMETER Experiment Name: Zm_Drought_P Parameter: Timepoint (hr) Value: 72
  misc_feature: MA Experiment 20000480 PARAMETER Experiment Name: Zm_Drought_P Parameter: Tissue Value: Aerial
  misc_feature: MA Experiment 20000480 PARAMETER Experiment Name: Zm_Drought_P Parameter: Treatment Value: Drought vs. No Drought
  misc_feature: MA Experiment ID: 20000627 Result: Up-regulated in Transcription
  misc_feature: MA Experiment 20000627 PARAMETER Experiment Name: Zm_Herbicide-Treatments_P Parameter: Timepoint (hr) Value: 12
  misc_feature: MA Experiment 20000627 PARAMETER Experiment Name: Zm_Herbicide-Treatments_P Parameter: Tissue Value: Aerial
  misc_feature: MA Experiment 20000627 PARAMETER Experiment Name: Zm_Herbicide-Treatments_P Parameter: Treatment Value: Finale vs. No Treatment
aacacatgtgtgtgcagtgtagacgagcgcgtacgtaacttattgggaggttgcgcgtacggcaactcccgtcgcctccgcgctcccctaaccgcctcccccttgtctcatggtggaagtggaacaaccctccgcctgcgccgctgcgaagtaagtgagaagggaaaacaagaaacgaggagggagggaggggacgacgtacggagcgagctagcggcgcggcgggcgtcgctcggcatggacgcggaggcggcggcggcggcggcggcgacggcggtggaggagagggagcggctgcggaggagcttcgcgtcggggaggacgcggccggcggcgtggcgggaggcgcagctgcgcggccttctgcgcatggccgccgagagggaggacgacatctgcgccgccctgcacgccgacctcgcgaagccccttaccgagtgttatgtacacgagntatcattggtcattncttcgtgcaaatttgctctcaagaatctcaagaaatggatgaagccccgaaaggtccccggcgggctgctgaccttcccgtcggcggccagcgtcgcggcggagcctctcggcgtcgtgctcgtcatctccgcctggaactaccccttcttgctggccatcgacccggtcgtgggggcattcgcggcgggcaacgccgtggcgctgaagccgtcggaggtggcgccggccacgtcgttgctgctggccgacctgctgccgcgctacgtggacccctcgtgcgtcagggtcgtgcagggcggcatcccggagaccaccgcgctgctggagctccagtgggacaagatcttctacacaggtaacagcagagtaggacgcatcgtcatgtcctacgctgccaatcacctgacgcccgtggtcttggagctcggtggcaaatgccctgtcgtcgtcgactccgacgtcaacctccacgtcgctgccaagaggatcgccgccggcaagtggggctgcaacagcggccaagcctgcgtctcgccggactacgtcgtcaccaccaaatcgttcgcgccaaagctgctggagtccctgaagcgagtgctattcgagttctacggggaggagccgctgcggtcgccggacctgtcgcgcgtcgtcaactccaaccacttcaacaggctcatggcgctcatggacgactactcggtctccggcaatgtcgcgttcggcggccagatcgacgagcggcggctaaggatcgccccgacgctgctgctggacgtcccgctcgactccgcgatgatgaaggaggagatcttcgggccgctgcttcccataatcacggtggacaagatcggcgagagcttcgctgtgatcaactccatgcccaagccgctggcagcttacctcttcagcaacgacgggcaggctcaagcagcagttcgagaggaccgtctcggcgggagggatcatgttcaacgacaccggcatccacctgacaaacccgaacctgccgttcggaggagtcggggagagcggcatgggcgcctaccacggcgccttcagcttcgacgccttctcccacaggaaggccgtcctggaccgcagcttcctcggcgaggccagggccaggtacccgccgtacacgccggcgaagctcgccatcctcaggggcgtgctcaatggcagcccgcttgccacggttcaggcggctgcggggtgtacaggaggggcatcagctgactgactgactgaccccccttcatgcttattattaataataagcataaatattcaccgcatacacattgctgtgcttttattaaggttgttgtgagggcgaaaaatgtattgaccctttgcgtgtgcgcgtgcgtgtatagcaactattaataaaagaaaaaagtgatgttcattc

SEQ ID NO: 19937 - protein, 569 aa, Zea mays subsp. mays
  peptide (1)..(569): Ceres Seq. ID no. 13577868
  misc_feature (86)..(463): Pfam Name: Aldehyde dehydrogenase family Pfam Description: Aldehyde dehydrogenase family
  misc_feature (99)..(476): Homolog of NCBI NO: 4973431 NR Description: putative aldehyde dehydrogenase OS-ALDH
  misc_feature (95)..(477): Homolog of NCBI NO: 12698457 NR Description: fatty aldehyde dehydrogenase variant form [Mus
  misc_feature (95)..(477): Homolog of NCBI NO: 12698456 NR Description: fatty aldehyde dehydrogenase [Mus musculus]
  misc_feature (95)..(477): Homolog of NCBI NO: 26341802 NR Description: unnamed protein product [Mus musculus]
  misc_feature (99)..(477): Homolog of NCBI NO: 33317836 NR Description: aldehyde dehydrogenase [Oryza sativa (indica
  misc_feature (89)..(505): Homolog of NCBI NO: 17065876 NR Description: aldehyde dehydrogenase [Arabidopsis thaliana]
  misc_feature (89)..(505): Homolog of NCBI NO: 18418408 NR Description: aldehyde dehydrogenase, putative (ALDH)
  misc_feature (99)..(505): Homolog of NCBI NO: 17065918 NR Description: aldehyde dehydrogenase [Craterostigma
  misc_feature (86)..(463): Homolog of NCBI NO: 21536879 NR Description: aldehyde dehydrogenase, putative [Arabidopsis
  misc_feature (86)..(463): Homolog of NCBI NO: 15219358 NR Description: aldehyde dehydrogenase, putative (ALDH)
  misc_feature (152)..(152): Xaa is any aa, unknown or other
  misc_feature (157)..(157): Xaa is any aa, unknown or other
NTCVCSVDERVRNLLGGCAYGNSRRLRAPLTASPLSHGGSGTTLRLRRCEVSEKGKQETRREGGDDVRSELAARRASLGMDAEAAAAAAATAVEERERLRRSFASGRTRPAAWREAQLRGLLRMAAEREDDICAALHADLAKPLTECYVHEXSLVIXSCKFALKNLKKWMKPRKVPGGLLTFPSAASVAAEPLGVVLVISAWNYPFLLAIDPVVGAFAAGNAVALKPSEVAPATSLLLADLLPRYVDPSCVRVVQGGIPETTALLELQWDKIFYTGNSRVGRIVMSYAANHLTPVVLELGGKCPVVVDSDVNLHVAAKRIAAGKWGCNSGQACVSPDYVVTTKSFAPKLLESLKRVLFEFYGEEPLRSPDLSRVVNSNHFNRLMALMDDYSVSGNVAFGGQIDERRLRIAPTLLLDVPLDSAMMKEEIFGPLLPIITVDKIGESFAVINSMPKPLAAYLFSNDGQAQAAVREDRLGGRDHVQRHRHPPDKPEPAVRRSRGERHGRLPRRLQLRRLLPQEGRPGPQLPRRGQGQVPAVHAGEARHPQGRAQWQPACHGSGGCGVYRRGIS

SEQ ID NO: 19938 - protein, 490 aa, Zea mays subsp. mays
  peptide (1)..(490): Ceres Seq. ID no. 13577869
  misc_feature (7)..(384): Pfam Name: Aldehyde dehydrogenase family Pfam Description: Aldehyde dehydrogenase family
  misc_feature (20)..(397): Homolog of NCBI NO: 4973431 NR Description: putative aldehyde dehydrogenase OS-ALDH
  misc_feature (16)..(398): Homolog of NCBI NO: 12698457 NR Description: fatty aldehyde dehydrogenase variant form [Mus
  misc_feature (16)..(398): Homolog of NCBI NO: 12698456 NR Description: fatty aldehyde dehydrogenase [Mus musculus]
  misc_feature (16)..(398): Homolog of NCBI NO: 26341802 NR Description: unnamed protein product [Mus musculus]
  misc_feature (20)..(398): Homolog of NCBI NO: 33317836 NR Description: aldehyde dehydrogenase [Oryza sativa (indica
  misc_feature (10)..(426): Homolog of NCBI NO: 17065876 NR Description: aldehyde dehydrogenase [Arabidopsis thaliana]
  misc_feature (10)..(426): Homolog of NCBI NO: 18418408 NR Description: aldehyde dehydrogenase, putative (ALDH)
  misc_feature (20)..(426): Homolog of NCBI NO: 17065918 NR Description: aldehyde dehydrogenase [Craterostigma
  misc_feature (7)..(384): Homolog of NCBI NO: 21536879 NR Description: aldehyde dehydrogenase, putative [Arabidopsis
  misc_feature (7)..(384): Homolog of NCBI NO: 15219358 NR Description: aldehyde dehydrogenase, putative (ALDH)
  misc_feature (73)..(73): Xaa is any aa, unknown or other
  misc_feature (78)..(78): Xaa is any aa, unknown or other
MDAEAAAAAAATAVEERERLRRSFASGRTRPAAWREAQLRGLLRMAAEREDDICAALHADLAKPLTECYVHEXSLVIXSCKFALKNLKKWMKPRKVPGGLLTFPSAASVAAEPLGVVLVISAWNYPFLLAIDPVVGAFAAGNAVALKPSEVAPATSLLLADLLPRYVDPSCVRVVQGGIPETTALLELQWDKIFYTGNSRVGRIVMSYAANHLTPVVLELGGKCPVVVDSDVNLHVAAKRIAAGKWGCNSGQACVSPDYVVTTKSFAPKLLESLKRVLFEFYGEEPLRSPDLSRVVNSNHFNRLMALMDDYSVSGNVAFGGQIDERRLRIAPTLLLDVPLDSAMMKEEIFGPLLPIITVDKIGESFAVINSMPKPLAAYLFSNDGQAQAAVREDRLGGRDHVQRHRHPPDKPEPAVRRSRGERHGRLPRRLQLRRLLPQEGRPGPQLPRRGQGQVPAVHAGEARHPQGRAQWQPACHGSGGCGVYRRGIS

SEQ ID NO: 19939 - protein, 446 aa, Zea mays subsp. mays
  peptide (1)..(446): Ceres Seq. ID no. 13577870
  misc_feature (1)..(340): Pfam Name: Aldehyde dehydrogenase family Pfam Description: Aldehyde dehydrogenase family
  misc_feature (1)..(353): Homolog of NCBI NO: 4973431 NR Description: putative aldehyde dehydrogenase OS-ALDH
  misc_feature (1)..(354): Homolog of NCBI NO: 12698457 NR Description: fatty aldehyde dehydrogenase variant form [Mus
  misc_feature (1)..(354): Homolog of NCBI NO: 12698456 NR Description: fatty aldehyde dehydrogenase [Mus musculus]
  misc_feature (1)..(354): Homolog of NCBI NO: 26341802 NR Description: unnamed protein product [Mus musculus]
  misc_feature (1)..(354): Homolog of NCBI NO: 33317836 NR Description: aldehyde dehydrogenase [Oryza sativa (indica
  misc_feature (1)..(382): Homolog of NCBI NO: 17065876 NR Description: aldehyde dehydrogenase [Arabidopsis thaliana]
  misc_feature (1)..(382): Homolog of NCBI NO: 18418408 NR Description: aldehyde dehydrogenase, putative (ALDH)
  misc_feature (1)..(382): Homolog of NCBI NO: 17065918 NR Description: aldehyde dehydrogenase [Craterostigma
  misc_feature (1)..(340): Homolog of NCBI NO: 21536879 NR Description: aldehyde dehydrogenase, putative [Arabidopsis
  misc_feature (1)..(340): Homolog of NCBI NO: 15219358 NR Description: aldehyde dehydrogenase, putative (ALDH)
  misc_feature (29)..(29): Xaa is any aa, unknown or other
  misc_feature (34)..(34): Xaa is any aa, unknown or other
MAAEREDDICAALHADLAKPLTECYVHEXSLVIXSCKFALKNLKKWMKPRKVPGGLLTFPSAASVAAEPLGVVLVISAWNYPFLLAIDPVVGAFAAGNAVALKPSEVAPATSLLLADLLPRYVDPSCVRVVQGGIPETTALLELQWDKIFYTGNSRVGRIVMSYAANHLTPVVLELGGKCPVVVDSDVNLHVAAKRIAAGKWGCNSGQACVSPDYVVTTKSFAPKLLESLKRVLFEFYGEEPLRSPDLSRVVNSNHFNRLMALMDDYSVSGNVAFGGQIDERRLRIAPTLLLDVPLDSAMMKEEIFGPLLPIITVDKIGESFAVINSMPKPLAAYLFSNDGQAQAAVREDRLGGRDHVQRHRHPPDKPEPAVRRSRGERHGRLPRRLQLRRLLPQEGRPGPQLPRRGQGQVPAVHAGEARHPQGRAQWQPACHGSGGCGVYRRGIS

SEQ ID NO: 19940 - DNA, 1719 bp, Zea mays subsp. mays; identical to SEQ ID NO: 3268
  misc_feature (1)..(1719): Ceres Seq. ID no. 12348980
  misc_feature: MA Experiment ID: 108522 Result: Down-regulated in Transcription
  misc_feature: MA Experiment 108522 PARAMETER Experiment Name: Zm_42deg_Heat_P Parameter: Age (day) Value: 8
  misc_feature: MA Experiment 108522 PARAMETER Experiment Name: Zm_42deg_Heat_P Parameter: Organism Value: Zea mays
  misc_feature: MA Experiment 108522 PARAMETER Experiment Name: Zm_42deg_Heat_P Parameter: Plant Line Value: 35A19
  misc_feature: MA Experiment 108522 PARAMETER Experiment Name: Zm_42deg_Heat_P Parameter: Temperature (deg C) Value: 42 vs. 22
  misc_feature: MA Experiment 108522 PARAMETER Experiment Name: Zm_42deg_Heat_P Parameter: Timepoint (hr) Value: 1
  misc_feature: MA Experiment 108522 PARAMETER Experiment Name: Zm_42deg_Heat_P Parameter: Tissue Value: Aerial
  misc_feature: MA Experiment ID: 108556 Result: Up-regulated in Transcription
  misc_feature: MA Experiment 108556 PARAMETER Experiment Name: Zm_Drought_P Parameter: Age (day) Value: 9
  misc_feature: MA Experiment 108556 PARAMETER Experiment Name: Zm_Drought_P Parameter: Organism Value: Zea mays
  misc_feature: MA Experiment 108556 PARAMETER Experiment Name: Zm_Drought_P Parameter: Plant Line Value: 35A19
  misc_feature: MA Experiment 108556 PARAMETER Experiment Name: Zm_Drought_P Parameter: Timepoint (hr) Value: 24
  misc_feature: MA Experiment 108556 PARAMETER Experiment Name: Zm_Drought_P Parameter: Tissue Value: Aerial
  misc_feature: MA Experiment 108556 PARAMETER Experiment Name: Zm_Drought_P Parameter: Treatment Value: Drought vs. No Drought
  misc_feature: MA Experiment ID: 20000108 Result: Down-regulated in Transcription
  misc_feature: MA Experiment 20000108 PARAMETER Experiment Name: Zm_Root-Tips_P Parameter: Age (day) Value: 12
  misc_feature: MA Experiment 20000108 PARAMETER Experiment Name: Zm_Root-Tips_P Parameter: Organism Value: Zea mays
  misc_feature: MA Experiment 20000108 PARAMETER Experiment Name: Zm_Root-Tips_P Parameter: Tissue Value: Root tips vs. Root mid region    35
  misc_feature: MA Experiment 20000108 PARAMETER Experiment Name: Zm_Root-Tips_P Parameter: Tissue Value: Root tips vs. Root mid region   Sequence Listing-Misc Features (4)
  misc_feature: MA Experiment ID: 20000488 Result: Down-regulated in Transcription
  misc_feature: MA Experiment 20000488 PARAMETER Experiment Name: Zm_50mM_NH4NO3_L_to_H_P Parameter: Organism Value: Zea mays
  misc_feature: MA Experiment 20000488 PARAMETER Experiment Name: Zm_50mM_NH4NO3_L_to_H_P Parameter: Timepoint (hr) Value: 8
  misc_feature: MA Experiment 20000488 PARAMETER Experiment Name: Zm_50mM_NH4NO3_L_to_H_P Parameter: Tissue Value: Leaves
  misc_feature: MA Experiment 20000488 PARAMETER Experiment Name: Zm_50mM_NH4NO3_L_to_H_P Parameter: Treatment Value: 50mM NH4NO3 vs. 100mM Mannitol
  misc_feature: MA Experiment ID: 20000492 Result: Down-regulated in Transcription
  misc_feature: MA Experiment 20000492 PARAMETER Experiment Name: Zm_Hybrid_Seed_Dev_P Parameter: DAP Value: 12
  misc_feature: MA Experiment 20000492 PARAMETER Experiment Name: Zm_Hybrid_Seed_Dev_P Parameter: Organism Value: Zea mays
  misc_feature: MA Experiment 20000492 PARAMETER Experiment Name: Zm_Hybrid_Seed_Dev_P Parameter: Plant Line Value: 35A19
  misc_feature: MA Experiment 20000492 PARAMETER Experiment Name: Zm_Hybrid_Seed_Dev_P Parameter: Tissue Value: Fert Kernel vs. Unfert Floret

SEQ ID NO: 19941 - protein, 369 aa, Zea mays subsp. mays; identical to SEQ ID NO: 3269
  peptide (1)..(369): Ceres Seq. ID no. 12348981
  misc_feature (32)..(319): Pfam Name: Protein kinase domain Pfam Description: Protein kinase domain
  misc_feature (32)..(319): Pfam Name: Protein kinase domain Pfam Description: Protein kinase domain
  misc_feature (1)..(362): Homolog of NCBI NO: 4887127 NR Description: putative mitogen-activated protein kinase MAPK
  misc_feature (1)..(365): Homolog of NCBI NO: 15218451 NR Description: putative mitogen-activated protein kinase, MAP
  misc_feature (1)..(362): Homolog of NCBI NO: 2499612 NR Description: MITOGEN-ACTIVATED PROTEIN KINASE HOMOLOG 1
  misc_feature (1)..(365): Homolog of NCBI NO: 533281 NR Description: ATMPK2 [Arabidopsis thaliana]
  misc_feature (1)..(365): Homolog of NCBI NO: 18406388 NR Description: expressed protein
  misc_feature (1)..(362): Homolog of NCBI NO: 4887127 NR Description: putative mitogen-activated protein kinase MAPK
  misc_feature (1)..(362): Homolog of NCBI NO: 2499612 NR Description: MITOGEN-ACTIVATED PROTEIN KINASE HOMOLOG 1
  misc_feature (1)..(365): Homolog of NCBI NO: 18406388 NR Description: expressed protein
  misc_feature (1)..(369): Homolog of NCBI NO: 11869994 NR Description: MAP kinase 2 [Oryza sativa]
  misc_feature (1)..(369): Homolog of NCBI NO: 24412848 NR Description: putative mitogen-activated protein kinase, msrmk3
  misc_feature (1)..(369): Homolog of NCBI NO: 6491800 NR Description: MAPK4 protein [Oryza sativa]
  misc_feature (1)..(368): Homolog of NCBI NO: 7341300 NR Description: MAP kinase MAPK2 [Oryza sativa]
  misc_feature (1)..(365): Homolog of NCBI NO: 2499614 NR Description: MITOGEN-ACTIVATED PROTEIN KINASE HOMOLOG NTF3
  misc_feature (1)..(365): Homolog of NCBI NO: 533281 NR Description: ATMPK2 [Arabidopsis thaliana]
  misc_feature (1)..(365): Homolog of NCBI NO: 15218451 NR Description: putative mitogen-activated protein kinase, MAP
  misc_feature (1)..(365): Homolog of NCBI NO: 2499614 NR Description: MITOGEN-ACTIVATED PROTEIN KINASE HOMOLOG NTF3
  misc_feature (1)..(368): Homolog of NCBI NO: 7341300 NR Description: MAP kinase MAPK2 [Oryza sativa]
  misc_feature (1)..(369): Homolog of NCBI NO: 6491800 NR Description: MAPK4 protein [Oryza sativa]
  misc_feature (1)..(369): Homolog of NCBI NO: 24412848 NR Description: putative mitogen-activated protein kinase, msrmk3
  misc_feature (1)..(369): Homolog of NCBI NO: 11869994 NR Description: MAP kinase 2 [Oryza sativa]

SEQ ID NO: 19942 - protein, 367 aa, Zea mays subsp. mays; identical to SEQ ID NO: 3270
  peptide (1)..(367): Ceres Seq. ID no. 12348982
  misc_feature (30)..(317): Pfam Name: Protein kinase domain Pfam Description: Protein kinase domain
  misc_feature (30)..(317): Pfam Name: Protein kinase domain Pfam Description: Protein kinase domain
  misc_feature (1)..(360): Homolog of NCBI NO: 4887127 NR Description: putative mitogen-activated protein kinase MAPK
  misc_feature (1)..(363): Homolog of NCBI NO: 15218451 NR Description: putative mitogen-activated protein kinase, MAP
  misc_feature (1)..(360): Homolog of NCBI NO: 2499612 NR Description: MITOGEN-ACTIVATED PROTEIN KINASE HOMOLOG 1
  misc_feature (1)..(363): Homolog of NCBI NO: 533281 NR Description: ATMPK2 [Arabidopsis thaliana]
  misc_feature (1)..(363): Homolog of NCBI NO: 18406388 NR Description: expressed protein
  misc_feature (1)..(360): Homolog of NCBI NO: 4887127 NR Description: putative mitogen-activated protein kinase MAPK
  misc_feature (1)..(360): Homolog of NCBI NO: 2499612 NR Description: MITOGEN-ACTIVATED PROTEIN KINASE HOMOLOG 1
  misc_feature (1)..(363): Homolog of NCBI NO: 18406388 NR Description: expressed protein
  misc_feature (1)..(367): Homolog of NCBI NO: 11869994 NR Description: MAP kinase 2 [Oryza sativa]
  misc_feature (1)..(367): Homolog of NCBI NO: 24412848 NR Description: putative mitogen-activated protein kinase, msrmk3
  misc_feature (1)..(367): Homolog of NCBI NO: 6491800 NR Description: MAPK4 protein [Oryza sativa]
  misc_feature (1)..(366): Homolog of NCBI NO: 7341300 NR Description: MAP kinase MAPK2 [Oryza sativa]
  misc_feature (1)..(363): Homolog of NCBI NO: 2499614 NR Description: MITOGEN-ACTIVATED PROTEIN KINASE HOMOLOG NTF3
  misc_feature (1)..(363): Homolog of NCBI NO: 533281 NR Description: ATMPK2 [Arabidopsis thaliana]
  misc_feature (1)..(363): Homolog of NCBI NO: 15218451 NR Description: putative mitogen-activated protein kinase, MAP
  misc_feature (1)..(363): Homolog of NCBI NO: 2499614 NR Description: MITOGEN-ACTIVATED PROTEIN KINASE HOMOLOG NTF3
  misc_feature (1)..(366): Homolog of NCBI NO: 7341300 NR Description: MAP kinase MAPK2 [Oryza sativa]
  misc_feature (1)..(367): Homolog of NCBI NO: 6491800 NR Description: MAPK4 protein [Oryza sativa]
  misc_feature (1)..(367): Homolog of NCBI NO: 24412848 NR Description: putative mitogen-activated protein kinase, msrmk3
  misc_feature (1)..(367): Homolog of NCBI NO: 11869994 NR Description: MAP kinase 2 [Oryza sativa]

SEQ ID NO: 19943 - protein, 366 aa, Zea mays subsp. mays; identical to SEQ ID NO: 3271
  peptide (1)..(366): Ceres Seq. ID no. 12348983
  misc_feature (29)..(316): Pfam Name: Protein kinase domain Pfam Description: Protein kinase domain
  misc_feature (29)..(316): Pfam Name: Protein kinase domain Pfam Description: Protein kinase domain
  misc_feature (1)..(359): Homolog of NCBI NO: 4887127 NR Description: putative mitogen-activated protein kinase MAPK
  misc_feature (1)..(362): Homolog of NCBI NO: 15218451 NR Description: putative mitogen-activated protein kinase, MAP
  misc_feature (1)..(359): Homolog of NCBI NO: 2499612 NR Description: MITOGEN-ACTIVATED PROTEIN KINASE HOMOLOG 1
  misc_feature (1)..(362): Homolog of NCBI NO: 533281 NR Description: ATMPK2 [Arabidopsis thaliana]
  misc_feature (1)..(362): Homolog of NCBI NO: 18406388 NR Description: expressed protein
  misc_feature (1)..(359): Homolog of NCBI NO: 4887127 NR Description: putative mitogen-activated protein kinase MAPK
  misc_feature (1)..(359): Homolog of NCBI NO: 2499612 NR Description: MITOGEN-ACTIVATED PROTEIN KINASE HOMOLOG 1
  misc_feature (1)..(362): Homolog of NCBI NO: 18406388 NR Description: expressed protein
  misc_feature (1)..(366): Homolog of NCBI NO: 11869994 NR Description: MAP kinase 2 [Oryza sativa]
  misc_feature (1)..(366): Homolog of NCBI NO: 24412848 NR Description: putative mitogen-activated protein kinase, msrmk3
  misc_feature (1)..(366): Homolog of NCBI NO: 6491800 NR Description: MAPK4 protein [Oryza sativa]
  misc_feature (1)..(365): Homolog of NCBI NO: 7341300 NR Description: MAP kinase MAPK2 [Oryza sativa]
  misc_feature (1)..(362): Homolog of NCBI NO: 2499614 NR Description: MITOGEN-ACTIVATED PROTEIN KINASE HOMOLOG NTF3
  misc_feature (1)..(362): Homolog of NCBI NO: 533281 NR Description: ATMPK2 [Arabidopsis thaliana]
  misc_feature (1)..(362): Homolog of NCBI NO: 15218451 NR Description: putative mitogen-activated protein kinase, MAP
  misc_feature (1)..(362): Homolog of NCBI NO: 2499614 NR Description: MITOGEN-ACTIVATED PROTEIN KINASE HOMOLOG NTF3
  misc_feature (1)..(365): Homolog of NCBI NO: 7341300 NR Description: MAP kinase MAPK2 [Oryza sativa]
  misc_feature (1)..(366): Homolog of NCBI NO: 6491800 NR Description: MAPK4 protein [Oryza sativa]
  misc_feature (1)..(366): Homolog of NCBI NO: 24412848 NR Description: putative mitogen-activated protein kinase, msrmk3
  misc_feature (1)..(366): Homolog of NCBI NO: 11869994 NR Description: MAP kinase 2 [Oryza sativa]

SEQ ID NO: 19944 - DNA, 1275 bp, Zea mays subsp. mays
  misc_feature (1)..(1275): Ceres Seq. ID no. 12390143
  misc_feature: MA Experiment ID: 108515 Result: Up-regulated in Transcription
  misc_feature: MA Experiment 108515 PARAMETER Experiment Name: Zm_2mM_SA_P Parameter: Age (day) Value: 8
  misc_feature: MA Experiment 108515 PARAMETER Experiment Name: Zm_2mM_SA_P Parameter: Organism Value: Zea mays
  misc_feature: MA Experiment 108515 PARAMETER Experiment Name: Zm_2mM_SA_P Parameter: Plant Line Value: 35A19
  misc_feature: MA Experiment 108515 PARAMETER Experiment Name: Zm_2mM_SA_P Parameter: Timepoint (hr) Value: 12
  misc_feature: MA Experiment 108515 PARAMETER Experiment Name: Zm_2mM_SA_P Parameter: Tissue Value: Aerial
  misc_feature: MA Experiment 108515 PARAMETER Experiment Name: Zm_2mM_SA_P Parameter: Treatment Value: 2mM SA vs. No Treatment
  misc_feature: MA Experiment ID: 108527 Result: Up-regulated in Transcription
  misc_feature: MA Experiment 108527 PARAMETER Experiment Name: Zm_5mM_NO_P Parameter: Age (day) Value: 8
  misc_feature: MA Experiment 108527 PARAMETER Experiment Name: Zm_5mM_NO_P Parameter: Organism Value: Zea mays
  misc_feature: MA Experiment 108527 PARAMETER Experiment Name: Zm_5mM_NO_P Parameter: Plant Line Value: 35A19
  misc_feature: MA Experiment 108527 PARAMETER Experiment Name: Zm_5mM_NO_P Parameter: Timepoint (hr) Value: 6
  misc_feature: MA Experiment 108527 PARAMETER Experiment Name: Zm_5mM_NO_P Parameter: Tissue Value: Aerial
  misc_feature: MA Experiment 108527 PARAMETER Experiment Name: Zm_5mM_NO_P Parameter: Treatment Value: 5mM NO vs. No Treatment
  misc_feature: MA Experiment ID: 108529 Result: Up-regulated in Transcription
  misc_feature: MA Experiment 108529 PARAMETER Experiment Name: Zm_Imbibed_Seeds_P Parameter: Age (day) Value: 5 vs. 2
  misc_feature: MA Experiment 108529 PARAMETER Experiment Name: Zm_Imbibed_Seeds_P Parameter: Organism Value: Zea mays
  misc_feature: MA Experiment 108529 PARAMETER Experiment Name: Zm_Imbibed_Seeds_P Parameter: Plant Line Value: 35A19
  misc_feature: MA Experiment 108529 PARAMETER Experiment Name: Zm_Imbibed_Seeds_P Parameter: Tissue Value: Roots vs. Embryo
  misc_feature: MA Experiment ID: 108535 Result: Down-regulated in Transcription
  misc_feature: MA Experiment 108535 PARAMETER Experiment Name: Zm_Meristem_P Parameter: Age (day) Value: 8
  misc_feature: MA Experiment 108535 PARAMETER Experiment Name: Zm_Meristem_P Parameter: Organism Value: Zea mays
  misc_feature: MA Experiment 108535 PARAMETER Experiment Name: Zm_Meristem_P Parameter: Plant Line Value: 35A19
  misc_feature: MA Experiment 108535 PARAMETER Experiment Name: Zm_Meristem_P Parameter: Tissue Value: Root Meristem vs. Above Root Meristem
  misc_feature: MA Experiment ID: 108543 Result: Up-regulated in Transcription
  misc_feature: MA Experiment ID: 20000477 Result: Up-regulated in Transcription
  misc_feature: MA Experiment 20000477 PARAMETER Experiment Name: Zm_5mM_SA_P Parameter: Age (day) Value: 10
  misc_feature: MA Experiment 20000477 PARAMETER Experiment Name: Zm_5mM_SA_P Parameter: Organism Value: Zea mays
  misc_feature: MA Experiment 20000477 PARAMETER Experiment Name: Zm_5mM_SA_P Parameter: Plant Line Value: 35A19
  misc_feature: MA Experiment 20000477 PARAMETER Experiment Name: Zm_5mM_SA_P Parameter: Timepoint (hr) Value: 48
  misc_feature: MA Experiment 20000477 PARAMETER Experiment Name: Zm_5mM_SA_P Parameter: Tissue Value: Aerial
  misc_feature: MA Experiment 20000477 PARAMETER Experiment Name: Zm_5mM_SA_P Parameter: Treatment Value: 5mM SA vs. No Treatment
  misc_feature: MA Experiment ID: 20000478 Result: Up-regulated in Transcription
  misc_feature: MA Experiment 20000478 PARAMETER Experiment Name: Zm_5mM_SA_P Parameter: Age (day) Value: 11
  misc_feature: MA Experiment 20000478 PARAMETER Experiment Name: Zm_5mM_SA_P Parameter: Organism Value: Zea mays
  misc_feature: MA Experiment 20000478 PARAMETER Experiment Name: Zm_5mM_SA_P Parameter: Plant Line Value: 35A19
  misc_feature: MA Experiment 20000478 PARAMETER Experiment Name: Zm_5mM_SA_P Parameter: Timepoint (hr) Value: 72
  misc_feature: MA Experiment 20000478 PARAMETER Experiment Name: Zm_5mM_SA_P Parameter: Tissue Value: Aerial
  misc_feature: MA Experiment 20000478 PARAMETER Experiment Name: Zm_5mM_SA_P Parameter: Treatment Value: 5mM SA vs. No Treatment
  misc_feature: MA Experiment ID: 20000492 Result: Down-regulated in Transcription
  misc_feature: MA Experiment 20000492 PARAMETER Experiment Name: Zm_Hybrid_Seed_Dev_P Parameter: DAP Value: 12
  misc_feature: MA Experiment 20000492 PARAMETER Experiment Name: Zm_Hybrid_Seed_Dev_P Parameter: Organism Value: Zea mays
  misc_feature: MA Experiment 20000492 PARAMETER Experiment Name: Zm_Hybrid_Seed_Dev_P Parameter: Plant Line Value: 35A19
  misc_feature: MA Experiment 20000492 PARAMETER Experiment Name: Zm_Hybrid_Seed_Dev_P Parameter: Tissue Value: Fert Kernel vs. Unfert Floret
  misc_feature: MA Experiment ID: 20000535 Result: Down-regulated in Transcription
  misc_feature: MA Experiment 20000535 PARAMETER Experiment Name: Zm_Hybrid_Seed_Dev_P Parameter: DAP Value: 30 vs. 12
  misc_feature: MA Experiment 20000535 PARAMETER Experiment Name: Zm_Hybrid_Seed_Dev_P Parameter: Organism Value: Zea mays
  misc_feature: MA Experiment 20000535 PARAMETER Experiment Name: Zm_Hybrid_Seed_Dev_P Parameter: Plant Line Value: 35A19
  misc_feature: MA Experiment 20000535 PARAMETER Experiment Name: Zm_Hybrid_Seed_Dev_P Parameter: Tissue Value: Embryo vs. Unfert Floret
  misc_feature: MA Experiment ID: 20000626 Result: Up-regulated in Transcription
  misc_feature: MA Experiment 20000626 PARAMETER Experiment Name: Zm_Herbicide-Treatments_P Parameter: Timepoint (hr) Value: 12
  misc_feature: MA Experiment 20000626 PARAMETER Experiment Name: Zm_Herbicide-Treatments_P Parameter: Tissue Value: Aerial
  misc_feature: MA Experiment 20000626 PARAMETER Experiment Name: Zm_Herbicide-Treatments_P Parameter: Treatment Value: Roundup vs. No Treatment
  misc_feature: MA Experiment ID: 20000627 Result: Up-regulated in Transcription
  misc_feature: MA Experiment 20000627 PARAMETER Experiment Name: Zm_Herbicide-Treatments_P Parameter: Timepoint (hr) Value: 12
  misc_feature: MA Experiment 20000627 PARAMETER Experiment Name: Zm_Herbicide-Treatments_P Parameter: Tissue Value: Aerial
  misc_feature: MA Experiment 20000627 PARAMETER Experiment Name: Zm_Herbicide-Treatments_P Parameter: Treatment Value: Finale vs. No Treatment
aacaggcaagtcttcgcttcgctcctctctgcggctccctccggcgagcggcgatggccttctcacccccactgatcgactgggaggcggagagctaccctgcctacccagatttcgcggccattccccttttcgtcgtcttcttcctcgtcgtccgtttcttcctcgaccgcttcgtattcgagtggttagccaggaagctgattttcaaggaggaggatgagaagaagcttggccctactacatatgcaggcaagagaaagatcaggaaatttaaagaatcagcttggaaatgcatgtattttctttctggggagctattggcattgtctgtgacgtacaacgagccatggttcacaaccacaagaaatttctgggttggaccaggcgatcagatctggccagatcaaaaaattaaattgaaactcaagacagtctatatgtatgttgctggcttttacacatactcgatatttgcccttttgttttgggaaataaggcgttcagacttcggtatttcaatgactcatcatgtagcaaccgtctgtctgatagcactgtcttacatattcagatttgctcgggtgggttcagttgtccttgccattcatgatgctactgatgtgttcctggagcttggaaaaatttccaagtatagtggccatgagttgtttgcagatgtttcatttcttgttttcgtcagttcttgggtactcctccgccttatatattatccgttctggattctctggagcacgagctatgaagttgttctgactctagacaaggaaaagcataaagttgacgggccaatatactactatgtattcaacagtcttctcttctctctacttgttctacacatatattggtgggttttaatgtatcggatgcttgtgaagcaaatacagtctagagggcacgttggcgatgatatacgatctgattctgaaggtgaagaggaacatgaggattgattgagctgtgtagagtcggaagataataaataacatggggatggattgagctgtataagttccaaaggcgaaaaggaatacatggatggattgagctgtgtaaattctgaaggtgtatcaaatcattctgctgtttttcttctgtccttgttcttgataagtaacaataaattagtgcccttctctaggtgagcatcatcgatagatgtcacttgggcattatcattatctattgatgtaaaatcaggtcacattgcatagcacacacacaacagttaatggaaaatgttagcagtgc

SEQ ID NO: 19945 - protein, 324 aa, Zea mays subsp. mays
  peptide (1)..(324): Ceres Seq. ID no. 12390144
  misc_feature (109)..(321): Pfam Name: Longevity-assurance protein (LAG1) Pfam Description: Longevity-assurance protein (LAG1)
  misc_feature (41)..(321): Homolog of NCBI NO: 7658241 NR Description: LAG1 homolog 2 [Arabidopsis thaliana]
  misc_feature (41)..(321): Homolog of NCBI NO: 15230323 NR Description: longevity factor-like protein
  misc_feature (25)..(254): Homolog of NCBI NO: 30683361 NR Description: longevity assurance protein -related [Arabidopsis
  misc_feature (25)..(324): Homolog of NCBI NO: 7688742 NR Description: ASC1 [Lycopersicon esculentum]
  misc_feature (25)..(139): Homolog of NCBI NO: 8920562 NR Description: Contains similarity to LAG1 homolog 1 from
  misc_feature (42)..(320): Homolog of NCBI NO: 34901974 NR Description: unknown protein [Oryza sativa (japonica
  misc_feature (90)..(317): Homolog of NCBI NO: 21358551 NR Description: Longevity assurance gene 1 CG3576-PB
  misc_feature (25)..(324): Homolog of NCBI NO: 18404559 NR Description: expressed protein
  misc_feature (25)..(324): Homolog of NCBI NO: 16974114 NR Description: putative resistance protein [Lycopersicon
  misc_feature (25)..(324): Homolog of NCBI NO: 25518747 NR Description: hypothetical protein F13B4.7 - Arabidopsis
QASLRFAPLCGSLRRAAMAFSPPLIDWEAESYPAYPDFAAIPLFVVFFLVVRFFLDRFVFEWLARKLIFKEEDEKKLGPTTYAGKRKIRKFKESAWKCMYFLSGELLALSVTYNEPWFTTTRNFWVGPGDQIWPDQKIKLKLKTVYMYVAGFYTYSIFALLFWEIRRSDFGISMTHHVATVCLIALSYIFRFARVGSVVLAIHDATDVFLELGKISKYSGHELFADVSFLVFVSSWVLLRLIYYPFWILWSTSYEVVLTLDKEKHKVDGPIYYYVFNSLLFSLLVLHIYWWVLMYRMLVKQIQSRGHVGDDIRSDSEGEEEHED

SEQ ID NO: 19946 - protein, 307 aa, Zea mays subsp. mays
  peptide (1)..(307): Ceres Seq. ID no. 12390145
  misc_feature (92)..(304): Pfam Name: Longevity-assurance protein (LAG1) Pfam Description: Longevity-assurance protein (LAG1)
  misc_feature (73)..(300): Homolog of NCBI NO: 21358551 NR Description: Longevity assurance gene 1 CG3576-PB
  misc_feature (8)..(122): Homolog of NCBI NO: 8920562 NR Description: Contains similarity to LAG1 homolog 1 from
  misc_feature (25)..(303): Homolog of NCBI NO: 34901974 NR Description: unknown protein [Oryza sativa (japonica
  misc_feature (24)..(304): Homolog of NCBI NO: 7658241 NR Description: LAG1 homolog 2 [Arabidopsis thaliana]
  misc_feature (24)..(304): Homolog of NCBI NO: 15230323 NR Description: longevity factor-like protein
  misc_feature (8)..(237): Homolog of NCBI NO: 30683361 NR Description: longevity assurance protein -related [Arabidopsis
  misc_feature (8)..(307): Homolog of NCBI NO: 7688742 NR Description: ASC1 [Lycopersicon esculentum]
  misc_feature (8)..(307): Homolog of NCBI NO: 18404559 NR Description: expressed protein
  misc_feature (8)..(307): Homolog of NCBI NO: 16974114 NR Description: putative resistance protein [Lycopersicon
  misc_feature (8)..(307): Homolog of NCBI NO: 25518747 NR Description: hypothetical protein F13B4.7 - Arabidopsis
MAFSPPLIDWEAESYPAYPDFAAIPLFVVFFLVVRFFLDRFVFEWLARKLIFKEEDEKKLGPTTYAGKRKIRKFKESAWKCMYFLSGELLALSVTYNEPWFTTTRNFWVGPGDQIWPDQKIKLKLKTVYMYVAGFYTYSIFALLFWEIRRSDFGISMTHHVATVCLIALSYIFRFARVGSVVLAIHDATDVFLELGKISKYSGHELFADVSFLVFVSSWVLLRLIYYPFWILWSTSYEVVLTLDKEKHKVDGPIYYYVFNSLLFSLLVLHIYWWVLMYRMLVKQIQSRGHVGDDIRSDSEGEEEHED

SEQ ID NO: 19947 - protein, 226 aa, Zea mays subsp. mays
  peptide (1)..(226): Ceres Seq. ID no. 12390146
  misc_feature (11)..(223): Pfam Name: Longevity-assurance protein (LAG1) Pfam Description: Longevity-assurance protein (LAG1)
  misc_feature (1)..(219): Homolog of NCBI NO: 21358551 NR Description: Longevity assurance gene 1 CG3576-PB
  misc_feature (1)..(41): Homolog of NCBI NO: 8920562 NR Description: Contains similarity to LAG1 homolog 1 from
  misc_feature (1)..(222): Homolog of NCBI NO: 34901974 NR Description: unknown protein [Oryza sativa (japonica
  misc_feature (1)..(223): Homolog of NCBI NO: 7658241 NR Description: LAG1 homolog 2 [Arabidopsis thaliana]
  misc_feature (1)..(223): Homolog of NCBI NO: 15230323 NR Description: longevity factor-like protein
  misc_feature (1)..(156): Homolog of NCBI NO: 30683361 NR Description: longevity assurance protein -related [Arabidopsis
  misc_feature (1)..(226): Homolog of NCBI NO: 7688742 NR Description: ASC1 [Lycopersicon esculentum]
  misc_feature (1)..(226): Homolog of NCBI NO: 18404559 NR Description: expressed protein
  misc_feature (1)..(226): Homolog of NCBI NO: 16974114 NR Description: putative resistance protein [Lycopersicon
  misc_feature (1)..(226): Homolog of NCBI NO: 25518747 NR Description: hypothetical protein F13B4.7 - Arabidopsis
MYFLSGELLALSVTYNEPWFTTTRNFWVGPGDQIWPDQKIKLKLKTVYMYVAGFYTYSIFALLFWEIRRSDFGISMTHHVATVCLIALSYIFRFARVGSVVLAIHDATDVFLELGKISKYSGHELFADVSFLVFVSSWVLLRLIYYPFWILWSTSYEVVLTLDKEKHKVDGPIYYYVFNSLLFSLLVLHIYWWVLMYRMLVKQIQSRGHVGDDIRSDSEGEEEHED

SEQ ID NO: 19948 - DNA, 1705 bp, Zea mays subsp. mays
  misc_feature (1)..(1705): Ceres Seq. ID no. 12381724
  misc_feature: MA Experiment ID: 108543 Result: Up-regulated in Transcription
  misc_feature: MA Experiment ID: 108544 Result: Up-regulated in Transcription
  misc_feature: MA Experiment ID: 108556 Result: Down-regulated in Transcription
  misc_feature: MA Experiment 108556 PARAMETER Experiment Name: Zm_Drought_P Parameter: Age (day) Value: 9
  misc_feature: MA Experiment 108556 PARAMETER Experiment Name: Zm_Drought_P Parameter: Organism Value: Zea mays
  misc_feature: MA Experiment 108556 PARAMETER Experiment Name: Zm_Drought_P Parameter: Plant Line Value: 35A19
  misc_feature: MA Experiment 108556 PARAMETER Experiment Name: Zm_Drought_P Parameter: Timepoint (hr) Value: 24
  misc_feature: MA Experiment 108556 PARAMETER Experiment Name: Zm_Drought_P Parameter: Tissue Value: Aerial
  misc_feature: MA Experiment 108556 PARAMETER Experiment Name: Zm_Drought_P Parameter: Treatment Value: Drought vs. No Drought
  misc_feature: MA Experiment ID: 108687 Result: Down-regulated in Transcription
  misc_feature: MA Experiment 108687 PARAMETER Experiment Name: Zm_Embryos-Flowers__P Parameter: Tissue Value: Embryo vs. Aerial+
  misc_feature: MA Experiment ID: 20000535 Result: Down-regulated in Transcription
  misc_feature: MA Experiment 20000535 PARAMETER Experiment Name: Zm_Hybrid_Seed_Dev_P Parameter: DAP Value: 30 vs. 12
  misc_feature: MA Experiment 20000535 PARAMETER Experiment Name: Zm_Hybrid_Seed_Dev_P Parameter: Organism Value: Zea mays
  misc_feature: MA Experiment 20000535 PARAMETER Experiment Name: Zm_Hybrid_Seed_Dev_P Parameter: Plant Line Value: 35A19
  misc_feature: MA Experiment 20000535 PARAMETER Experiment Name: Zm_Hybrid_Seed_Dev_P Parameter: Tissue Value: Embryo vs. Unfert Floret
gcacgagaccattacctagaacatcctaatcgaaaaaagttgcaaccggagtccggagcatagcaacctcgctgggctcgggcccgcggcgccgggatatactccagggaagtcgagcaaggagagtgtggactgtggacgacaggggtaaagatcgagtgagcatcgctgcaccatgcgcccttctctctgctgtgcacctctttttcttctgctactattacatttggcatttgctagacctctctttcctctaccgagtaagacaaagaatgaagagaagaagcccatacagacgtttcggccatataacattgctcatcgtggatcaaatggggaaattcccgaggaaacagctgctgcatacatgagagctattgaagaaggggccgattttatagagtctgacatccttgctagcaaagatggggccttgatttgttttcatgatgtaacacttgatgatacaactgatgttgccaagcgtaaggaatttgccaatcgaagaagaacctatgaagtggagtggtttaatgttactggatggtttgtagtggacttcacactggaggaacttaaaacacttagagtgaagcagagatactcgtttagagatcaacaatacaatggtatgttttcaatcatcacgtttgaagaattcatttcaattgccctagatgcagacagaactgtcggcatatatcccgagattaaagatccagtttttatcaacaagcatgtcaagtgggctgatgggaagaagtttgaggacaaatttgtggataccttgcttaaatatggatacaaaggtcaatatatgtcagagaattggctgaagcagccattgtttatacaatcctttgctcccacctccattgtacatgtatcagattttattgactctcccaaggtatttttgattgatgatatcagtgtgagaacacaagacacgaaccagtcatactgggaaattacttcagatgaataccttgcatacattagtaaatatgtcgttggccttggtccatggaaggacactattgttccagcttcaggaaactacttgatgccacctagtgatcttgtcgcacgggcacatgctcataatctccaggtacatccatacacgtacaggaacgagaaccagttcctgcacttcaacttttttcaagatccctacaatgaatacgacttctggataaacactgtgggggttgatggactgtttacagatttcaccggaacccttcacaggtaccaagaattgacatccccacaccggaaggatgagactgcaaatagcctcctagtaaaaattagccaaatgatctcagcatatgaaggtctctgatcagcacgacgttgctgaaaattgtttgtgcttttgttaatcgatctgcaagagcacacgatccattcatcacggacggactgcgactttgcaaggtgaaataaacgagttgtttctggttgggacttgttagcacgagccgtactctccattaaagctcttaaaccctgtgagaaatttctagtgtgggaatacttgttttcgggaaggtactgtaatgactagttcacgatagaaaccgtatcatggtttagcgtgccaggatggacgagttggtctcgggtctttgcacagttggcctacaattgtacttgccggagtgttgaaatttctagtgtgggaataatcgttttc

SEQ ID NO: 19949 - protein, 391 aa, Zea mays subsp. mays
  peptide (1)..(391): Ceres Seq. ID no. 12381725
  misc_feature (2)..(353): Homolog of NCBI NO: 23105793 NR Description: hypothetical protein [Azotobacter vinelandii]
  misc_feature (44)..(363): Homolog of NCBI NO: 15595544 NR Description: glycerophosphoryl diester phosphodiesterase,
  misc_feature (40)..(354): Homolog of NCBI NO: 16127502 NR Description: glycerophosphoryl diester phosphodiesterase
  misc_feature (43)..(357): Homolog of NCBI NO: 29833326 NR Description: putative glycerophosphoryl diester
  misc_feature (10)..(353): Homolog of NCBI NO: 32997080 NR Description: glycerophosphoryl diester phosphodiesterase
  misc_feature (39)..(354): Homolog of NCBI NO: 23126501 NR Description: hypothetical protein [Nostoc punctiforme]
  misc_feature (19)..(370): Homolog of NCBI NO: 34394918 NR Description: putative glycerophosphoryl diester
  misc_feature (7)..(388): Homolog of NCBI NO: 15221164 NR Description: putative glycerophosphodiester phosphodiesterase
  misc_feature (9)..(367): Homolog of NCBI NO: 15241502 NR Description: glycerophosphodiester phosphodiesterase - like
  misc_feature (1)..(390): Homolog of NCBI NO: 34909788 NR Description: putative glycerophosphoryl diester
MRPSLCCAPLFLLLLLHLAFARPLFPLPSKTKNEEKKPIQTFRPYNIAHRGSNGEIPEETAAAYMRAIEEGADFIESDILASKDGALICFHDVTLDDTTDVAKRKEFANRRRTYEVEWFNVTGWFVVDFTLEELKTLRVKQRYSFRDQQYNGMFSIITFEEFISIALDADRTVGIYPEIKDPVFINKHVKWADGKKFEDKFVDTLLKYGYKGQYMSENWLKQPLFIQSFAPTSIVHVSDFIDSPKVFLIDDISVRTQDTNQSYWEITSDEYLAYISKYVVGLGPWKDTIVPASGNYLMPPSDLVARAHAHNLQVHPYTYRNENQFLHFNFFQDPYNEYDFWINTVGVDGLFTDFTGTLHRYQELTSPHRKDETANSLLVKISQMISAYEGL

SEQ ID NO: 19950 - protein, 327 aa, Zea mays subsp. mays
  peptide (1)..(327): Ceres Seq. ID no. 12381726
  misc_feature (1)..(289): Homolog of NCBI NO: 23105793 NR Description: hypothetical protein [Azotobacter vinelandii]
  misc_feature (1)..(299): Homolog of NCBI NO: 15595544 NR Description: glycerophosphoryl diester phosphodiesterase,
  misc_feature (1)..(290): Homolog of NCBI NO: 16127502 NR Description: glycerophosphoryl diester phosphodiesterase
  misc_feature (1)..(293): Homolog of NCBI NO: 29833326 NR Description: putative glycerophosphoryl diester
  misc_feature (1)..(289): Homolog of NCBI NO: 32997080 NR Description: glycerophosphoryl diester phosphodiesterase
  misc_feature (1)..(290): Homolog of NCBI NO: 23126501 NR Description: hypothetical protein [Nostoc punctiforme]
  misc_feature (1)..(306): Homolog of NCBI NO: 34394918 NR Description: putative glycerophosphoryl diester
  misc_feature (1)..(324): Homolog of NCBI NO: 15221164 NR Description: putative glycerophosphodiester phosphodiesterase
  misc_feature (1)..(303): Homolog of NCBI NO: 15241502 NR Description: glycerophosphodiester phosphodiesterase - like
  misc_feature (1)..(326): Homolog of NCBI NO: 34909788 NR Description: putative glycerophosphoryl diester
MRAIEEGADFIESDILASKDGALICFHDVTLDDTTDVAKRKEFANRRRTYEVEWFNVTGWFVVDFTLEELKTLRVKQRYSFRDQQYNGMFSIITFEEFISIALDADRTVGIYPEIKDPVFINKHVKWADGKKFEDKFVDTLLKYGYKGQYMSENWLKQPLFIQSFAPTSIVHVSDFIDSPKVFLIDDISVRTQDTNQSYWEITSDEYLAYISKYVVGLGPWKDTIVPASGNYLMPPSDLVARAHAHNLQVHPYTYRNENQFLHFNFFQDPYNEYDFWINTVGVDGLFTDFTGTLHRYQELTSPHRKDETANSLLVKISQMISAYEGL

SEQ ID NO: 19951 - protein, 239 aa, Zea mays subsp. mays
  peptide (1)..(239): Ceres Seq. ID no. 12381727
  misc_feature (1)..(201): Homolog of NCBI NO: 23105793 NR Description: hypothetical protein [Azotobacter vinelandii]
  misc_feature (1)..(211): Homolog of NCBI NO: 15595544 NR Description: glycerophosphoryl diester phosphodiesterase,
  misc_feature (1)..(202): Homolog of NCBI NO: 16127502 NR Description: glycerophosphoryl diester phosphodiesterase
  misc_feature (1)..(205): Homolog of NCBI NO: 29833326 NR Description: putative glycerophosphoryl diester
  misc_feature (1)..(201): Homolog of NCBI NO: 32997080 NR Description: glycerophosphoryl diester phosphodiesterase
  misc_feature (1)..(202): Homolog of NCBI NO: 23126501 NR Description: hypothetical protein [Nostoc punctiforme]
  misc_feature (1)..(218): Homolog of NCBI NO: 34394918 NR Description: putative glycerophosphoryl diester
  misc_feature (1)..(236): Homolog of NCBI NO: 15221164 NR Description: putative glycerophosphodiester phosphodiesterase
  misc_feature (1)..(215): Homolog of NCBI NO: 15241502 NR Description: glycerophosphodiester phosphodiesterase - like
  misc_feature (1)..(238): Homolog of NCBI NO: 34909788 NR Description: putative glycerophosphoryl diester
MFSIITFEEFISIALDADRTVGIYPEIKDPVFINKHVKWADGKKFEDKFVDTLLKYGYKGQYMSENWLKQPLFIQSFAPTSIVHVSDFIDSPKVFLIDDISVRTQDTNQSYWEITSDEYLAYISKYVVGLGPWKDTIVPASGNYLMPPSDLVARAHAHNLQVHPYTYRNENQFLHFNFFQDPYNEYDFWINTVGVDGLFTDFTGTLHRYQELTSPHRKDETANSLLVKISQMISAYEGL

SEQ ID NO: 19952 - DNA, 1458 bp, Zea mays subsp. mays
  misc_feature (1)..(1458): Ceres Seq. ID no. 12382366
  misc_feature: MA Experiment ID: 108504 Result: Down-regulated in Transcription
  misc_feature: MA Experiment 108504 PARAMETER Experiment Name: Zm_Drought_P Parameter: Age (day) Value: 8
  misc_feature: MA Experiment 108504 PARAMETER Experiment Name: Zm_Drought_P Parameter: Organism Value: Zea mays
  misc_feature: MA Experiment 108504 PARAMETER Experiment Name: Zm_Drought_P Parameter: Plant Line Value: 35A19
  misc_feature: MA Experiment 108504 PARAMETER Experiment Name: Zm_Drought_P Parameter: Timepoint (hr) Value: 12
  misc_feature: MA Experiment 108504 PARAMETER Experiment Name: Zm_Drought_P Parameter: Tissue Value: Aerial
  misc_feature: MA Experiment 108504 PARAMETER Experiment Name: Zm_Drought_P Parameter: Treatment Value: Drought vs. No Drought
  misc_feature: MA Experiment ID: 108535 Result: Down-regulated in Transcription
  misc_feature: MA Experiment 108535 PARAMETER Experiment Name: Zm_Meristem_P Parameter: Age (day) Value: 8
  misc_feature: MA Experiment 108535 PARAMETER Experiment Name: Zm_Meristem_P Parameter: Organism Value: Zea mays
  misc_feature: MA Experiment 108535 PARAMETER Experiment Name: Zm_Meristem_P Parameter: Plant Line Value: 35A19
  misc_feature: MA Experiment 108535 PARAMETER Experiment Name: Zm_Meristem_P Parameter: Tissue Value: Root Meristem vs. Above Root Meristem
  misc_feature: MA Experiment ID: 108536 Result: Down-regulated in Transcription
  misc_feature: MA Experiment 108536 PARAMETER Experiment Name: Zm_Meristem_P Parameter: Age (day) Value: 8
  misc_feature: MA Experiment 108536 PARAMETER Experiment Name: Zm_Meristem_P Parameter: Organism Value: Zea mays
  misc_feature: MA Experiment 108536 PARAMETER Experiment Name: Zm_Meristem_P Parameter: Plant Line Value: 35A19
  misc_feature: MA Experiment 108536 PARAMETER Experiment Name: Zm_Meristem_P Parameter: Tissue Value: Shoot Meristem vs. Above Shoot Meristem
agcctaggttagtgtctaacatcgtcgatccctccatgaagatcctacaaatctagctacgtagctagcgatcgatcgaattccatatcattgtttactcagacacatcatcagctacgtaactgcgtcagcttctggttgatcggatcgcgtccatggctgcggcggccgggggcggcaggcggccgtgggtggtggacgtggagaagaagctgggcgaggcggacgcgtcggtggaggtgtcgcggtggcagcggcactgcatctaccgcgtcccggcgtgcatcaaggacctgaagcccaaggcgtacaagccgcaggtggtgtcgctgggccccttccaccacggcgacgcggagctggttcccatggaggagcacaagcggcgggcgctgcgtcacctcctgcgccgcgccaagaggccgctggaggacttcgtggccgccgtggaggagatcgcggagccgctggagagcgcgtacctggacctcggcgccgagtggcgcggcggcgggagggagcggttcctggaggtgatgatcgtcgacggctgcttcctgctggaggtgatgagagccaccgtcctcgacgggaagaacaccgccgactacgcgcccaacgaccccatcttcagccaccacggggtgctgtacatggtgccgtacatccgccgcgacatgctcatgctcgagaaccagctcccgctcatcctgctcgagaagctcgtcgccgtcgagactggcaagcctacgaacggcgatgccatcaacaggatggtgctgaggttcctgtccccgacaccgcggctaccacccaccggcgtcggcatcgggctccacgcgctggacgtgcaaccgccggaacatgctgtacgggcactaccagcaccgcccccggcgcgacgtgccggagacggacatcatccggtccgcggtggagctgtacgaggccgggatccggttcaggaagagcgtctcggacagcctgcacgacatccggttccggcacggcgtgctgagcatgccggcggtgacggtggacgactccaccgagtacatgttcctgctcgtcatgaccgtcatgcagaccgtctacaccgtcatgcaattctaccagggcggcggcagcggcagtgacggcggatcgtcggcggcgccggcgccggcgtgatgatcgatctctgcactgcagccttttgattgcattggtctgcatgcgtgatctgtttgagcttgttttgatcgcgttcctttttcttgaggtatatcgattggttgtgtacttgtgtgtgttgattcttgtcgtggattccagttgttgatttctcctttttcggtctctttccgagtttgtttctatatttgaattaacgggttttcaaattatggaaaaaggaccatatgtgaaacacaactgtaaacagagaagatgatctgtaaggctatgtttggtttcttc

SEQ ID NO: 19953 - protein, 326 aa, Zea mays subsp. mays
  peptide (1)..(326): Ceres Seq. ID no. 12382367
  misc_feature (32)..(222): Pfam Name: Plant protein of unknown function Pfam Description: Plant protein of unknown function
  misc_feature (12)..(285): Homolog of NCBI NO: 32490273 NR Description: OSJNBb0116K07.15 [Oryza sativa (japonica
  misc_feature (9)..(221): Homolog of NCBI NO: 15229682 NR Description: putative protein; protein id: At3g50140.1
  misc_feature (9)..(185): Homolog of NCBI NO: 15229691 NR Description: putative protein; protein id: At3g50190.1
  misc_feature (1)..(232): Homolog of NCBI NO: 15229689 NR Description: putative protein; protein id: At3g50180.1
  misc_feature (9)..(232): Homolog of NCBI NO: 15229686 NR Description: putative protein; protein id: At3g50160.1
  misc_feature (9)..(221): Homolog of NCBI NO: 15229680 NR Description: putative protein; protein id: At3g50120.1
  misc_feature (9)..(215): Homolog of NCBI NO: 15229684 NR Description: putative protein; protein id: At3g50150.1
  misc_feature (9)..(221): Homolog of NCBI NO: 15229681 NR Description: putative protein; protein id: At3g50130.1
  misc_feature (12)..(222): Homolog of NCBI NO: 15229687 NR Description: putative protein; protein id: At3g50170.1
  misc_feature (12)..(232): Homolog of NCBI NO: 38636935 NR Description: hypothetical protein [Oryza sativa (japonica
MAAAAGGGRRPWVVDVEKKLGEADASVEVSRWQRHCIYRVPACIKDLKPKAYKPQVVSLGPFHHGDAELVPMEEHKRRALRHLLRRAKRPLEDFVAAVEEIAEPLESAYLDLGAEWRGGGRERFLEVMIVDGCFLLEVMRATVLDGKNTADYAPNDPIFSHHGVLYMVPYIRRDMLMLENQLPLILLEKLVAVETGKPTNGDAINRMVLRFLSPTPRLPPTGVGIGLHALDVQPPEHAVRALPAPPPARRAGDGHHPVRGGAVRGRDPVQEERLGQPARHPVPARRAEHAGGDGGRLHRVHVPARHDRHADRLHRHAILPGRRQRQ

SEQ ID NO: 19954 - protein, 255 aa, Zea mays subsp. mays
  peptide (1)..(255): Ceres Seq. ID no. 12382368
  misc_feature (1)..(151): Pfam Name: Plant protein of unknown function Pfam Description: Plant protein of unknown function
  misc_feature (1)..(214): Homolog of NCBI NO: 32490273 NR Description: OSJNBb0116K07.15 [Oryza sativa (japonica
  misc_feature (1)..(150): Homolog of NCBI NO: 15229682 NR Description: putative protein; protein id: At3g50140.1
  misc_feature (1)..(114): Homolog of NCBI NO: 15229691 NR Description: putative protein; protein id: At3g50190.1
  misc_feature (1)..(161): Homolog of NCBI NO: 15229689 NR Description: putative protein; protein id: At3g50180.1
  misc_feature (1)..(161): Homolog of NCBI NO: 15229686 NR Description: putative protein; protein id: At3g50160.1
  misc_feature (1)..(150): Homolog of NCBI NO: 15229680 NR Description: putative protein; protein id: At3g50120.1
  misc_feature (1)..(144): Homolog of NCBI NO: 15229684 NR Description: putative protein; protein id: At3g50150.1
  misc_feature (1)..(150): Homolog of NCBI NO: 15229681 NR Description: putative protein; protein id: At3g50130.1
  misc_feature (1)..(151): Homolog of NCBI NO: 15229687 NR Description: putative protein; protein id: At3g50170.1
  misc_feature (1)..(161): Homolog of NCBI NO: 38636935 NR Description: hypothetical protein [Oryza sativa (japonica
MEEHKRRALRHLLRRAKRPLEDFVAAVEEIAEPLESAYLDLGAEWRGGGRERFLEVMIVDGCFLLEVMRATVLDGKNTADYAPNDPIFSHHGVLYMVPYIRRDMLMLENQLPLILLEKLVAVETGKPTNGDAINRMVLRFLSPTPRLPPTGVGIGLHALDVQPPEHAVRALPAPPPARRAGDGHHPVRGGAVRGRDPVQEERLGQPARHPVPARRAEHAGGDGGRLHRVHVPARHDRHADRLHRHAILPGRRQRQ

SEQ ID NO: 19955 - protein, 199 aa, Zea mays subsp. mays
  peptide (1)..(199): Ceres Seq. ID no. 12382369
  misc_feature (1)..(95): Pfam Name: Plant protein of unknown function Pfam Description: Plant protein of unknown function
  misc_feature (1)..(158): Homolog of NCBI NO: 32490273 NR Description: OSJNBb0116K07.15 [Oryza sativa (japonica
  misc_feature (1)..(94): Homolog of NCBI NO: 15229682 NR Description: putative protein; protein id: At3g50140.1
  misc_feature (1)..(58): Homolog of NCBI NO: 15229691 NR Description: putative protein; protein id: At3g50190.1
  misc_feature (1)..(105): Homolog of NCBI NO: 15229689 NR Description: putative protein; protein id: At3g50180.1
  misc_feature (1)..(105): Homolog of NCBI NO: 15229686 NR Description: putative protein; protein id: At3g50160.1
  misc_feature (1)..(94): Homolog of NCBI NO: 15229680 NR Description: putative protein; protein id: At3g50120.1
  misc_feature (1)..(88): Homolog of NCBI NO: 15229684 NR Description: putative protein; protein id: At3g50150.1
  misc_feature (1)..(94): Homolog of NCBI NO: 15229681 NR Description: putative protein; protein id: At3g50130.1
  misc_feature (1)..(95): Homolog of NCBI NO: 15229687 NR Description: putative protein; protein id: At3g50170.1
  misc_feature (1)..(105): Homolog of NCBI NO: 38636935 NR Description: hypothetical protein [Oryza sativa (japonica
MIVDGCFLLEVMRATVLDGKNTADYAPNDPIFSHHGVLYMVPYIRRDMLMLENQLPLILLEKLVAVETGKPTNGDAINRMVLRFLSPTPRLPPTGVGIGLHALDVQPPEHAVRALPAPPPARRAGDGHHPVRGGAVRGRDPVQEERLGQPARHPVPARRAEHAGGDGGRLHRVHVPARHDRHADRLHRHAILPGRRQRQ

SEQ ID NO: 19956 - DNA, 446 bp, Zea mays subsp. mays
  misc_feature (1)..(446): Ceres Seq. ID no. 14305948
  misc_feature: MA Experiment ID: 20000534 Result: Down-regulated in Transcription
  misc_feature: MA Experiment 20000534 PARAMETER Experiment Name: Zm_Hybrid_Pollen_P Parameter: Age (day) Value: 8
  misc_feature: MA Experiment 20000534 PARAMETER Experiment Name: Zm_Hybrid_Pollen_P Parameter: Organism Value: Zea mays
  misc_feature: MA Experiment 20000534 PARAMETER Experiment Name: Zm_Hybrid_Pollen_P Parameter: Plant Line Value: 35A19
  misc_feature: MA Experiment 20000534 PARAMETER Experiment Name: Zm_Hybrid_Pollen_P Parameter: Tissue Value: Pollen vs. Aerial
aggacggagatgacgcagaagcagaccctgttcaaggggcagagcaagaagaagactatccctcccaaccgccacggcaaggcgcctcatgttcgtaaaggaaagagagccgtcaagcccaccaagttcacaaaggacatggacgccgagaaggaactcaccaagttcatcaaccagtgcaacgaaataaaagctgcgaatcttgctagcaaagagggcggtgacctcaacatagtgaaggcggatggtgaggaatctaaatcaaagaaataggaagccagaaactgaaaacgagtgtgtgaaacgtgatgcgtggtaaactgttaatgcgatgtattctgctgaagaaaattcagttccgtatggctgggtagatgaacatgtttagcgcaaagtgacggtgtaactgcaaccggggtaatggcttgcaagttttgttctggccc

SEQ ID NO: 19957 - protein, 90 aa, Zea mays subsp. mays
  peptide (1)..(90): Ceres Seq. ID no. 14305949
  misc_feature (4)..(90): Homolog of NCBI NO: 15231119 NR Description: expressed protein [Arabidopsis thaliana]
  misc_feature (4)..(88): Homolog of NCBI NO: 34903208 NR Description: unnamed protein product [Oryza sativa (japonica
RTEMTQKQTLFKGQSKKKTIPPNRHGKAPHVRKGKRAVKPTKFTKDMDAEKELTKFINQCNEIKAANLASKEGGDLNIVKADGEESKSKK

SEQ ID NO: 19958 - protein, 87 aa, Zea mays subsp. mays
  peptide (1)..(87): Ceres Seq. ID no. 14305950
  misc_feature (1)..(87): Homolog of NCBI NO: 15231119 NR Description: expressed protein [Arabidopsis thaliana]
  misc_feature (1)..(85): Homolog of NCBI NO: 34903208 NR Description: unnamed protein product [Oryza sativa (japonica
MTQKQTLFKGQSKKKTIPPNRHGKAPHVRKGKRAVKPTKFTKDMDAEKELTKFINQCNEIKAANLASKEGGDLNIVKADGEESKSKK

SEQ ID NO: 19959 - DNA, 376 bp, Zea mays subsp. mays
  misc_feature (1)..(376): Ceres Seq. ID no. 12467650
  misc_feature: MA Experiment ID: 108528 Result: Up-regulated in Transcription
  misc_feature: MA Experiment 108528 PARAMETER Experiment Name: Zm_Imbibed_Seeds_P Parameter: Age (day) Value: 5 vs. 2
  misc_feature: MA Experiment 108528 PARAMETER Experiment Name: Zm_Imbibed_Seeds_P Parameter: Organism Value: Zea mays
  misc_feature: MA Experiment 108528 PARAMETER Experiment Name: Zm_Imbibed_Seeds_P Parameter: Plant Line Value: 35A19
  misc_feature: MA Experiment 108528 PARAMETER Experiment Name: Zm_Imbibed_Seeds_P Parameter: Tissue Value: Aerial vs. Embryo
caagagaagctgatatagcaatattggaagaaccagaacatctcaattggtatcatcatgggaaacgctggactgacaagttcaaccatgttgttggtgtagttcatacaaactacctggaatatatcaagagagagaagaatggagctcttcaggcctttctagttaaacacatcaacaattgggtgaccagagcatactgcgacaaggtcttacgtctttctgcagcaactcaagatttaccaaagtctattgtttgcaatgttcatggtgttaacccaaagttcctgaagattggagaagaaataactgccaatagggggagtggggagaacaccactgtgacttgttaaatctgtatgcttattcccactcc

SEQ ID NO: 19960 - protein, 116 aa, Zea mays subsp. mays
  peptide (1)..(116): Ceres Seq. ID no. 12467651
  misc_feature (2)..(99): Homolog of NCBI NO: 22328179 NR Description: similar to digalactosyldiacylglycerol
  misc_feature (2)..(99): Homolog of NCBI NO: 7486557 NR Description: hypothetical protein F6N23.24 - Arabidopsis
  misc_feature (2)..(100): Homolog of NCBI NO: 34902044 NR Description: name [Oryza sativa (japonica cultivar-group)]
  misc_feature (1)..(109): Homolog of NCBI NO: 27542603 NR Description: digalactosyldiacylglycerol synthase [Xerophyta
  misc_feature (1)..(110): Homolog of NCBI NO: 15229824 NR Description: digalactosyldiacylglycerol synthase
  misc_feature (1)..(110): Homolog of NCBI NO: 30681840 NR Description: digalactosyldiacylglycerol synthase 1 (MGDG:MGDG
  misc_feature (2)..(112): Homolog of NCBI NO: 38344037 NR Description: OJ991214_12.18 [Oryza sativa (japonica
READIAILEEPEHLNWYHHGKRWTDKFNHVVGVVHTNYLEYIKREKNGALQAFLVKHINNWVTRAYCDKVLRLSAATQDLPKSIVCNVHGVNPKFLKIGEEITANRGSGENTTVTC

SEQ ID NO: 19961 - DNA, 443 bp, Zea mays subsp. mays
  misc_feature (1)..(443): Ceres Seq. ID no. 4614034
  misc_feature: MA Experiment ID: 108527 Result: Down-regulated in Transcription
  misc_feature: MA Experiment 108527 PARAMETER Experiment Name: Zm_5mM_NO_P Parameter: Age (day) Value: 8
  misc_feature: MA Experiment 108527 PARAMETER Experiment Name: Zm_5mM_NO_P Parameter: Organism Value: Zea mays
  misc_feature: MA Experiment 108527 PARAMETER Experiment Name: Zm_5mM_NO_P Parameter: Plant Line Value: 35A19
  misc_feature: MA Experiment 108527 PARAMETER Experiment Name: Zm_5mM_NO_P Parameter: Timepoint (hr) Value: 6
  misc_feature: MA Experiment 108527 PARAMETER Experiment Name: Zm_5mM_NO_P Parameter: Tissue Value: Aerial
  misc_feature: MA Experiment 108527 PARAMETER Experiment Name: Zm_5mM_NO_P Parameter: Treatment Value: 5mM NO vs. No Treatment
  misc_feature: Pfam Name: Abhydrolase_2 Pfam Description: Phospholipase/Carboxylesterase
atctgaaacaagaagctttcgcaagctggccagctagctccctaccgactagataccgaggagtgacggatcaggatgggaggggtgacctcgagtgtggcggcgaagatggccttcttcccgccgacgccgccgtcgtacgcgctggtggaggacgccggtgcgggggtcaccacgctcagcggccagccgcaccgggagaacgtcgagttgctgcgcttccgcacccgcaaagggaacacgctggcggcgatgtacgtgcgccacccggacgccgcgtccacggtgctctattcccacggcaacgccgcggacctgggccacctctaccagctcttcctgcatctgtccttcaacctccgcgttaacatcctcgggtatgactattcaggatatgggcaatcatcaggaaagccgagtgaacacaatacttatgctgacat

SEQ ID NO: 19962 - protein, 122 aa, Zea mays subsp. mays
  peptide (1)..(122): Ceres Seq. ID no. 4614035
  misc_feature: Pfam Name: Abhydrolase_2 Pfam Description: Phospholipase/Carboxylesterase
  misc_feature (2)..(121): Homolog of NCBI NO: 34905260 NR Description: P0577B11.1 [Oryza sativa (japonica
  misc_feature (1)..(121): Homolog of NCBI NO: 15230760 NR Description: unknown protein; protein id: At3g30380.1
  misc_feature (1)..(121): Homolog of NCBI NO: 25404647 NR Description: hypothetical protein T4O24.3 [imported] -
  misc_feature (1)..(121): Homolog of NCBI NO: 22330474 NR Description: hypothetical protein
  misc_feature (1)..(121): Homolog of NCBI NO: 15240861 NR Description: putative protein; protein id: At5g38220.1
  misc_feature (1)..(121): Homolog of NCBI NO: 10177798 NR Description: emb|CAB87778.1~gene_id:MXA21.9~strong similarity
  misc_feature (1)..(121): Homolog of NCBI NO: 18175921 NR Description: unknown protein [Arabidopsis thaliana]
  misc_feature (1)..(121): Homolog of NCBI NO: 15233975 NR Description: putative protein
  misc_feature (1)..(121): Homolog of NCBI NO: 15241394 NR Description: putative protein
  misc_feature (1)..(121): Homolog of NCBI NO: 15232168 NR Description: unknown protein; protein id: At3g01690.1
MGGVTSSVAAKMAFFPPTPPSYALVEDAGAGVTTLSGQPHRENVELLRFRTRKGNTLAAMYVRHPDAASTVLYSHGNAADLGHLYQLFLHLSFNLRVNILGYDYSGYGQSSGKPSEHNTYAD

SEQ ID NO: 19963 - protein, 121 aa, Zea mays subsp. mays
  peptide (1)..(121): Ceres Seq. ID no. 4614036
  misc_feature: Pfam Name: Abhydrolase_2 Pfam Description: Phospholipase/Carboxylesterase
LKQEAFASWPASSLPTRYRGVTDQDGRGDLECGGEDGLLPADAAVVRAGGGRRCGGHHAQRPAAPGERRVAALPHPQREHAGGDVRAPPGRRVHGALFPRQRRGPGPPLPALPASVLQPPR

SEQ ID NO: 19964 - protein, 111 aa, Zea mays subsp. mays
  peptide (1)..(111): Ceres Seq. ID no. 4614037
  misc_feature: Pfam Name: Abhydrolase_2 Pfam Description: Phospholipase/Carboxylesterase
  misc_feature (1)..(110): Homolog of NCBI NO: 34905260 NR Description: P0577B11.1 [Oryza sativa (japonica
  misc_feature (1)..(110): Homolog of NCBI NO: 15230760 NR Description: unknown protein; protein id: At3g30380.1
  misc_feature (1)..(110): Homolog of NCBI NO: 25404647 NR Description: hypothetical protein T4O24.3 [imported] -
  misc_feature (1)..(110): Homolog of NCBI NO: 22330474 NR Description: hypothetical protein
  misc_feature (1)..(110): Homolog of NCBI NO: 15240861 NR Description: putative protein; protein id: At5g38220.1
  misc_feature (1)..(110): Homolog of NCBI NO: 10177798 NR Description: emb|CAB87778.1~gene_id:MXA21.9~strong similarity
  misc_feature (1)..(110): Homolog of NCBI NO: 18175921 NR Description: unknown protein [Arabidopsis thaliana]
  misc_feature (1)..(110): Homolog of NCBI NO: 15233975 NR Description: putative protein
  misc_feature (1)..(110): Homolog of NCBI NO: 15241394 NR Description: putative protein
  misc_feature (1)..(110): Homolog of NCBI NO: 15232168 NR Description: unknown protein; protein id: At3g01690.1
MAFFPPTPPSYALVEDAGAGVTTLSGQPHRENVELLRFRTRKGNTLAAMYVRHPDAASTVLYSHGNAADLGHLYQLFLHLSFNLRVNILGYDYSGYGQSSGKPSEHNTYAD

SEQ ID NO: 19965 - DNA, 1940 bp, Zea mays subsp. mays
  misc_feature (1)..(1940): Ceres Seq. ID no. 12435492
  misc_feature: MA Experiment ID: 108527 Result: Up-regulated in Transcription
  misc_feature: MA Experiment 108527 PARAMETER Experiment Name: Zm_5mM_NO_P Parameter: Age (day) Value: 8
  misc_feature: MA Experiment 108527 PARAMETER Experiment Name: Zm_5mM_NO_P Parameter: Organism Value: Zea mays
  misc_feature: MA Experiment 108527 PARAMETER Experiment Name: Zm_5mM_NO_P Parameter: Plant Line Value: 35A19
  misc_feature: MA Experiment 108527 PARAMETER Experiment Name: Zm_5mM_NO_P Parameter: Timepoint (hr) Value: 6
  misc_feature: MA Experiment 108527 PARAMETER Experiment Name: Zm_5mM_NO_P Parameter: Tissue Value: Aerial
  misc_feature: MA Experiment 108527 PARAMETER Experiment Name: Zm_5mM_NO_P Parameter: Treatment Value: 5mM NO vs. No Treatment
  misc_feature: MA Experiment ID: 108535 Result: Down-regulated in Transcription
  misc_feature: MA Experiment 108535 PARAMETER Experiment Name: Zm_Meristem_P Parameter: Age (day) Value: 8
  misc_feature: MA Experiment 108535 PARAMETER Experiment Name: Zm_Meristem_P Parameter: Organism Value: Zea mays
  misc_feature: MA Experiment 108535 PARAMETER Experiment Name: Zm_Meristem_P Parameter: Plant Line Value: 35A19
  misc_feature: MA Experiment 108535 PARAMETER Experiment Name: Zm_Meristem_P Parameter: Tissue Value: Root Meristem vs. Above Root Meristem
  misc_feature: MA Experiment ID: 108689 Result: Down-regulated in Transcription
  misc_feature: MA Experiment 108689 PARAMETER Experiment Name: Zm_Drought_Roots_P Parameter: Age (day) Value: 9
  misc_feature: MA Experiment 108689 PARAMETER Experiment Name: Zm_Drought_Roots_P Parameter: Organism Value: Zea mays
  misc_feature: MA Experiment 108689 PARAMETER Experiment Name: Zm_Drought_Roots_P Parameter: Plant Line Value: 35A19
  misc_feature: MA Experiment 108689 PARAMETER Experiment Name: Zm_Drought_Roots_P Parameter: Timepoint (hr) Value: 24
  misc_feature: MA Experiment 108689 PARAMETER Experiment Name: Zm_Drought_Roots_P Parameter: Tissue Value: Roots
  misc_feature: MA Experiment 108689 PARAMETER Experiment Name: Zm_Drought_Roots_P Parameter: Treatment Value: Drought vs. No Drought
agtggccgtgggcgccggcggcggctaacaaaagcgccgggaagtgggcaccgaccgaagcatcccggaacagacacagattaccgcttgtatttagatcggcccagaccatctgacgacgaggaggagggcggggaggcgaggccaaatccggtcggactcggaccggcgaactcccccgacctcgctatgggcagcctccgcgtcgtcggctgggcttggaccgccgccgccgcgccggagtggggcgtgcaccgccgctgctgccgcgggacgccgctggcccgcccccgcgcggcgacgtcctcccttggcgcggggcagctccgggtcgggacggagcncgggtggctctgggattnccncggcggcggcggcgcgggggattacgccagggagatggaggtggcggtgcgcgtcgtgcaggtggcctgcaccctgtgccagcgcgtgcaggactcgctcctccgccccggccccgacgccgccggcggcgacgggcgcgtccacgccaagctcgaccgctcccccgtaaccgtcgctgattggggtgttcaagcgatagtaagctggctgctttccagttcctttcatgatgaggacatatcgatcattgccgaagaagatgatgagacactatctagtagtgacggtgtaactttgcttgaatctgttgttgaggctgtcaacggctgcctggttgaagctccaaactatgggctgagatcccctgagaaagagctcagagctcatgatgttattcaagccatacggaaatgcagctctactggaggcccgaaaggaagattttgggtgcttgatcctgtcgacggcacccttgggtttgtgagaggggaccaatatgctattgctctagccttgattgaagatggagaagttatacttggtgttcttgggtgcccaaattatccaatgaaaaaggagtggctcaattaccatcaaaagtactataggttgatgtctaaggttgctcctcctccattggggtcctggcataaaggttgtgtgatgtatgcccagaaaggatgtggccaagcttggatgcaaccactggttcacgacttcggtaagcttaattggcaccacccaagggagattcaagtatcatccatcagtgatccaatctcagctacgttctgtgaaccagttgagaaagctaactcaagccattccttcacagcaggacttgctcaaagtgtaggattaaggaatcaacctctgcgcgtgtacagcatggtgaaatatgctgcaatagcacgaggcgatgctgaaatcttcatgaaatttgcaagagctggatacaaagagaagatatgggatcatgctgcaggggtggttatcattcaggaggctggtggagtggtcacagatgctggtggccgcccattggacttctcaaggggtgtttacctggaaggtttggatcgaggcataatagcttgttccggagcattgcttcatcaaagaattttaaatgctgttgatgcgagctggaactcatcaacactatgaaccaaacaataaggtcttaggagagaatggcctcatgttggtcatagcatggtaaattggaaaactgatttaagtattcattgtggtgctgttgtgactatggggtaacaccgtaacagtgcagcatataggatagtaatagattgtctgctcatataaacaagaagtcgtctcttgaggctgacaaattgctggcttttgttcaacgatgccatatgtaattttgtataggtgtctgttgatgaaaagcatgtgtgcatgcttttgtttttactaattgacatgtttcttttcaacttgtgcctgtcaatcgtcaggtgtattggttaagacagtgcagcaccatttgctgacaatcataatgttaaaaccttcaactgattcatcaaatgagttattgtccgcct

SEQ ID NO: 19966 - protein, 510 aa, Zea mays subsp. mays
  peptide (1)..(510): Ceres Seq. ID no. 12435493
  misc_feature (127)..(309): Homolog of NCBI NO: 3913517 NR Description: 3'(2'),5'-BISPHOSPHATE NUCLEOTIDASE
  misc_feature (130)..(308): Homolog of NCBI NO: 34395640 NR Description: Probable SAL4 phosphatase (3'(2'),5'-bisphosphate
  misc_feature (326)..(504): Homolog of NCBI NO: 34395640 NR Description: Probable SAL4 phosphatase (3'(2'),5'-bisphosphate
  misc_feature (341)..(501): Homolog of NCBI NO: 14268820 NR Description: diphosphonucleotide phosphatase 1 [Zea mays]
  misc_feature (130)..(312): Homolog of NCBI NO: 14268820 NR Description: diphosphonucleotide phosphatase 1 [Zea mays]
  misc_feature (341)..(501): Homolog of NCBI NO: 15237567 NR Description: 3(2),5-bisphosphate nucleotidase
  misc_feature (130)..(312): Homolog of NCBI NO: 15237567 NR Description: 3(2),5-bisphosphate nucleotidase
  misc_feature (133)..(510): Homolog of NCBI NO: 2736075 NR Description: PAP-specific phosphatase; HAL2-like protein
  misc_feature (133)..(510): Homolog of NCBI NO: 15239631 NR Description: putative protein
  misc_feature (62)..(510): Homolog of NCBI NO: 15451579 NR Description: Putative PAP-specific phosphatase [Oryza sativa]
  misc_feature (115)..(115): Xaa is any aa, unknown or other
  misc_feature (121)..(121): Xaa is any aa, unknown or other
  misc_feature (122)..(122): Xaa is any aa, unknown or other
SGRGRRRRLTKAPGSGHRPKHPGTDTDYRLYLDRPRPSDDEEEGGEARPNPVGLGPANSPDLAMGSLRVVGWAWTAAAAPEWGVHRRCCRGTPLARPRAATSSLGAGQLRVGTEXGWLWDXXGGGGAGDYAREMEVAVRVVQVACTLCQRVQDSLLRPGPDAAGGDGRVHAKLDRSPVTVADWGVQAIVSWLLSSSFHDEDISIIAEEDDETLSSSDGVTLLESVVEAVNGCLVEAPNYGLRSPEKELRAHDVIQAIRKCSSTGGPKGRFWVLDPVDGTLGFVRGDQYAIALALIEDGEVILGVLGCPNYPMKKEWLNYHQKYYRLMSKVAPPPLGSWHKGCVMYAQKGCGQAWMQPLVHDFGKLNWHHPREIQVSSISDPISATFCEPVEKANSSHSFTAGLAQSVGLRNQPLRVYSMVKYAAIARGDAEIFMKFARAGYKEKIWDHAAGVVIIQEAGGVVTDAGGRPLDFSRGVYLEGLDRGIIACSGALLHQRILNAVDASWNSSTL

SEQ ID NO: 19967 - protein, 447 aa, Zea mays subsp. mays
  peptide (1)..(447): Ceres Seq. ID no. 12435494
  misc_feature (64)..(246): Homolog of NCBI NO: 3913517 NR Description: 3'(2'),5'-BISPHOSPHATE NUCLEOTIDASE
  misc_feature (67)..(245): Homolog of NCBI NO: 34395640 NR Description: Probable SAL4 phosphatase (3'(2'),5'-bisphosphate
  misc_feature (263)..(441): Homolog of NCBI NO: 34395640 NR Description: Probable SAL4 phosphatase (3'(2'),5'-bisphosphate
  misc_feature (278)..(438): Homolog of NCBI NO: 14268820 NR Description: diphosphonucleotide phosphatase 1 [Zea mays]
  misc_feature (67)..(249): Homolog of NCBI NO: 14268820 NR Description: diphosphonucleotide phosphatase 1 [Zea mays]
  misc_feature (278)..(438): Homolog of NCBI NO: 15237567 NR Description: 3(2),5-bisphosphate nucleotidase
  misc_feature (67)..(249): Homolog of NCBI NO: 15237567 NR Description: 3(2),5-bisphosphate nucleotidase
  misc_feature (70)..(447): Homolog of NCBI NO: 2736075 NR Description: PAP-specific phosphatase; HAL2-like protein
  misc_feature (70)..(447): Homolog of NCBI NO: 15239631 NR Description: putative protein
  misc_feature (1)..(447): Homolog of NCBI NO: 15451579 NR Description: Putative PAP-specific phosphatase [Oryza sativa]
  misc_feature (52)..(52): Xaa is any aa, unknown or other
  misc_feature (58)..(58): Xaa is any aa, unknown or other
  misc_feature (59)..(59): Xaa is any aa, unknown or other
MGSLRVVGWAWTAAAAPEWGVHRRCCRGTPLARPRAATSSLGAGQLRVGTEXGWLWDXXGGGGAGDYAREMEVAVRVVQVACTLCQRVQDSLLRPGPDAAGGDGRVHAKLDRSPVTVADWGVQAIVSWLLSSSFHDEDISIIAEEDDETLSSSDGVTLLESVVEAVNGCLVEAPNYGLRSPEKELRAHDVIQAIRKCSSTGGPKGRFWVLDPVDGTLGFVRGDQYAIALALIEDGEVILGVLGCPNYPMKKEWLNYHQKYYRLMSKVAPPPLGSWHKGCVMYAQKGCGQAWMQPLVHDFGKLNWHHPREIQVSSISDPISATFCEPVEKANSSHSFTAGLAQSVGLRNQPLRVYSMVKYAAIARGDAEIFMKFARAGYKEKIWDHAAGVVIIQEAGGVVTDAGGRPLDFSRGVYLEGLDRGIIACSGALLHQRILNAVDASWNSSTL

SEQ ID NO: 19968 - protein, 377 aa, Zea mays subsp. mays
  peptide (1)..(377): Ceres Seq. ID no. 12435495
  misc_feature (1)..(175): Homolog of NCBI NO: 34395640 NR Description: Probable SAL4 phosphatase (3'(2'),5'-bisphosphate
  misc_feature (193)..(371): Homolog of NCBI NO: 34395640 NR Description: Probable SAL4 phosphatase (3'(2'),5'-bisphosphate
  misc_feature (208)..(368): Homolog of NCBI NO: 14268820 NR Description: diphosphonucleotide phosphatase 1 [Zea mays]
  misc_feature (1)..(179): Homolog of NCBI NO: 14268820 NR Description: diphosphonucleotide phosphatase 1 [Zea mays]
  misc_feature (208)..(368): Homolog of NCBI NO: 15237567 NR Description: 3(2),5-bisphosphate nucleotidase
  misc_feature (1)..(179): Homolog of NCBI NO: 15237567 NR Description: 3(2),5-bisphosphate nucleotidase
  misc_feature (1)..(377): Homolog of NCBI NO: 2736075 NR Description: PAP-specific phosphatase; HAL2-like protein
  misc_feature (1)..(377): Homolog of NCBI NO: 15239631 NR Description: putative protein
  misc_feature (1)..(377): Homolog of NCBI NO: 15451579 NR Description: Putative PAP-specific phosphatase [Oryza sativa]
  misc_feature (1)..(176): Homolog of NCBI NO: 3913517 NR Description: 3'(2'),5'-BISPHOSPHATE NUCLEOTIDASE
MEVAVRVVQVACTLCQRVQDSLLRPGPDAAGGDGRVHAKLDRSPVTVADWGVQAIVSWLLSSSFHDEDISIIAEEDDETLSSSDGVTLLESVVEAVNGCLVEAPNYGLRSPEKELRAHDVIQAIRKCSSTGGPKGRFWVLDPVDGTLGFVRGDQYAIALALIEDGEVILGVLGCPNYPMKKEWLNYHQKYYRLMSKVAPPPLGSWHKGCVMYAQKGCGQAWMQPLVHDFGKLNWHHPREIQVSSISDPISATFCEPVEKANSSHSFTAGLAQSVGLRNQPLRVYSMVKYAAIARGDAEIFMKFARAGYKEKIWDHAAGVVIIQEAGGVVTDAGGRPLDFSRGVYLEGLDRGIIACSGALLHQRILNAVDASWNSSTL

SEQ ID NO: 19969 - DNA, 1467 bp, Zea mays subsp. mays; identical to SEQ ID NO: 2977
  misc_feature (1)..(1467): Ceres Seq. ID no. 12378238
  misc_feature: MA Experiment ID: 108535 Result: Up-regulated in Transcription
  misc_feature: MA Experiment 108535 PARAMETER Experiment Name: Zm_Meristem_P Parameter: Age (day) Value: 8
  misc_feature: MA Experiment 108535 PARAMETER Experiment Name: Zm_Meristem_P Parameter: Organism Value: Zea mays
  misc_feature: MA Experiment 108535 PARAMETER Experiment Name: Zm_Meristem_P Parameter: Plant Line Value: 35A19
  misc_feature: MA Experiment 108535 PARAMETER Experiment Name: Zm_Meristem_P Parameter: Tissue Value: Root Meristem vs. Above Root Meristem
  misc_feature: MA Experiment ID: 20000492 Result: Down-regulated in Transcription
  misc_feature: MA Experiment 20000492 PARAMETER Experiment Name: Zm_Hybrid_Seed_Dev_P Parameter: DAP Value: 12
  misc_feature: MA Experiment 20000492 PARAMETER Experiment Name: Zm_Hybrid_Seed_Dev_P Parameter: Organism Value: Zea mays
  misc_feature: MA Experiment 20000492 PARAMETER Experiment Name: Zm_Hybrid_Seed_Dev_P Parameter: Plant Line Value: 35A19
  misc_feature: MA Experiment 20000492 PARAMETER Experiment Name: Zm_Hybrid_Seed_Dev_P Parameter: Tissue Value: Fert Kernel vs. Unfert Floret

SEQ ID NO: 19970 - protein, 377 aa, Zea mays subsp. mays; identical to SEQ ID NO: 2978
  peptide (1)..(377): Ceres Seq. ID no. 12378239
  misc_feature (39)..(357): Pfam Name: GDSL-like Lipase/Acylhydrolase Pfam Description: GDSL-like Lipase/Acylhydrolase
  misc_feature (39)..(357): Pfam Name: GDSL-like Lipase/Acylhydrolase Pfam Description: GDSL-like Lipase/Acylhydrolase
  misc_feature (38)..(351): Homolog of NCBI NO: 25404994 NR Description: protein T4O12.13 [imported] - Arabidopsis
  misc_feature (240)..(365): Homolog of NCBI NO: 15228721 NR Description: putative protein; protein id: At3g62280.1
  misc_feature (37)..(361): Homolog of NCBI NO: 15220995 NR Description: lipase, putative; protein id: At1g53940.1
  misc_feature (11)..(357): Homolog of NCBI NO: 7486138 NR Description: hypothetical protein F25I24.160 - Arabidopsis
  misc_feature (11)..(357): Homolog of NCBI NO: 7486718 NR Description: hypothetical protein F8M12.9 - Arabidopsis
  misc_feature (38)..(351): Homolog of NCBI NO: 25404994 NR Description: protein T4O12.13 [imported] - Arabidopsis
  misc_feature (37)..(361): Homolog of NCBI NO: 15220995 NR Description: lipase, putative; protein id: At1g53940.1
  misc_feature (11)..(357): Homolog of NCBI NO: 7486718 NR Description: hypothetical protein F8M12.9 - Arabidopsis
  misc_feature (24)..(371): Homolog of NCBI NO: 34903994 NR Description: unnamed protein product [Oryza sativa (japonica
  misc_feature (12)..(371): Homolog of NCBI NO: 34903996 NR Description: unnamed protein product [Oryza sativa (japonica
  misc_feature (19)..(371): Homolog of NCBI NO: 34903986 NR Description: unnamed protein product [Oryza sativa (japonica
  misc_feature (107)..(354): Homolog of NCBI NO: 15237586 NR Description: lipase -like protein; protein id: At5g03980.1
  misc_feature (78)..(361): Homolog of NCBI NO: 25405682 NR Description: hypothetical protein F15I1.7 [imported] -
  misc_feature (11)..(357): Homolog of NCBI NO: 7486138 NR Description: hypothetical protein F25I24.160 - Arabidopsis
  misc_feature (240)..(365): Homolog of NCBI NO: 15228721 NR Description: putative protein; protein id: At3g62280.1
  misc_feature (78)..(361): Homolog of NCBI NO: 25405682 NR Description: hypothetical protein F15I1.7 [imported] -
  misc_feature (107)..(354): Homolog of NCBI NO: 15237586 NR Description: lipase -like protein; protein id: At5g03980.1
  misc_feature (19)..(371): Homolog of NCBI NO: 34903986 NR Description: unnamed protein product [Oryza sativa (japonica
  misc_feature (12)..(371): Homolog of NCBI NO: 34903996 NR Description: unnamed protein product [Oryza sativa (japonica
  misc_feature (24)..(371): Homolog of NCBI NO: 34903994 NR Description: unnamed protein product [Oryza sativa (japonica

SEQ ID NO: 19971 - protein, 315 aa, Zea mays subsp. mays; identical to SEQ ID NO: 2979
  peptide (1)..(315): Ceres Seq. ID no. 12378240
  misc_feature (1)..(295): Pfam Name: GDSL-like Lipase/Acylhydrolase Pfam Description: GDSL-like Lipase/Acylhydrolase
  misc_feature (1)..(295): Pfam Name: GDSL-like Lipase/Acylhydrolase Pfam Description: GDSL-like Lipase/Acylhydrolase
  misc_feature (1)..(289): Homolog of NCBI NO: 25404994 NR Description: protein T4O12.13 [imported] - Arabidopsis
  misc_feature (178)..(303): Homolog of NCBI NO: 15228721 NR Description: putative protein; protein id: At3g62280.1
  misc_feature (1)..(299): Homolog of NCBI NO: 15220995 NR Description: lipase, putative; protein id: At1g53940.1
  misc_feature (1)..(295): Homolog of NCBI NO: 7486138 NR Description: hypothetical protein F25I24.160 - Arabidopsis
  misc_feature (1)..(295): Homolog of NCBI NO: 7486718 NR Description: hypothetical protein F8M12.9 - Arabidopsis
  misc_feature (1)..(289): Homolog of NCBI NO: 25404994 NR Description: protein T4O12.13 [imported] - Arabidopsis
  misc_feature (1)..(299): Homolog of NCBI NO: 15220995 NR Description: lipase, putative; protein id: At1g53940.1
  misc_feature (1)..(295): Homolog of NCBI NO: 7486718 NR Description: hypothetical protein F8M12.9 - Arabidopsis
  misc_feature (1)..(309): Homolog of NCBI NO: 34903994 NR Description: unnamed protein product [Oryza sativa (japonica
  misc_feature (1)..(309): Homolog of NCBI NO: 34903996 NR Description: unnamed protein product [Oryza sativa (japonica
  misc_feature (1)..(309): Homolog of NCBI NO: 34903986 NR Description: unnamed protein product [Oryza sativa (japonica
  misc_feature (45)..(292): Homolog of NCBI NO: 15237586 NR Description: lipase -like protein; protein id: At5g03980.1
  misc_feature (16)..(299): Homolog of NCBI NO: 25405682 NR Description: hypothetical protein F15I1.7 [imported] -
  misc_feature (1)..(295): Homolog of NCBI NO: 7486138 NR Description: hypothetical protein F25I24.160 - Arabidopsis
  misc_feature (178)..(303): Homolog of NCBI NO: 15228721 NR Description: putative protein; protein id: At3g62280.1
  misc_feature (16)..(299): Homolog of NCBI NO: 25405682 NR Description: hypothetical protein F15I1.7 [imported] -
  misc_feature (45)..(292): Homolog of NCBI NO: 15237586 NR Description: lipase -like protein; protein id: At5g03980.1
  misc_feature (1)..(309): Homolog of NCBI NO: 34903986 NR Description: unnamed protein product [Oryza sativa (japonica
  misc_feature (1)..(309): Homolog of NCBI NO: 34903996 NR Description: unnamed protein product [Oryza sativa (japonica
  misc_feature (1)..(309): Homolog of NCBI NO: 34903994 NR Description: unnamed protein product [Oryza sativa (japonica

SEQ ID NO: 19972 - protein, 267 aa, Zea mays subsp. mays; identical to SEQ ID NO: 2980
  peptide (1)..(267): Ceres Seq. ID no. 12378241
  misc_feature (1)..(247): Pfam Name: GDSL-like Lipase/Acylhydrolase Pfam Description: GDSL-like Lipase/Acylhydrolase
  misc_feature (1)..(247): Pfam Name: GDSL-like Lipase/Acylhydrolase Pfam Description: GDSL-like Lipase/Acylhydrolase
  misc_feature (1)..(241): Homolog of NCBI NO: 25404994 NR Description: protein T4O12.13 [imported] - Arabidopsis
  misc_feature (130)..(255): Homolog of NCBI NO: 15228721 NR Description: putative protein; protein id: At3g62280.1
  misc_feature (1)..(251): Homolog of NCBI NO: 15220995 NR Description: lipase, putative; protein id: At1g53940.1
  misc_feature (1)..(247): Homolog of NCBI NO: 7486138 NR Description: hypothetical protein F25I24.160 - Arabidopsis
  misc_feature (1)..(247): Homolog of NCBI NO: 7486718 NR Description: hypothetical protein F8M12.9 - Arabidopsis
  misc_feature (1)..(241): Homolog of NCBI NO: 25404994 NR Description: protein T4O12.13 [imported] - Arabidopsis
  misc_feature (1)..(251): Homolog of NCBI NO: 15220995 NR Description: lipase, putative; protein id: At1g53940.1
  misc_feature (1)..(247): Homolog of NCBI NO: 7486718 NR Description: hypothetical protein F8M12.9 - Arabidopsis
  misc_feature (1)..(261): Homolog of NCBI NO: 34903994 NR Description: unnamed protein product [Oryza sativa (japonica
  misc_feature (1)..(261): Homolog of NCBI NO: 34903996 NR Description: unnamed protein product [Oryza sativa (japonica
  misc_feature (1)..(261): Homolog of NCBI NO: 34903986 NR Description: unnamed protein product [Oryza sativa (japonica
  misc_feature (1)..(244): Homolog of NCBI NO: 15237586 NR Description: lipase -like protein; protein id: At5g03980.1
  misc_feature (1)..(251): Homolog of NCBI NO: 25405682 NR Description: hypothetical protein F15I1.7 [imported] -
  misc_feature (1)..(247): Homolog of NCBI NO: 7486138 NR Description: hypothetical protein F25I24.160 - Arabidopsis
  misc_feature (130)..(255): Homolog of NCBI NO: 15228721 NR Description: putative protein; protein id: At3g62280.1
  misc_feature (1)..(251): Homolog of NCBI NO: 25405682 NR Description: hypothetical protein F15I1.7 [imported] -
  misc_feature (1)..(244): Homolog of NCBI NO: 15237586 NR Description: lipase -like protein; protein id: At5g03980.1
  misc_feature (1)..(261): Homolog of NCBI NO: 34903986 NR Description: unnamed protein product [Oryza sativa (japonica
  misc_feature (1)..(261): Homolog of NCBI NO: 34903996 NR Description: unnamed protein product [Oryza sativa (japonica
  misc_feature (1)..(261): Homolog of NCBI NO: 34903994 NR Description: unnamed protein product [Oryza sativa (japonica

SEQ ID NO: 19973 - DNA, 377 bp, Zea mays subsp. mays
  misc_feature (1)..(377): Ceres Seq. ID no. 13573995
  misc_feature: MA Experiment ID: 20000629 Result: Down-regulated in Transcription
  misc_feature: MA Experiment 20000629 PARAMETER Experiment Name: Zm_Herbicide-Treatments_P Parameter: Timepoint (hr) Value: 12
  misc_feature: MA Experiment 20000629 PARAMETER Experiment Name: Zm_Herbicide-Treatments_P Parameter: Tissue Value: Aerial
  misc_feature: MA Experiment 20000629 PARAMETER Experiment Name: Zm_Herbicide-Treatments_P Parameter: Treatment Value: Trimec vs. No Treatment
catcgattttcaaatcgctcagggtagtcagtggatgactatgatacaggcccttgcttcaaggcctgggaggcgaccatacctaaggatcactggcatagatgactcgaattctgctcatgcccgaggtggtggactggatatggttggacagaggttgcacagaatggcccagtcatgtggtctgcccttcgagttcaatgctgtgccagcagctagtcatgaggttgtgtttgaagatctttgtctaagatctggggaggccatcgttgtcaattttgcttatcagctgcatcatactcctgatgagagcgtgggcatagaaaaccatcgtgatagaatactgagaatggtcaagagcctctctcctaaggtgg

SEQ ID NO: 19974 - protein, 125 aa, Zea mays subsp. mays
  peptide (1)..(125): Ceres Seq. ID no. 13573996
  misc_feature (1)..(124): Pfam Name: GRAS family transcription factor Pfam Description: GRAS family transcription factor
  misc_feature (1)..(124): Homolog of NCBI NO: 14517552 NR Description: F17J6.12/F17J6.12 [Arabidopsis thaliana]
  misc_feature (1)..(124): Homolog of NCBI NO: 11358827 NR Description: scarecrow-like protein 5
  misc_feature (1)..(124): Homolog of NCBI NO: 25405382 NR Description: scarecrow-like protein [imported] - Arabidopsis
  misc_feature (1)..(124): Homolog of NCBI NO: 11358824 NR Description: scarecrow-like protein 13
  misc_feature (1)..(124): Homolog of NCBI NO: 15236009 NR Description: scarecrow-like transcription factor 13 (SCL13)
  misc_feature (1)..(124): Homolog of NCBI NO: 7488182 NR Description: probable SCARECROW - Arabidopsis thaliana
  misc_feature (1)..(124): Homolog of NCBI NO: 16930433 NR Description: AT4g17230/dl4650c [Arabidopsis thaliana]
  misc_feature (1)..(124): Homolog of NCBI NO: 26450054 NR Description: putative SCARECROW gene regulator [Arabidopsis
  misc_feature (1)..(124): Homolog of NCBI NO: 15238903 NR Description: phytochrome A signal transduction 1 (PAT1)
  misc_feature (1)..(124): Homolog of NCBI NO: 37533564 NR Description: putative SCARECROW gene regulator-like
IDFQIAQGSQWMTMIQALASRPGRRPYLRITGIDDSNSAHARGGGLDMVGQRLHRMAQSCGLPFEFNAVPAASHEVVFEDLCLRSGEAIVVNFAYQLHHTPDESVGIENHRDRILRMVKSLSPKV

SEQ ID NO: 19975 - protein, 114 aa, Zea mays subsp. mays
  peptide (1)..(114): Ceres Seq. ID no. 13573997
  misc_feature (1)..(113): Pfam Name: GRAS family transcription factor Pfam Description: GRAS family transcription factor
  misc_feature (1)..(113): Homolog of NCBI NO: 25405382 NR Description: scarecrow-like protein [imported] - Arabidopsis
  misc_feature (1)..(113): Homolog of NCBI NO: 11358827 NR Description: scarecrow-like protein 5
  misc_feature (1)..(113): Homolog of NCBI NO: 14517552 NR Description: F17J6.12/F17J6.12 [Arabidopsis thaliana]
  misc_feature (1)..(113): Homolog of NCBI NO: 11358824 NR Description: scarecrow-like protein 13
  misc_feature (1)..(113): Homolog of NCBI NO: 15236009 NR Description: scarecrow-like transcription factor 13 (SCL13)
  misc_feature (1)..(113): Homolog of NCBI NO: 7488182 NR Description: probable SCARECROW - Arabidopsis thaliana
  misc_feature (1)..(113): Homolog of NCBI NO: 16930433 NR Description: AT4g17230/dl4650c [Arabidopsis thaliana]
  misc_feature (1)..(113): Homolog of NCBI NO: 26450054 NR Description: putative SCARECROW gene regulator [Arabidopsis
  misc_feature (1)..(113): Homolog of NCBI NO: 15238903 NR Description: phytochrome A signal transduction 1 (PAT1)
  misc_feature (1)..(113): Homolog of NCBI NO: 37533564 NR Description: putative SCARECROW gene regulator-like
MTMIQALASRPGRRPYLRITGIDDSNSAHARGGGLDMVGQRLHRMAQSCGLPFEFNAVPAASHEVVFEDLCLRSGEAIVVNFAYQLHHTPDESVGIENHRDRILRMVKSLSPKV

SEQ ID NO: 19976 - protein, 112 aa, Zea mays subsp. mays
  peptide (1)..(112): Ceres Seq. ID no. 13573998
  misc_feature (1)..(111): Pfam Name: GRAS family transcription factor Pfam Description: GRAS family transcription factor
  misc_feature (1)..(111): Homolog of NCBI NO: 11358827 NR Description: scarecrow-like protein 5
  misc_feature (1)..(111): Homolog of NCBI NO: 25405382 NR Description: scarecrow-like protein [imported] - Arabidopsis
  misc_feature (1)..(111): Homolog of NCBI NO: 14517552 NR Description: F17J6.12/F17J6.12 [Arabidopsis thaliana]
  misc_feature (1)..(111): Homolog of NCBI NO: 11358824 NR Description: scarecrow-like protein 13
  misc_feature (1)..(111): Homolog of NCBI NO: 15236009 NR Description: scarecrow-like transcription factor 13 (SCL13)
  misc_feature (1)..(111): Homolog of NCBI NO: 7488182 NR Description: probable SCARECROW - Arabidopsis thaliana
  misc_feature (1)..(111): Homolog of NCBI NO: 16930433 NR Description: AT4g17230/dl4650c [Arabidopsis thaliana]
  misc_feature (1)..(111): Homolog of NCBI NO: 26450054 NR Description: putative SCARECROW gene regulator [Arabidopsis
  misc_feature (1)..(111): Homolog of NCBI NO: 15238903 NR Description: phytochrome A signal transduction 1 (PAT1)
  misc_feature (1)..(111): Homolog of NCBI NO: 37533564 NR Description: putative SCARECROW gene regulator-like
MIQALASRPGRRPYLRITGIDDSNSAHARGGGLDMVGQRLHRMAQSCGLPFEFNAVPAASHEVVFEDLCLRSGEAIVVNFAYQLHHTPDESVGIENHRDRILRMVKSLSPKV

SEQ ID NO: 19977 - DNA, 1841 bp, Zea mays subsp. mays
  misc_feature (1)..(1841): Ceres Seq. ID no. 12384305
  misc_feature: MA Experiment ID: 108556 Result: Up-regulated in Transcription
  misc_feature: MA Experiment 108556 PARAMETER Experiment Name: Zm_Drought_P Parameter: Age (day) Value: 9
  misc_feature: MA Experiment 108556 PARAMETER Experiment Name: Zm_Drought_P Parameter: Organism Value: Zea mays
  misc_feature: MA Experiment 108556 PARAMETER Experiment Name: Zm_Drought_P Parameter: Plant Line Value: 35A19
  misc_feature: MA Experiment 108556 PARAMETER Experiment Name: Zm_Drought_P Parameter: Timepoint (hr) Value: 24
  misc_feature: MA Experiment 108556 PARAMETER Experiment Name: Zm_Drought_P Parameter: Tissue Value: Aerial
  misc_feature: MA Experiment 108556 PARAMETER Experiment Name: Zm_Drought_P Parameter: Treatment Value: Drought vs. No Drought
  misc_feature: MA Experiment ID: 108689 Result: Up-regulated in Transcription
  misc_feature: MA Experiment 108689 PARAMETER Experiment Name: Zm_Drought_Roots_P Parameter: Age (day) Value: 9
  misc_feature: MA Experiment 108689 PARAMETER Experiment Name: Zm_Drought_Roots_P Parameter: Organism Value: Zea mays
  misc_feature: MA Experiment 108689 PARAMETER Experiment Name: Zm_Drought_Roots_P Parameter: Plant Line Value: 35A19
  misc_feature: MA Experiment 108689 PARAMETER Experiment Name: Zm_Drought_Roots_P Parameter: Timepoint (hr) Value: 24
  misc_feature: MA Experiment 108689 PARAMETER Experiment Name: Zm_Drought_Roots_P Parameter: Tissue Value: Roots
  misc_feature: MA Experiment 108689 PARAMETER Experiment Name: Zm_Drought_Roots_P Parameter: Treatment Value: Drought vs. No Drought
  misc_feature: MA Experiment ID: 20000480 Result: Up-regulated in Transcription
  misc_feature: MA Experiment 20000480 PARAMETER Experiment Name: Zm_Drought_P Parameter: Age (day) Value: 11
  misc_feature: MA Experiment 20000480 PARAMETER Experiment Name: Zm_Drought_P Parameter: Organism Value: Zea mays
  misc_feature: MA Experiment 20000480 PARAMETER Experiment Name: Zm_Drought_P Parameter: Plant Line Value: 35A19
  misc_feature: MA Experiment 20000480 PARAMETER Experiment Name: Zm_Drought_P Parameter: Timepoint (hr) Value: 72
  misc_feature: MA Experiment 20000480 PARAMETER Experiment Name: Zm_Drought_P Parameter: Tissue Value: Aerial
  misc_feature: MA Experiment 20000480 PARAMETER Experiment Name: Zm_Drought_P Parameter: Treatment Value: Drought vs. No Drought
  misc_feature: MA Experiment ID: 20000492 Result: Down-regulated in Transcription
  misc_feature: MA Experiment 20000492 PARAMETER Experiment Name: Zm_Hybrid_Seed_Dev_P Parameter: DAP Value: 12
  misc_feature: MA Experiment 20000492 PARAMETER Experiment Name: Zm_Hybrid_Seed_Dev_P Parameter: Organism Value: Zea mays
  misc_feature: MA Experiment 20000492 PARAMETER Experiment Name: Zm_Hybrid_Seed_Dev_P Parameter: Plant Line Value: 35A19
  misc_feature: MA Experiment 20000492 PARAMETER Experiment Name: Zm_Hybrid_Seed_Dev_P Parameter: Tissue Value: Fert Kernel vs. Unfert Floret
ctctcgcgctaccgctctcttgaaggaagtctccgtccccgcttctgattcactcccccacatcgccatatgtcgccggaggccggaccaatcatgcggcccgccgaccagctactcctcccgttcctcctcctggccgttgcctccgtcgctgccgccggcggctcgtgggagaatggatatgggagcatcctccgcctcccctcctcgtctccgcgccggttcccccgctccgcggccgtcgacctgatccacgcgctcaacctccaccccgccgacgcgtcccctcccctctccaccgccggcgtagagggcgccctcgcccccgcggggaccctcgtcgagaggcccatccgcatcgcgtccttcgcgaacggaggcgccgccacgtcggtggaggacctcggccaccacgcggggtattaccgcctcgccaacacccacgacgccaggatgttctacttcttcttcgagtcgaggggccacaaggacgaccccgtggtgatctggctcacgggcgggcccggctgcagcagcgagctcgcgctcttctacgagaacggccccttcaacatagcggacaacttgtcgctcgtctggaatgattttggttgggacaaggcatcaaatcttatctatgtcgaccagcccactggaactgggtttagttacagctcggattcgcgtgacactcgccacaacgaagctactattagcaatgatctatatgatttcctgcaggccttttttgctgagcacccaaagtatgctaaaaatgatttcttcataactggggaatcatatgctgggcattacattcctgcctttgcaagtcgtgtgcaccagggaaacaagaacaatgagggcattcacattaacttgaagggttttgctattggcaacggactaacagatccagcaatacagtacaaggcataccctgattacgcattggatatgggattaattacaaaaacacaatttaacaggatcaataaaatagttccaacttgtgaattcgcggtcaagctttgtggtacttctggaactgtatcttgccttgctgcgtactttgtctgcaatacaatattcagtgccatcaggacaatcataggcaataaaaattattacgacatcaggaaaccatgcatcggaagcctatgctatgatttctctaatttggagaaatttctcaacctcaaatctgtcagagagagcctaggggttggagatatagagtttgtttcatgcagcccaactgtctatgaggccatgctattagattggatgaggaaccttgaagttggaatccctgaactccttgagagcgacatcaaagtgttgatttatgctggagagtatgacctcatatgtaactggcttgggaactcaaggtgggtaaactctatggaatggtctggaaaggaagcttttgtgtcctcatccgagaagcccttcacagtcgacgggaaagaagctggcgttctaaagagccacggtcctttgagtttcttgaaggttcacgatgctggtcacatggtacctatggatcaaccgaaggctgctctggagatgctgaagaggtggacttctggaaacctttcggagccatcttcaagctcccagaggcttgattttacaatgtaacaaaacacacatgctgctcatgacatttcgagcatgtacctctggatgtttgtaggctcagaaaaggtcctggtcttaggctctgaaaacctcatctggcgaccatacgttatttaccttgtatgggcgctccgcttgctggtgagacacggtgttacgagttacgactcgatgaacatgtaataaagcttttc

SEQ ID NO: 19978 - protein, 525 aa, Zea mays subsp. mays
  peptide (1)..(525): Ceres Seq. ID no. 12384306
  misc_feature (104)..(511): Homolog of NCBI NO: 100571 NR Description: carboxypeptidase C (EC 3.4.16.5) - barley
  misc_feature (9)..(513): Homolog of NCBI NO: 6960455 NR Description: serine carboxypeptidase precursor [Matricaria
  misc_feature (42)..(513): Homolog of NCBI NO: 115874 NR Description: Serine carboxypeptidase III precursor (CP-WIII)
  misc_feature (42)..(513): Homolog of NCBI NO: 82620 NR Description: carboxypeptidase C (EC 3.4.16.5) precursor - wheat
  misc_feature (20)..(523): Homolog of NCBI NO: 2851577 NR Description: Serine carboxypeptidase III precursor (CP-MIII)
  misc_feature (42)..(513): Homolog of NCBI NO: 584893 NR Description: Serine carboxypeptidase III precursor
  misc_feature (14)..(519): Homolog of NCBI NO: 21901929 NR Description: carboxypeptidase type III [Theobroma cacao]
  misc_feature (10)..(519): Homolog of NCBI NO: 18447763 NR Description: putative serine carboxypeptidase precursor
  misc_feature (97)..(525): Homolog of NCBI NO: 1705667 NR Description: Serine carboxypeptidase-like precursor
  misc_feature (97)..(525): Homolog of NCBI NO: 34901686 NR Description: carboxypeptidase C cbp31 [Oryza sativa (japonica
MSPEAGPIMRPADQLLLPFLLLAVASVAAAGGSWENGYGSILRLPSSSPRRFPRSAAVDLIHALNLHPADASPPLSTAGVEGALAPAGTLVERPIRIASFANGGAATSVEDLGHHAGYYRLANTHDARMFYFFFESRGHKDDPVVIWLTGGPGCSSELALFYENGPFNIADNLSLVWNDFGWDKASNLIYVDQPTGTGFSYSSDSRDTRHNEATISNDLYDFLQAFFAEHPKYAKNDFFITGESYAGHYIPAFASRVHQGNKNNEGIHINLKGFAIGNGLTDPAIQYKAYPDYALDMGLITKTQFNRINKIVPTCEFAVKLCGTSGTVSCLAAYFVCNTIFSAIRTIIGNKNYYDIRKPCIGSLCYDFSNLEKFLNLKSVRESLGVGDIEFVSCSPTVYEAMLLDWMRNLEVGIPELLESDIKVLIYAGEYDLICNWLGNSRWVNSMEWSGKEAFVSSSEKPFTVDGKEAGVLKSHGPLSFLKVHDAGHMVPMDQPKAALEMLKRWTSGNLSEPSSSSQRLDFTM

SEQ ID NO: 19979 - protein, 517 aa, Zea mays subsp. mays
  peptide (1)..(517): Ceres Seq. ID no. 12384307
  misc_feature (34)..(505): Homolog of NCBI NO: 584893 NR Description: Serine carboxypeptidase III precursor
  misc_feature (6)..(511): Homolog of NCBI NO: 21901929 NR Description: carboxypeptidase type III [Theobroma cacao]
  misc_feature (2)..(511): Homolog of NCBI NO: 18447763 NR Description: putative serine carboxypeptidase precursor
  misc_feature (89)..(517): Homolog of NCBI NO: 1705667 NR Description: Serine carboxypeptidase-like precursor
  misc_feature (89)..(517): Homolog of NCBI NO: 34901686 NR Description: carboxypeptidase C cbp31 [Oryza sativa (japonica
  misc_feature (96)..(503): Homolog of NCBI NO: 100571 NR Description: carboxypeptidase C (EC 3.4.16.5) - barley
  misc_feature (1)..(505): Homolog of NCBI NO: 6960455 NR Description: serine carboxypeptidase precursor [Matricaria
  misc_feature (34)..(505): Homolog of NCBI NO: 115874 NR Description: Serine carboxypeptidase III precursor (CP-WIII)
  misc_feature (34)..(505): Homolog of NCBI NO: 82620 NR Description: carboxypeptidase C (EC 3.4.16.5) precursor - wheat
  misc_feature (12)..(515): Homolog of NCBI NO: 2851577 NR Description: Serine carboxypeptidase III precursor (CP-MIII)
MRPADQLLLPFLLLAVASVAAAGGSWENGYGSILRLPSSSPRRFPRSAAVDLIHALNLHPADASPPLSTAGVEGALAPAGTLVERPIRIASFANGGAATSVEDLGHHAGYYRLANTHDARMFYFFFESRGHKDDPVVIWLTGGPGCSSELALFYENGPFNIADNLSLVWNDFGWDKASNLIYVDQPTGTGFSYSSDSRDTRHNEATISNDLYDFLQAFFAEHPKYAKNDFFITGESYAGHYIPAFASRVHQGNKNNEGIHINLKGFAIGNGLTDPAIQYKAYPDYALDMGLITKTQFNRINKIVPTCEFAVKLCGTSGTVSCLAAYFVCNTIFSAIRTIIGNKNYYDIRKPCIGSLCYDFSNLEKFLNLKSVRESLGVGDIEFVSCSPTVYEAMLLDWMRNLEVGIPELLESDIKVLIYAGEYDLICNWLGNSRWVNSMEWSGKEAFVSSSEKPFTVDGKEAGVLKSHGPLSFLKVHDAGHMVPMDQPKAALEMLKRWTSGNLSEPSSSSQRLDFTM

SEQ ID NO: 19980 - protein, 397 aa, Zea mays subsp. mays
  peptide (1)..(397): Ceres Seq. ID no. 12384308
  misc_feature (1)..(383): Homolog of NCBI NO: 100571 NR Description: carboxypeptidase C (EC 3.4.16.5) - barley
  misc_feature (1)..(385): Homolog of NCBI NO: 6960455 NR Description: serine carboxypeptidase precursor [Matricaria
  misc_feature (1)..(385): Homolog of NCBI NO: 115874 NR Description: Serine carboxypeptidase III precursor (CP-WIII)
  misc_feature (1)..(385): Homolog of NCBI NO: 82620 NR Description: carboxypeptidase C (EC 3.4.16.5) precursor - wheat
  misc_feature (1)..(395): Homolog of NCBI NO: 2851577 NR Description: Serine carboxypeptidase III precursor (CP-MIII)
  misc_feature (1)..(385): Homolog of NCBI NO: 584893 NR Description: Serine carboxypeptidase III precursor
  misc_feature (1)..(391): Homolog of NCBI NO: 21901929 NR Description: carboxypeptidase type III [Theobroma cacao]
  misc_feature (1)..(391): Homolog of NCBI NO: 18447763 NR Description: putative serine carboxypeptidase precursor
  misc_feature (1)..(397): Homolog of NCBI NO: 1705667 NR Description: Serine carboxypeptidase-like precursor
  misc_feature (1)..(397): Homolog of NCBI NO: 34901686 NR Description: carboxypeptidase C cbp31 [Oryza sativa (japonica
MFYFFFESRGHKDDPVVIWLTGGPGCSSELALFYENGPFNIADNLSLVWNDFGWDKASNLIYVDQPTGTGFSYSSDSRDTRHNEATISNDLYDFLQAFFAEHPKYAKNDFFITGESYAGHYIPAFASRVHQGNKNNEGIHINLKGFAIGNGLTDPAIQYKAYPDYALDMGLITKTQFNRINKIVPTCEFAVKLCGTSGTVSCLAAYFVCNTIFSAIRTIIGNKNYYDIRKPCIGSLCYDFSNLEKFLNLKSVRESLGVGDIEFVSCSPTVYEAMLLDWMRNLEVGIPELLESDIKVLIYAGEYDLICNWLGNSRWVNSMEWSGKEAFVSSSEKPFTVDGKEAGVLKSHGPLSFLKVHDAGHMVPMDQPKAALEMLKRWTSGNLSEPSSSSQRLDFTM

SEQ ID NO: 19981 - DNA, 864 bp, Zea mays subsp. mays
  misc_feature (1)..(864): Ceres Seq. ID no. 12418353
  misc_feature: MA Experiment ID: 20000477 Result: Up-regulated in Transcription
  misc_feature: MA Experiment 20000477 PARAMETER Experiment Name: Zm_5mM_SA_P Parameter: Age (day) Value: 10
  misc_feature: MA Experiment 20000477 PARAMETER Experiment Name: Zm_5mM_SA_P Parameter: Organism Value: Zea mays
  misc_feature: MA Experiment 20000477 PARAMETER Experiment Name: Zm_5mM_SA_P Parameter: Plant Line Value: 35A19
  misc_feature: MA Experiment 20000477 PARAMETER Experiment Name: Zm_5mM_SA_P Parameter: Timepoint (hr) Value: 48
  misc_feature: MA Experiment 20000477 PARAMETER Experiment Name: Zm_5mM_SA_P Parameter: Tissue Value: Aerial
  misc_feature: MA Experiment 20000477 PARAMETER Experiment Name: Zm_5mM_SA_P Parameter: Treatment Value: 5mM SA vs. No Treatment
acctctgttcagccaaagccacctccccaaacccaatcccgtcactatctcattcccctgaccgccggaacaccctaggcaatggagcccaaatccaccacccctcccccgccccccgtgatgggcgcgcccatcgcgtatcctcccccgcccggcgccgcgtaccccgccgggccgtacgtgcacgcgccggcggccgcgctctaccctcctcctcccctgccgccggcgcccccctcctcgcagcagggcgccgcggcggcgcaccagcagcagctattctgggcggagcaataccgcgagatcgaggccaccaccgacttcaagaaccacaacctgccgctcgcccgcatcaagaagatcatgaaggccgacgaggacgtgcgcatgatcgccgccgaggcgcccgtcgtcttctcccgcgcctgcgagatgttcatcctcgagctcacccaccgcggctgggcacacgccgaggagaacaagcgccgcacgctgcagaagtccgacatcgccgccgccgtcgcgcgcaccgaggtcttcgacttcctcgtcgacatcgtgccgcgggacgaggccaaggacgccgactccgccgccatgggagcagccgggatcccgcaccccgccgccggcctgcccgccgccgatcccatgggctactactacgtccagccgcagtaacgaatttgcttccttatcatggtttcgcttccatgcagcctttgcgggtttttagtaaactattattattactgagagtgccctgttgttacccatgctctgttgttgccacccaataactcgatgacctgatgatcatctgatgtgcctcccgttccgtaacaagtgattccatttctg

SEQ ID NO: 19982 - protein, 266 aa, Zea mays subsp. mays
  peptide (1)..(266): Ceres Seq. ID no. 12418354
  misc_feature (10)..(224): Pfam Name: HlyD family secretion protein Pfam Description: HlyD family secretion protein
LCSAKATSPNPIPSLSHSPDRRNTLGNGAQIHHPSPAPRDGRAHRVSSPARRRVPRRAVRARAGGRALPSSSPAAGAPLLAAGRRGGAPAAAILGGAIPRDRGHHRLQEPQPAARPHQEDHEGRRGRAHDRRRGARRLLPRLRDVHPRAHPPRLGTRRGEQAPHAAEVRHRRRRRAHRGLRLPRRHRAAGRGQGRRLRRHGSSRDPAPRRRPARRRSHGLLLRPAAVTNLLPYHGFASMQPLRVFSKLLLLLRVPCCYPCSVVATQ

SEQ ID NO: 19983 - protein, 200 aa, Zea mays subsp. mays
  peptide (1)..(200): Ceres Seq. ID no. 12418355
  misc_feature (73)..(200): Homolog of NCBI NO: 2398533 NR Description: Transcription factor [Arabidopsis thaliana]
  misc_feature (20)..(200): Homolog of NCBI NO: 21554704 NR Description: transcription factor, putative [Arabidopsis
  misc_feature (28)..(187): Homolog of NCBI NO: 15221912 NR Description: heme activated protein, putative; protein id:
  misc_feature (55)..(194): Homolog of NCBI NO: 6289057 NR Description: heme activated protein [Arabidopsis thaliana]
  misc_feature (20)..(200): Homolog of NCBI NO: 15223482 NR Description: transcription factor, putative
  misc_feature (55)..(194): Homolog of NCBI NO: 25372763 NR Description: hypothetical protein [imported] - Arabidopsis
  misc_feature (55)..(194): Homolog of NCBI NO: 15223986 NR Description: putative transcription factor
  misc_feature (37)..(193): Homolog of NCBI NO: 15228405 NR Description: transcription factor Hap5a
  misc_feature (22)..(193): Homolog of NCBI NO: 15242784 NR Description: transcription factor Hap5a-like protein
  misc_feature (1)..(200): Homolog of NCBI NO: 5257260 NR Description: Similar to sequence of BAC F7G19 from Arabidopsis
MEPKSTTPPPPPVMGAPIAYPPPPGAAYPAGPYVHAPAAALYPPPPLPPAPPSSQQGAAAAHQQQLFWAEQYREIEATTDFKNHNLPLARIKKIMKADEDVRMIAAEAPVVFSRACEMFILELTHRGWAHAEENKRRTLQKSDIAAAVARTEVFDFLVDIVPRDEAKDADSAAMGAAGIPHPAAGLPAADPMGYYYVQPQ

SEQ ID NO: 19984 - protein, 187 aa, Zea mays subsp. mays
  peptide (1)..(187): Ceres Seq. ID no. 12418356
  misc_feature (60)..(187): Homolog of NCBI NO: 2398533 NR Description: Transcription factor [Arabidopsis thaliana]
  misc_feature (7)..(187): Homolog of NCBI NO: 21554704 NR Description: transcription factor, putative [Arabidopsis
  misc_feature (15)..(174): Homolog of NCBI NO: 15221912 NR Description: heme activated protein, putative; protein id:
  misc_feature (42)..(181): Homolog of NCBI NO: 6289057 NR Description: heme activated protein [Arabidopsis thaliana]
  misc_feature (7)..(187): Homolog of NCBI NO: 15223482 NR Description: transcription factor, putative
  misc_feature (42)..(181): Homolog of NCBI NO: 25372763 NR Description: hypothetical protein [imported] - Arabidopsis
  misc_feature (42)..(181): Homolog of NCBI NO: 15223986 NR Description: putative transcription factor
  misc_feature (24)..(180): Homolog of NCBI NO: 15228405 NR Description: transcription factor Hap5a
  misc_feature (9)..(180): Homolog of NCBI NO: 15242784 NR Description: transcription factor Hap5a-like protein
  misc_feature (1)..(187): Homolog of NCBI NO: 5257260 NR Description: Similar to sequence of BAC F7G19 from Arabidopsis
MGAPIAYPPPPGAAYPAGPYVHAPAAALYPPPPLPPAPPSSQQGAAAAHQQQLFWAEQYREIEATTDFKNHNLPLARIKKIMKADEDVRMIAAEAPVVFSRACEMFILELTHRGWAHAEENKRRTLQKSDIAAAVARTEVFDFLVDIVPRDEAKDADSAAMGAAGIPHPAAGLPAADPMGYYYVQPQ

SEQ ID NO: 19985 - DNA, 400 bp, Zea mays subsp. mays
  misc_feature (1)..(400): Ceres Seq. ID no. 2731917
  misc_feature: MA Experiment ID: 108527 Result: Down-regulated in Transcription
  misc_feature: MA Experiment 108527 PARAMETER Experiment Name: Zm_5mM_NO_P Parameter: Age (day) Value: 8
  misc_feature: MA Experiment 108527 PARAMETER Experiment Name: Zm_5mM_NO_P Parameter: Organism Value: Zea mays
  misc_feature: MA Experiment 108527 PARAMETER Experiment Name: Zm_5mM_NO_P Parameter: Plant Line Value: 35A19
  misc_feature: MA Experiment 108527 PARAMETER Experiment Name: Zm_5mM_NO_P Parameter: Timepoint (hr) Value: 6
  misc_feature: MA Experiment 108527 PARAMETER Experiment Name: Zm_5mM_NO_P Parameter: Tissue Value: Aerial
  misc_feature: MA Experiment 108527 PARAMETER Experiment Name: Zm_5mM_NO_P Parameter: Treatment Value: 5mM NO vs. No Treatment
  misc_feature: MA Experiment ID: 108528 Result: Up-regulated in Transcription
  misc_feature: MA Experiment 108528 PARAMETER Experiment Name: Zm_Imbibed_Seeds_P Parameter: Age (day) Value: 5 vs. 2
  misc_feature: MA Experiment 108528 PARAMETER Experiment Name: Zm_Imbibed_Seeds_P Parameter: Organism Value: Zea mays
  misc_feature: MA Experiment 108528 PARAMETER Experiment Name: Zm_Imbibed_Seeds_P Parameter: Plant Line Value: 35A19
  misc_feature: MA Experiment 108528 PARAMETER Experiment Name: Zm_Imbibed_Seeds_P Parameter: Tissue Value: Aerial vs. Embryo
  misc_feature: MA Experiment ID: 108530 Result: Up-regulated in Transcription
  misc_feature: MA Experiment 108530 PARAMETER Experiment Name: Zm_Imbibed_Seeds_P Parameter: Age (day) Value: 6 vs. 2
  misc_feature: MA Experiment 108530 PARAMETER Experiment Name: Zm_Imbibed_Seeds_P Parameter: Organism Value: Zea mays
  misc_feature: MA Experiment 108530 PARAMETER Experiment Name: Zm_Imbibed_Seeds_P Parameter: Plant Line Value: 35A19
  misc_feature: MA Experiment 108530 PARAMETER Experiment Name: Zm_Imbibed_Seeds_P Parameter: Tissue Value: Aerial vs. Embryo
  misc_feature: MA Experiment ID: 108545 Result: Up-regulated in Transcription
  misc_feature: MA Experiment 108545 PARAMETER Experiment Name: Zm_Imbibed_Seeds_P Parameter: Age (day) Value: 3 vs. 2
  misc_feature: MA Experiment 108545 PARAMETER Experiment Name: Zm_Imbibed_Seeds_P Parameter: Organism Value: Zea mays
  misc_feature: MA Experiment 108545 PARAMETER Experiment Name: Zm_Imbibed_Seeds_P Parameter: Plant Line Value: 35A19
  misc_feature: MA Experiment 108545 PARAMETER Experiment Name: Zm_Imbibed_Seeds_P Parameter: Tissue Value: Aerial vs. Embryo
  misc_feature: MA Experiment ID: 108547 Result: Up-regulated in Transcription
  misc_feature: MA Experiment 108547 PARAMETER Experiment Name: Zm_Imbibed_Seeds_P Parameter: Age (day) Value: 4 vs. 2
  misc_feature: MA Experiment 108547 PARAMETER Experiment Name: Zm_Imbibed_Seeds_P Parameter: Organism Value: Zea mays
  misc_feature: MA Experiment 108547 PARAMETER Experiment Name: Zm_Imbibed_Seeds_P Parameter: Plant Line Value: 35A19
  misc_feature: MA Experiment 108547 PARAMETER Experiment Name: Zm_Imbibed_Seeds_P Parameter: Tissue Value: Aerial vs. Embryo
  misc_feature: MA Experiment ID: 20000477 Result: Down-regulated in Transcription
  misc_feature: MA Experiment 20000477 PARAMETER Experiment Name: Zm_5mM_SA_P Parameter: Age (day) Value: 10
  misc_feature: MA Experiment 20000477 PARAMETER Experiment Name: Zm_5mM_SA_P Parameter: Organism Value: Zea mays
  misc_feature: MA Experiment 20000477 PARAMETER Experiment Name: Zm_5mM_SA_P Parameter: Plant Line Value: 35A19
  misc_feature: MA Experiment 20000477 PARAMETER Experiment Name: Zm_5mM_SA_P Parameter: Timepoint (hr) Value: 48
  misc_feature: MA Experiment 20000477 PARAMETER Experiment Name: Zm_5mM_SA_P Parameter: Tissue Value: Aerial
  misc_feature: MA Experiment 20000477 PARAMETER Experiment Name: Zm_5mM_SA_P Parameter: Treatment Value: 5mM SA vs. No Treatment
  misc_feature: MA Experiment ID: 20000479 Result: Down-regulated in Transcription
  misc_feature: MA Experiment 20000479 PARAMETER Experiment Name: Zm_Drought_P Parameter: Age (day) Value: 10
  misc_feature: MA Experiment 20000479 PARAMETER Experiment Name: Zm_Drought_P Parameter: Organism Value: Zea mays
  misc_feature: MA Experiment 20000479 PARAMETER Experiment Name: Zm_Drought_P Parameter: Plant Line Value: 35A19
  misc_feature: MA Experiment 20000479 PARAMETER Experiment Name: Zm_Drought_P Parameter: Timepoint (hr) Value: 48
  misc_feature: MA Experiment 20000479 PARAMETER Experiment Name: Zm_Drought_P Parameter: Tissue Value: Aerial
  misc_feature: MA Experiment 20000479 PARAMETER Experiment Name: Zm_Drought_P Parameter: Treatment Value: Drought vs. No Drought
  misc_feature: MA Experiment ID: 20000480 Result: Down-regulated in Transcription
  misc_feature: MA Experiment 20000480 PARAMETER Experiment Name: Zm_Drought_P Parameter: Age (day) Value: 11
  misc_feature: MA Experiment 20000480 PARAMETER Experiment Name: Zm_Drought_P Parameter: Organism Value: Zea mays
  misc_feature: MA Experiment 20000480 PARAMETER Experiment Name: Zm_Drought_P Parameter: Plant Line Value: 35A19
  misc_feature: MA Experiment 20000480 PARAMETER Experiment Name: Zm_Drought_P Parameter: Timepoint (hr) Value: 72
  misc_feature: MA Experiment 20000480 PARAMETER Experiment Name: Zm_Drought_P Parameter: Tissue Value: Aerial
  misc_feature: MA Experiment 20000480 PARAMETER Experiment Name: Zm_Drought_P Parameter: Treatment Value: Drought vs. No Drought
  misc_feature: MA Experiment ID: 20000626 Result: Down-regulated in Transcription
  misc_feature: MA Experiment 20000626 PARAMETER Experiment Name: Zm_Herbicide-Treatments_P Parameter: Timepoint (hr) Value: 12
  misc_feature: MA Experiment 20000626 PARAMETER Experiment Name: Zm_Herbicide-Treatments_P Parameter: Tissue Value: Aerial
  misc_feature: MA Experiment 20000626 PARAMETER Experiment Name: Zm_Herbicide-Treatments_P Parameter: Treatment Value: Roundup vs. No Treatment
gacctcgccgccttcatcgccgactgcatatacgaccaggacaaggccaacaaggtgctgcccattggcgggccggggaaggcgctcacgccgctggagcagggggagatgctgtttcggctgctcgggcgcgagcccaagttcatcaaggtgcccatacagatcatggacgccgttatctgggtgctcgatggattggccaagctgttcccggggttggaggacgccgccgagttcggcaagattggcaggtactatgcctcggagagcatgctgttgctggacccggagaccggggagtacagcgacgagaagacgcccagctacggcaaggacacgctcgagcagttcttccaaagagtgataagggaagggatggcggggcargagcttggcgagc

SEQ ID NO: 19986 - protein, 133 aa, Zea mays subsp. mays
  peptide (1)..(133): Ceres Seq. ID no. 2731918
  misc_feature (1)..(127): Homolog of NCBI NO: 21328662 NR Description: conserved hypothetical protein [uncultured
  misc_feature (1)..(132): Homolog of NCBI NO: 22959007 NR Description: hypothetical protein [Rhodobacter sphaeroides]
  misc_feature (1)..(132): Homolog of NCBI NO: 21673889 NR Description: conserved hypothetical protein [Chlorobium
  misc_feature (1)..(132): Homolog of NCBI NO: 33865497 NR Description: conserved hypothetical protein [Synechococcus sp.
  misc_feature (1)..(132): Homolog of NCBI NO: 21553818 NR Description: unknown [Arabidopsis thaliana]
  misc_feature (1)..(132): Homolog of NCBI NO: 26449404 NR Description: unknown protein [Arabidopsis thaliana]
  misc_feature (1)..(132): Homolog of NCBI NO: 15239530 NR Description: putative protein
  misc_feature (129)..(129): Xaa is any aa, unknown or other
DLAAFIADCIYDQDKANKVLPIGGPGKALTPLEQGEMLFRLLGREPKFIKVPIQIMDAVIWVLDGLAKLFPGLEDAAEFGKIGRYYASESMLLLDPETGEYSDEKTPSYGKDTLEQFFQRVIREGMAGXELGE

SEQ ID NO: 19987 - protein, 132 aa, Zea mays subsp. mays
  peptide (1)..(132): Ceres Seq. ID no. 2731919
  misc_feature (129)..(129): Xaa is any aa, unknown or other
PRRLHRRLHIRPGQGQQGAAHWRAGEGAHAAGAGGDAVSAARARAQVHQGAHTDHGRRYLGARWIGQAVPGVGGRRRVRQDWQVLCLGEHAVAGPGDRGVQRREDAQLRQGHARAVLPKSDKGRDGGAXAWR

SEQ ID NO: 19988 - protein, 120 aa, Zea mays subsp. mays
  peptide (1)..(120): Ceres Seq. ID no. 2731920
TSPPSSPTAYTTRTRPTRCCPLAGRGRRSRRWSRGRCCFGCSGASPSSSRCPYRSWTPLSGCSMDWPSCSRGWRTPPSSARLAGTMPRRACCCWTRRPGSTATRRRPATARTRSSSSSKE

SEQ ID NO: 19989 - DNA, 1828 bp, Zea mays subsp. mays
  misc_feature (1)..(1828): Ceres Seq. ID no. 13495214
  misc_feature: MA Experiment ID: 108527 Result: Down-regulated in Transcription
  misc_feature: MA Experiment 108527 PARAMETER Experiment Name: Zm_5mM_NO_P Parameter: Age (day) Value: 8
  misc_feature: MA Experiment 108527 PARAMETER Experiment Name: Zm_5mM_NO_P Parameter: Organism Value: Zea mays
  misc_feature: MA Experiment 108527 PARAMETER Experiment Name: Zm_5mM_NO_P Parameter: Plant Line Value: 35A19
  misc_feature: MA Experiment 108527 PARAMETER Experiment Name: Zm_5mM_NO_P Parameter: Timepoint (hr) Value: 6
  misc_feature: MA Experiment 108527 PARAMETER Experiment Name: Zm_5mM_NO_P Parameter: Tissue Value: Aerial
  misc_feature: MA Experiment 108527 PARAMETER Experiment Name: Zm_5mM_NO_P Parameter: Treatment Value: 5mM NO vs. No Treatment
  misc_feature: MA Experiment ID: 108545 Result: Up-regulated in Transcription
  misc_feature: MA Experiment 108545 PARAMETER Experiment Name: Zm_Imbibed_Seeds_P Parameter: Age (day) Value: 3 vs. 2
  misc_feature: MA Experiment 108545 PARAMETER Experiment Name: Zm_Imbibed_Seeds_P Parameter: Organism Value: Zea mays
  misc_feature: MA Experiment 108545 PARAMETER Experiment Name: Zm_Imbibed_Seeds_P Parameter: Plant Line Value: 35A19
  misc_feature: MA Experiment 108545 PARAMETER Experiment Name: Zm_Imbibed_Seeds_P Parameter: Tissue Value: Aerial vs. Embryo
  misc_feature: MA Experiment ID: 108559 Result: Down-regulated in Transcription
  misc_feature: MA Experiment 108559 PARAMETER Experiment Name: Zm_5mM_NO_P Parameter: Age (day) Value: 8
  misc_feature: MA Experiment 108559 PARAMETER Experiment Name: Zm_5mM_NO_P Parameter: Organism Value: Zea mays
  misc_feature: MA Experiment 108559 PARAMETER Experiment Name: Zm_5mM_NO_P Parameter: Plant Line Value: 35A19
  misc_feature: MA Experiment 108559 PARAMETER Experiment Name: Zm_5mM_NO_P Parameter: Timepoint (hr) Value: 12
  misc_feature: MA Experiment 108559 PARAMETER Experiment Name: Zm_5mM_NO_P Parameter: Tissue Value: Aerial
  misc_feature: MA Experiment 108559 PARAMETER Experiment Name: Zm_5mM_NO_P Parameter: Treatment Value: 5mM NO vs. No Treatment
  misc_feature: MA Experiment ID: 108689 Result: Down-regulated in Transcription
  misc_feature: MA Experiment 108689 PARAMETER Experiment Name: Zm_Drought_Roots_P Parameter: Age (day) Value: 9
  misc_feature: MA Experiment 108689 PARAMETER Experiment Name: Zm_Drought_Roots_P Parameter: Organism Value: Zea mays
  misc_feature: MA Experiment 108689 PARAMETER Experiment Name: Zm_Drought_Roots_P Parameter: Plant Line Value: 35A19
  misc_feature: MA Experiment 108689 PARAMETER Experiment Name: Zm_Drought_Roots_P Parameter: Timepoint (hr) Value: 24
  misc_feature: MA Experiment 108689 PARAMETER Experiment Name: Zm_Drought_Roots_P Parameter: Tissue Value: Roots
  misc_feature: MA Experiment 108689 PARAMETER Experiment Name: Zm_Drought_Roots_P Parameter: Treatment Value: Drought vs. No Drought
  misc_feature: MA Experiment ID: 20000630 Result: Down-regulated in Transcription
  misc_feature: MA Experiment 20000630 PARAMETER Experiment Name: Zm_Herbicide-Treatments_P Parameter: Timepoint (hr) Value: 4
  misc_feature: MA Experiment 20000630 PARAMETER Experiment Name: Zm_Herbicide-Treatments_P Parameter: Tissue Value: Aerial
  misc_feature: MA Experiment 20000630 PARAMETER Experiment Name: Zm_Herbicide-Treatments_P Parameter: Treatment Value: Roundup vs. No Treatment
gcacgagaccattacctagaacatcctaatcgaaaaaaaccggagcggcggcaccatttcgttaccatggagaacctggcagggcagcagttcgtttatgaggtgacgagtctacgagcattgtttctgctgctcctcctccctcccttcatcttcctcatcatgcgcaacgcgcgagcaacaacactaatgttcgataccaagaggacaaggggccaccggcagcctgcagatcggcagcagagcctcccgccgtcgcctccggcagtgcctgtcctcggccacctgcacctcgtcggctctctcccgcacgtctccctccgcagcctcgccaggacgcttggcgcggacctcatgctgctccgcctgggctccacgccggtgctggtcgtgtcgtcgtccagcgccgccgaggccgtgctgcgcacgcacgaccacgtgttcgcgtcgcggccgcacgccctggtctccgaggtcgtcctgtacggtccgtccgacgtcgggttcgcgccgcacggcgactgctggcggcccggggcggaagctcatcaccacgcaccttctcagcgtcaacagggtgcagtcgttccgccacgcccgggaagaagaggtgagcgtggtgatgggccggatcgccgaggcggcggccgctggtgcggcggtggacgtgggcgagctgctcggctcgttcacgaacgacctagcgtgccgcgccgtgatgggcaagtccttccggagcgagggtcgcaacaagctgttccgggagcttgtcctcgacaccaccaagctgctggtcggcttcaacgtcgaggacttcttccccttcctggctcgcttcggcgtgctcagcaagctggtccgcgccaagtccgagagactgaggaggaggtgggacgagctactcgataggctgatcgaggatcgtgagagcaagtatgaggcggcggcggcgagtgatctcaaggtcaaggacgatgatgacgataacttcatacatgtcttgctctccgttcaacaggagtacggccatattaccagggagcaaatgaaagctctcctgcaggacgtgtttatcggggggatagactccacatcttcgctgctcgagttcaccatggctgagctcatgcggaaaccacgagtgatgaacaagctccaagccgaggtaaggagcagcacgcccgaggggcatgatggagtcgtcggcgaagatagcctggagcacatggcctacctgagggccgtgacaaaagagtccctccggatccataacgtgacgccgctcctggccccgcacctgtccatggatagctgcaccatcgatggctacacggtccccgccggggtgcaggtcctgatcaactcttgggccatcggcagggacacgcgctactggggcgacgacgctgaggagttcgtccctgagaggttcatggacggcggcagcgccgttcatgtcagcttcaaggggagtgacttcgagttcctgccattcgggtctggacgaaggatgtgcgccggggtgaacttcgcgatggccacggtagagctaatgttggcgaacctcgtgcatcgttttgactgggatttaccaccggggcaggagggtcgcgacattgatgtgtcgcaggtgttcggactagtagtccgccggaaaaagaaacttctcttggttccaaaattacgtgtatactagcatccccctccccgcacccaagatatactgggctgttgcatatatgtatgtactgcaataaaggttgcctatatgtaagcttacgacattacttgtactgggtatatgatgcaataatgttattagaaattt

SEQ ID NO: 19990 - protein, 357 aa, Zea mays subsp. mays
  peptide (1)..(357): Ceres Seq. ID no. 13495215
  misc_feature (1)..(351): Pfam Name: Cytochrome P450 Pfam Description: Cytochrome P450
  misc_feature (1)..(357): Homolog of NCBI NO: 7430631 NR Description: cytochrome P450 - maize (fragment)
  misc_feature (1)..(354): Homolog of NCBI NO: 19909888 NR Description: P450 [Triticum aestivum]
  misc_feature (1)..(354): Homolog of NCBI NO: 26655531 NR Description: cytochrome P450 [Triticum aestivum]
  misc_feature (1)..(354): Homolog of NCBI NO: 5921186 NR Description: Cytochrome P450 71C1
  misc_feature (1)..(354): Homolog of NCBI NO: 7430630 NR Description: cytochrome P450 - maize
  misc_feature (1)..(354): Homolog of NCBI NO: 19909886 NR Description: P450 [Triticum aestivum]
  misc_feature (1)..(354): Homolog of NCBI NO: 5921187 NR Description: Cytochrome P450 71C2
  misc_feature (1)..(353): Homolog of NCBI NO: 5921189 NR Description: Cytochrome P450 71C4
  misc_feature (1)..(352): Homolog of NCBI NO: 19909894 NR Description: P450 [Triticum aestivum]
  misc_feature (1)..(352): Homolog of NCBI NO: 19909892 NR Description: P450 [Triticum aestivum]
MGRIAEAAAAGAAVDVGELLGSFTNDLACRAVMGKSFRSEGRNKLFRELVLDTTKLLVGFNVEDFFPFLARFGVLSKLVRAKSERLRRRWDELLDRLIEDRESKYEAAAASDLKVKDDDDDNFIHVLLSVQQEYGHITREQMKALLQDVFIGGIDSTSSLLEFTMAELMRKPRVMNKLQAEVRSSTPEGHDGVVGEDSLEHMAYLRAVTKESLRIHNVTPLLAPHLSMDSCTIDGYTVPAGVQVLINSWAIGRDTRYWGDDAEEFVPERFMDGGSAVHVSFKGSDFEFLPFGSGRRMCAGVNFAMATVELMLANLVHRFDWDLPPGQEGRDIDVSQVFGLVVRRKKKLLLVPKLRVY

SEQ ID NO: 19991 - protein, 325 aa, Zea mays subsp. mays
  peptide (1)..(325): Ceres Seq. ID no. 13495216
  misc_feature (1)..(319): Pfam Name: Cytochrome P450 Pfam Description: Cytochrome P450
  misc_feature (1)..(325): Homolog of NCBI NO: 7430631 NR Description: cytochrome P450 - maize (fragment)
  misc_feature (1)..(322): Homolog of NCBI NO: 19909888 NR Description: P450 [Triticum aestivum]
  misc_feature (1)..(322): Homolog of NCBI NO: 26655531 NR Description: cytochrome P450 [Triticum aestivum]
  misc_feature (1)..(322): Homolog of NCBI NO: 5921186 NR Description: Cytochrome P450 71C1
  misc_feature (1)..(322): Homolog of NCBI NO: 7430630 NR Description: cytochrome P450 - maize
  misc_feature (1)..(322): Homolog of NCBI NO: 19909886 NR Description: P450 [Triticum aestivum]
  misc_feature (1)..(322): Homolog of NCBI NO: 5921187 NR Description: Cytochrome P450 71C2
  misc_feature (1)..(321): Homolog of NCBI NO: 5921189 NR Description: Cytochrome P450 71C4
  misc_feature (1)..(320): Homolog of NCBI NO: 19909894 NR Description: P450 [Triticum aestivum]
  misc_feature (1)..(320): Homolog of NCBI NO: 19909892 NR Description: P450 [Triticum aestivum]
MGKSFRSEGRNKLFRELVLDTTKLLVGFNVEDFFPFLARFGVLSKLVRAKSERLRRRWDELLDRLIEDRESKYEAAAASDLKVKDDDDDNFIHVLLSVQQEYGHITREQMKALLQDVFIGGIDSTSSLLEFTMAELMRKPRVMNKLQAEVRSSTPEGHDGVVGEDSLEHMAYLRAVTKESLRIHNVTPLLAPHLSMDSCTIDGYTVPAGVQVLINSWAIGRDTRYWGDDAEEFVPERFMDGGSAVHVSFKGSDFEFLPFGSGRRMCAGVNFAMATVELMLANLVHRFDWDLPPGQEGRDIDVSQVFGLVVRRKKKLLLVPKLRVY

SEQ ID NO: 19992 - protein, 302 aa, Zea mays subsp. mays
  peptide (1)..(302): Ceres Seq. ID no. 13495217
  misc_feature (85)..(177): Pfam Name: Cytochrome P450 Pfam Description: Cytochrome P450
  misc_feature (36)..(177): Homolog of NCBI NO: 7430631 NR Description: cytochrome P450 - maize (fragment)
  misc_feature (45)..(177): Homolog of NCBI NO: 19909888 NR Description: P450 [Triticum aestivum]
  misc_feature (36)..(177): Homolog of NCBI NO: 26655531 NR Description: cytochrome P450 [Triticum aestivum]
  misc_feature (69)..(177): Homolog of NCBI NO: 5921186 NR Description: Cytochrome P450 71C1
  misc_feature (69)..(177): Homolog of NCBI NO: 7430630 NR Description: cytochrome P450 - maize
  misc_feature (29)..(177): Homolog of NCBI NO: 19909886 NR Description: P450 [Triticum aestivum]
  misc_feature (45)..(179): Homolog of NCBI NO: 5921187 NR Description: Cytochrome P450 71C2
  misc_feature (42)..(177): Homolog of NCBI NO: 5921189 NR Description: Cytochrome P450 71C4
  misc_feature (82)..(177): Homolog of NCBI NO: 19909894 NR Description: P450 [Triticum aestivum]
  misc_feature (82)..(177): Homolog of NCBI NO: 19909892 NR Description: P450 [Triticum aestivum]
ARDHYLEHPNRKKPERRHHFVTMENLAGQQFVYEVTSLRALFLLLLLPPFIFLIMRNARATTLMFDTKRTRGHRQPADRQQSLPPSPPAVPVLGHLHLVGSLPHVSLRSLARTLGADLMLLRLGSTPVLVVSSSSAAEAVLRTHDHVFASRPHALVSEVVLYGPSDVGFAPHGDCWRPGAEAHHHAPSQRQQGAVVPPRPGRRGERGDGPDRRGGGRWCGGGRGRAARLVHERPSVPRRDGQVLPERGSQQAVPGACPRHHQAAGRLQRRGLLPLPGSLRRAQQAGPRQVRETEEEVGRATR

SEQ ID NO: 19993 - DNA, 508 bp, Zea mays subsp. mays
  misc_feature (1)..(508): Ceres Seq. ID no. 12378052
  misc_feature: MA Experiment ID: 20000492 Result: Down-regulated in Transcription
  misc_feature: MA Experiment 20000492 PARAMETER Experiment Name: Zm_Hybrid_Seed_Dev_P Parameter: DAP Value: 12
  misc_feature: MA Experiment 20000492 PARAMETER Experiment Name: Zm_Hybrid_Seed_Dev_P Parameter: Organism Value: Zea mays
  misc_feature: MA Experiment 20000492 PARAMETER Experiment Name: Zm_Hybrid_Seed_Dev_P Parameter: Plant Line Value: 35A19
  misc_feature: MA Experiment 20000492 PARAMETER Experiment Name: Zm_Hybrid_Seed_Dev_P Parameter: Tissue Value: Fert Kernel vs. Unfert Floret
atcgtttctgctttgcaagtcaatcaaactgagccagtgaagaagtttgagcccagatctaaactgtggtctgatactttgagccgaggtctagtcaatctggacatttctggaccaaaagcgaatcctcatgctgatattggagttgactttgattcaatcaatcgcaaggagaaaaggcaggaaaagaaaatcaaccaagcacctgtggtgtctacagtcaccatgggcaaggccatgggagctggttccggcattggtcgggctggtgtaggtgcaatggcacctcctcctaaccaaatgggtgccgggaggggtatgggtcctggtgccggtgccggttatggtggtggaatgggaatgaaccggccaatgggcatggggatgggaatgaatcaacaacagatgaggatggggatgaaccaacaaccgatgggaatggggatggggatgaaccaacaaccgatgggaggaatgaacatggggatggggatgaaccannggatgc

SEQ ID NO: 19994 - protein, 169 aa, Zea mays subsp. mays
  peptide (1)..(169): Ceres Seq. ID no. 12378053
  misc_feature (100)..(165): Pfam Name: Bindin Pfam Description: Bindin
  misc_feature (77)..(165): Homolog of NCBI NO: 10954050 NR Description: ovarian fibroin-like substance-2 [Cyprinus carpio]
  misc_feature (76)..(168): Homolog of NCBI NO: 10954050 NR Description: ovarian fibroin-like substance-2 [Cyprinus carpio]
  misc_feature (76)..(168): Homolog of NCBI NO: 10954050 NR Description: ovarian fibroin-like substance-2 [Cyprinus carpio]
  misc_feature (65)..(166): Homolog of NCBI NO: 15451572 NR Description: Putative epsin [Oryza sativa]
  misc_feature (14)..(164): Homolog of NCBI NO: 18411135 NR Description: epsin-like protein
  misc_feature (14)..(164): Homolog of NCBI NO: 11357285 NR Description: epsin-like protein - Arabidopsis thaliana
  misc_feature (12)..(164): Homolog of NCBI NO: 30689266 NR Description: clathrin binding protein (epsin) -related
  misc_feature (12)..(164): Homolog of NCBI NO: 15215854 NR Description: At2g43170/F14B2.11 [Arabidopsis thaliana]
  misc_feature (12)..(164): Homolog of NCBI NO: 25408842 NR Description: hypothetical protein At2g43170 [imported] -
  misc_feature (1)..(168): Homolog of NCBI NO: 15451572 NR Description: Putative epsin [Oryza sativa]
  misc_feature (167)..(167): Xaa is any aa, unknown or other
  misc_feature (168)..(168): Xaa is any aa, unknown or other
IVSALQVNQTEPVKKFEPRSKLWSDTLSRGLVNLDISGPKANPHADIGVDFDSINRKEKRQEKKINQAPVVSTVTMGKAMGAGSGIGRAGVGAMAPPPNQMGAGRGMGPGAGAGYGGGMGMNRPMGMGMGMNQQQMRMGMNQQPMGMGMGMNQQPMGGMNMGMGMNXXM

SEQ ID NO: 19995 - protein, 94 aa, Zea mays subsp. mays
  peptide (1)..(94): Ceres Seq. ID no. 12378054
  misc_feature (25)..(90): Pfam Name: Bindin Pfam Description: Bindin
  misc_feature (2)..(90): Homolog of NCBI NO: 10954050 NR Description: ovarian fibroin-like substance-2 [Cyprinus carpio]
  misc_feature (1)..(93): Homolog of NCBI NO: 10954050 NR Description: ovarian fibroin-like substance-2 [Cyprinus carpio]
  misc_feature (1)..(93): Homolog of NCBI NO: 10954050 NR Description: ovarian fibroin-like substance-2 [Cyprinus carpio]
  misc_feature (1)..(91): Homolog of NCBI NO: 15451572 NR Description: Putative epsin [Oryza sativa]
  misc_feature (1)..(89): Homolog of NCBI NO: 18411135 NR Description: epsin-like protein
  misc_feature (1)..(89): Homolog of NCBI NO: 11357285 NR Description: epsin-like protein - Arabidopsis thaliana
  misc_feature (1)..(89): Homolog of NCBI NO: 30689266 NR Description: clathrin binding protein (epsin) -related
  misc_feature (1)..(89): Homolog of NCBI NO: 15215854 NR Description: At2g43170/F14B2.11 [Arabidopsis thaliana]
  misc_feature (1)..(89): Homolog of NCBI NO: 25408842 NR Description: hypothetical protein At2g43170 [imported] -
  misc_feature (1)..(93): Homolog of NCBI NO: 15451572 NR Description: Putative epsin [Oryza sativa]
  misc_feature (92)..(92): Xaa is any aa, unknown or other
  misc_feature (93)..(93): Xaa is any aa, unknown or other
MGKAMGAGSGIGRAGVGAMAPPPNQMGAGRGMGPGAGAGYGGGMGMNRPMGMGMGMNQQQMRMGMNQQPMGMGMGMNQQPMGGMNMGMGMNXXM

SEQ ID NO: 19996 - protein, 90 aa, Zea mays subsp. mays
  peptide (1)..(90): Ceres Seq. ID no. 12378055
  misc_feature (21)..(86): Pfam Name: Bindin Pfam Description: Bindin
  misc_feature (1)..(86): Homolog of NCBI NO: 10954050 NR Description: ovarian fibroin-like substance-2 [Cyprinus carpio]
  misc_feature (1)..(89): Homolog of NCBI NO: 10954050 NR Description: ovarian fibroin-like substance-2 [Cyprinus carpio]
  misc_feature (1)..(89): Homolog of NCBI NO: 10954050 NR Description: ovarian fibroin-like substance-2 [Cyprinus carpio]
  misc_feature (1)..(87): Homolog of NCBI NO: 15451572 NR Description: Putative epsin [Oryza sativa]
  misc_feature (1)..(85): Homolog of NCBI NO: 18411135 NR Description: epsin-like protein
  misc_feature (1)..(85): Homolog of NCBI NO: 11357285 NR Description: epsin-like protein - Arabidopsis thaliana
  misc_feature (1)..(85): Homolog of NCBI NO: 30689266 NR Description: clathrin binding protein (epsin) -related
  misc_feature (1)..(85): Homolog of NCBI NO: 15215854 NR Description: At2g43170/F14B2.11 [Arabidopsis thaliana]
  misc_feature (1)..(85): Homolog of NCBI NO: 25408842 NR Description: hypothetical protein At2g43170 [imported] -
  misc_feature (1)..(89): Homolog of NCBI NO: 15451572 NR Description: Putative epsin [Oryza sativa]
  misc_feature (88)..(88): Xaa is any aa, unknown or other
  misc_feature (89)..(89): Xaa is any aa, unknown or other
MGAGSGIGRAGVGAMAPPPNQMGAGRGMGPGAGAGYGGGMGMNRPMGMGMGMNQQQMRMGMNQQPMGMGMGMNQQPMGGMNMGMGMNXXM

SEQ ID NO: 19997 - DNA, 433 bp, Zea mays subsp. mays
  misc_feature (1)..(433): Ceres Seq. ID no. 13635227
  misc_feature: MA Experiment ID: 108535 Result: Up-regulated in Transcription
  misc_feature: MA Experiment 108535 PARAMETER Experiment Name: Zm_Meristem_P Parameter: Age (day) Value: 8
  misc_feature: MA Experiment 108535 PARAMETER Experiment Name: Zm_Meristem_P Parameter: Organism Value: Zea mays
  misc_feature: MA Experiment 108535 PARAMETER Experiment Name: Zm_Meristem_P Parameter: Plant Line Value: 35A19
  misc_feature: MA Experiment 108535 PARAMETER Experiment Name: Zm_Meristem_P Parameter: Tissue Value: Root Meristem vs. Above Root Meristem
  misc_feature: MA Experiment ID: 20000487 Result: Up-regulated in Transcription
  misc_feature: MA Experiment 20000487 PARAMETER Experiment Name: Zm_50mM_NH4NO3_L_to_H_P Parameter: Organism Value: Zea mays
  misc_feature: MA Experiment 20000487 PARAMETER Experiment Name: Zm_50mM_NH4NO3_L_to_H_P Parameter: Timepoint (hr) Value: 4
  misc_feature: MA Experiment 20000487 PARAMETER Experiment Name: Zm_50mM_NH4NO3_L_to_H_P Parameter: Tissue Value: Leaves
  misc_feature: MA Experiment 20000487 PARAMETER Experiment Name: Zm_50mM_NH4NO3_L_to_H_P Parameter: Treatment Value: 50mM NH4NO3 vs. 100mM Mannitol
  misc_feature: MA Experiment ID: 20000535 Result: Up-regulated in Transcription
  misc_feature: MA Experiment 20000535 PARAMETER Experiment Name: Zm_Hybrid_Seed_Dev_P Parameter: DAP Value: 30 vs. 12
  misc_feature: MA Experiment 20000535 PARAMETER Experiment Name: Zm_Hybrid_Seed_Dev_P Parameter: Organism Value: Zea mays
  misc_feature: MA Experiment 20000535 PARAMETER Experiment Name: Zm_Hybrid_Seed_Dev_P Parameter: Plant Line Value: 35A19
  misc_feature: MA Experiment 20000535 PARAMETER Experiment Name: Zm_Hybrid_Seed_Dev_P Parameter: Tissue Value: Embryo vs. Unfert Floret
gcttcactcgcgtccgccccgccgccgcctttcgtcccagcccctaaaccattctccattcctctcatcagtttagcacaatggcactggctaataagcttggtggtctgctcaagaaagccacaagttcaaatctgtctgtctaccaagcaatcagatgcatgtcatccaagctctttgttggagggatttcttatcaaactgatgatcacagtctcagggacgagtttgccaaatatgggcaagtcattgaagctaggattatcattgaccgtgaatctgggaggtctagaggttttggctttgtaacttacacgtcttctgaggaggcttcagctgccattactgccttggatggaaagactctcgatggacggagcatacgtgttaatcatgctaacgagaagacaggtggctttcgtggcggcggtgg

SEQ ID NO: 19998 - protein, 117 aa, Zea mays subsp. mays
  peptide (1)..(117): Ceres Seq. ID no. 13635228
  misc_feature (32)..(103): Pfam Name: RNA recognition motif. (a.k.a. RRM, RBD, or RNP domain) Pfam Description: RNA recognition motif. (a.k.a. RRM, RBD, or RNP
  misc_feature (1)..(116): Homolog of NCBI NO: 2826811 NR Description: AtGRP2 [Arabidopsis thaliana]
  misc_feature (1)..(95): Homolog of NCBI NO: 19881711 NR Description: Putative RNA-binding protein [Oryza sativa]
  misc_feature (1)..(115): Homolog of NCBI NO: 7489099 NR Description: RNA-binding protein RGP-3 - wood tobacco
  misc_feature (1)..(116): Homolog of NCBI NO: 15221187 NR Description: glycine-rich RNA-binding protein [Arabidopsis
  misc_feature (1)..(116): Homolog of NCBI NO: 7439994 NR Description: glycine-rich RNA-binding protein - garden pea
  misc_feature (1)..(116): Homolog of NCBI NO: 15822705 NR Description: RNA-binding protein precursor [Solanum tuberosum]
  misc_feature (1)..(116): Homolog of NCBI NO: 7439995 NR Description: RNA binding protein 3 - wood tobacco
  misc_feature (1)..(116): Homolog of NCBI NO: 15822703 NR Description: RNA-binding protein precursor [Nicotiana tabacum]
  misc_feature (1)..(116): Homolog of NCBI NO: 1084415 NR Description: RNA-binding protein - wood tobacco
  misc_feature (1)..(116): Homolog of NCBI NO: 15239505 NR Description: RNA-binding protein, putative [Arabidopsis
MALANKLGGLLKKATSSNLSVYQAIRCMSSKLFVGGISYQTDDHSLRDEFAKYGQVIEARIIIDRESGRSRGFGFVTYTSSEEASAAITALDGKTLDGRSIRVNHANEKTGGFRGGG

SEQ ID NO: 19999 - protein, 102 aa, Zea mays subsp. mays
  peptide (1)..(102): Ceres Seq. ID no. 13635229
ASLASAPPPPFVPAPKPFSIPLISLAQWHWLISLVVCSRKPQVQICLSTKQSDACHPSSLLEGFLIKLMITVSGTSLPNMGKSLKLGLSLTVNLGGLEVLAL

SEQ ID NO: 20000 - protein, 90 aa, Zea mays subsp. mays
  peptide (1)..(90): Ceres Seq. ID no. 13635230
  misc_feature (5)..(76): Pfam Name: RNA recognition motif. (a.k.a. RRM, RBD, or RNP domain) Pfam Description: RNA recognition motif. (a.k.a. RRM, RBD, or RNP
  misc_feature (1)..(89): Homolog of NCBI NO: 2826811 NR Description: AtGRP2 [Arabidopsis thaliana]
  misc_feature (1)..(68): Homolog of NCBI NO: 19881711 NR Description: Putative RNA-binding protein [Oryza sativa]
  misc_feature (1)..(88): Homolog of NCBI NO: 7489099 NR Description: RNA-binding protein RGP-3 - wood tobacco
  misc_feature (1)..(89): Homolog of NCBI NO: 15221187 NR Description: glycine-rich RNA-binding protein [Arabidopsis
  misc_feature (1)..(89): Homolog of NCBI NO: 7439994 NR Description: glycine-rich RNA-binding protein - garden pea
  misc_feature (1)..(89): Homolog of NCBI NO: 15822705 NR Description: RNA-binding protein precursor [Solanum tuberosum]
  misc_feature (1)..(89): Homolog of NCBI NO: 7439995 NR Description: RNA binding protein 3 - wood tobacco
  misc_feature (1)..(89): Homolog of NCBI NO: 15822703 NR Description: RNA-binding protein precursor [Nicotiana tabacum]
  misc_feature (1)..(89): Homolog of NCBI NO: 1084415 NR Description: RNA-binding protein - wood tobacco
  misc_feature (1)..(89): Homolog of NCBI NO: 15239505 NR Description: RNA-binding protein, putative [Arabidopsis
MSSKLFVGGISYQTDDHSLRDEFAKYGQVIEARIIIDRESGRSRGFGFVTYTSSEEASAAITALDGKTLDGRSIRVNHANEKTGGFRGGG

SEQ ID NO: 20001 - DNA, 1919 bp, Zea mays subsp. mays
  misc_feature (1)..(1919): Ceres Seq. ID no. 13493088
  misc_feature: MA Experiment ID: 108528 Result: Up-regulated in Transcription
  misc_feature: MA Experiment 108528 PARAMETER Experiment Name: Zm_Imbibed_Seeds_P Parameter: Age (day) Value: 5 vs. 2
  misc_feature: MA Experiment 108528 PARAMETER Experiment Name: Zm_Imbibed_Seeds_P Parameter: Organism Value: Zea mays
  misc_feature: MA Experiment 108528 PARAMETER Experiment Name: Zm_Imbibed_Seeds_P Parameter: Plant Line Value: 35A19
  misc_feature: MA Experiment 108528 PARAMETER Experiment Name: Zm_Imbibed_Seeds_P Parameter: Tissue Value: Aerial vs. Embryo
  misc_feature: MA Experiment ID: 108534 Result: Up-regulated in Transcription
  misc_feature: MA Experiment 108534 PARAMETER Experiment Name: Zm_4deg_Cold_P Parameter: Age (hr) Value: 8
  misc_feature: MA Experiment 108534 PARAMETER Experiment Name: Zm_4deg_Cold_P Parameter: Organism Value: Zea mays
  misc_feature: MA Experiment 108534 PARAMETER Experiment Name: Zm_4deg_Cold_P Parameter: Plant Line Value: 35A19
  misc_feature: MA Experiment 108534 PARAMETER Experiment Name: Zm_4deg_Cold_P Parameter: Temperature (deg C) Value: 4 vs. 22
  misc_feature: MA Experiment 108534 PARAMETER Experiment Name: Zm_4deg_Cold_P Parameter: Timepoint (hr) Value: 6
  misc_feature: MA Experiment 108534 PARAMETER Experiment Name: Zm_4deg_Cold_P Parameter: Tissue Value: Aerial
  misc_feature: MA Experiment ID: 108547 Result: Up-regulated in Transcription
  misc_feature: MA Experiment 108547 PARAMETER Experiment Name: Zm_Imbibed_Seeds_P Parameter: Age (day) Value: 4 vs. 2
  misc_feature: MA Experiment 108547 PARAMETER Experiment Name: Zm_Imbibed_Seeds_P Parameter: Organism Value: Zea mays
  misc_feature: MA Experiment 108547 PARAMETER Experiment Name: Zm_Imbibed_Seeds_P Parameter: Plant Line Value: 35A19
  misc_feature: MA Experiment 108547 PARAMETER Experiment Name: Zm_Imbibed_Seeds_P Parameter: Tissue Value: Aerial vs. Embryo
  misc_feature: MA Experiment ID: 20000478 Result: Down-regulated in Transcription
  misc_feature: MA Experiment 20000478 PARAMETER Experiment Name: Zm_5mM_SA_P Parameter: Age (day) Value: 11
  misc_feature: MA Experiment 20000478 PARAMETER Experiment Name: Zm_5mM_SA_P Parameter: Organism Value: Zea mays
  misc_feature: MA Experiment 20000478 PARAMETER Experiment Name: Zm_5mM_SA_P Parameter: Plant Line Value: 35A19
  misc_feature: MA Experiment 20000478 PARAMETER Experiment Name: Zm_5mM_SA_P Parameter: Timepoint (hr) Value: 72
  misc_feature: MA Experiment 20000478 PARAMETER Experiment Name: Zm_5mM_SA_P Parameter: Tissue Value: Aerial
  misc_feature: MA Experiment 20000478 PARAMETER Experiment Name: Zm_5mM_SA_P Parameter: Treatment Value: 5mM SA vs. No Treatment
  misc_feature: MA Experiment ID: 20000479 Result: Down-regulated in Transcription
  misc_feature: MA Experiment 20000479 PARAMETER Experiment Name: Zm_Drought_P Parameter: Age (day) Value: 10
  misc_feature: MA Experiment 20000479 PARAMETER Experiment Name: Zm_Drought_P Parameter: Organism Value: Zea mays
  misc_feature: MA Experiment 20000479 PARAMETER Experiment Name: Zm_Drought_P Parameter: Plant Line Value: 35A19
  misc_feature: MA Experiment 20000479 PARAMETER Experiment Name: Zm_Drought_P Parameter: Timepoint (hr) Value: 48
  misc_feature: MA Experiment 20000479 PARAMETER Experiment Name: Zm_Drought_P Parameter: Tissue Value: Aerial
  misc_feature: MA Experiment 20000479 PARAMETER Experiment Name: Zm_Drought_P Parameter: Treatment Value: Drought vs. No Drought
  misc_feature: MA Experiment ID: 20000488 Result: Up-regulated in Transcription
  misc_feature: MA Experiment 20000488 PARAMETER Experiment Name: Zm_50mM_NH4NO3_L_to_H_P Parameter: Organism Value: Zea mays
  misc_feature: MA Experiment 20000488 PARAMETER Experiment Name: Zm_50mM_NH4NO3_L_to_H_P Parameter: Timepoint (hr) Value: 8
  misc_feature: MA Experiment 20000488 PARAMETER Experiment Name: Zm_50mM_NH4NO3_L_to_H_P Parameter: Tissue Value: Leaves
  misc_feature: MA Experiment 20000488 PARAMETER Experiment Name: Zm_50mM_NH4NO3_L_to_H_P Parameter: Treatment Value: 50mM NH4NO3 vs. 100mM Mannitol
  misc_feature: MA Experiment ID: 20000626 Result: Down-regulated in Transcription
  misc_feature: MA Experiment 20000626 PARAMETER Experiment Name: Zm_Herbicide-Treatments_P Parameter: Timepoint (hr) Value: 12
  misc_feature: MA Experiment 20000626 PARAMETER Experiment Name: Zm_Herbicide-Treatments_P Parameter: Tissue Value: Aerial
  misc_feature: MA Experiment 20000626 PARAMETER Experiment Name: Zm_Herbicide-Treatments_P Parameter: Treatment Value: Roundup vs. No Treatment
  misc_feature: MA Experiment ID: 20000632 Result: Up-regulated in Transcription
  misc_feature: MA Experiment 20000632 PARAMETER Experiment Name: Zm_Herbicide-Treatments_P Parameter: Timepoint (hr) Value: 4
  misc_feature: MA Experiment 20000632 PARAMETER Experiment Name: Zm_Herbicide-Treatments_P Parameter: Tissue Value: Aerial
  misc_feature: MA Experiment 20000632 PARAMETER Experiment Name: Zm_Herbicide-Treatments_P Parameter: Treatment Value: Glean vs. No Treatment
atgtacacattgcccgtccgtgccaccacatccagcatcgtcgccagcctcgccacccccgcgccgtcctcctcctccggctccggccgccccaggctcaggctcatccggaacgcccccgtcttcgccgcccccgccaccgtctgtaaacgggacggcgggcagctgaggagtcaaacgagagagatcgagagagaaagaaagggagggcatccaccagccggcgggcataagaggggaggagagagaggccagagaagaggaggagaagaagaagaagatgagcagctgcctctgccttccgaaaaaaaaggaggggccagcgaaggagaagccgtccacagatacccccacctcgtcactccttcagaaccagaagccctccaacctccacctcctccctccaaggcttcctccaagggcatggaccccaccgtcgagcgcttgaagagcgggttccagaagttcaagaccgaggtctatgacaagaagccggagctgttcgagcctctcaagtccggccagagccccaggtacatggtgttcgcctgctccgactcccgcgtgtgcccgtcggtgacactgggactgcagcccggcgaggcattcaccgtccgcaacatcgcttccatggtcccaccctacgacaagatcaagtacgccggcacagggtccgccatcgagtacgccgtgtgcgcgctcaaggtgcaggtcatcgtggtcattggccacagctgctgcggtggcatcagggcgctcctctccctcaaggacggcgcgcccgacaacttcaccttcgtggaggactgggtcaggatcggcagccctgccaagaacaaggtgaagaaagagcacgcgtccgtgccgttcgatgaccagtgctccatcctggagaaggaggccgtgaacgtgtcgctccagaacctcaagagctaccccttcgtcaaggaagggctggccggcgggacgctcaagctggttggcgcccactcacacttcgtcaaagggcagttcgtcacatgggagcctccccaggacgccatcgagcgcttgacgagcggcttccagcagttcaaggtcaatgtctatgacaagaagccggagcttttcgggcctctcaagtccggccaggcccccaagtacatggtgttcgcctgctccgactcccgtgtgtgcccgtcggtgaccctgggcctgcagccgggcgaggccttcaccgttcgcaacatcgccgccatggtcccaggctacgacaagaccaagtacaccggcatcgggtccgccatcgagtacgctgtgtgcgccctcaaggtggaggtcctcgtggtcattggccatagctgctgcggtggcatcagggcgctcctctcactccaggacggcgcagcctacaccttccacttcgtcgaggactgggttaagatcggcttcattgccaagatgaaggtaaagaaagagcacgcctcggtgccgttcgatgaccagtgctccattctcgagaaggaggccgtgaacgtgtccctggagaacctcaagacctaccccttcgtcaaggaagggcttgcaaatgggaccctcaagctgatcggcgcccactacgactttgtctcaggagagttcctcacatggaaaaagtgaaaaactagggctaaggcaattctaccggcccgccgactctgcatcatcataatatatatactataactatactactagctacctaccgatagtcacccgagcaatgtgaatgcgtcgagtactatctgttttctgcatctacatatatataccggatcaacaatcgcccaatgtgaatgtaataagcaatatcattttctaccacttttcattcctaacgctgaggctttttatgtactatatcttatatgatgaataataatatgaccgccttgtgatct

SEQ ID NO: 20002 - protein, 545 aa, Zea mays subsp. mays
  peptide (1)..(545): Ceres Seq. ID no. 13493089
  misc_feature (140)..(342): Homolog of NCBI NO: 882248 NR Description: carbonic anhydrase 1
  misc_feature (347)..(545): Homolog of NCBI NO: 729003 NR Description: CARBONIC ANHYDRASE, CHLOROPLAST PRECURSOR
  misc_feature (346)..(545): Homolog of NCBI NO: 882248 NR Description: carbonic anhydrase 1
  misc_feature (142)..(342): Homolog of NCBI NO: 729003 NR Description: CARBONIC ANHYDRASE, CHLOROPLAST PRECURSOR
  misc_feature (340)..(545): Homolog of NCBI NO: 882246 NR Description: carbonic anhydrase 2
  misc_feature (118)..(343): Homolog of NCBI NO: 34911604 NR Description: carbonic anhydrase [Oryza sativa (japonica
  misc_feature (98)..(343): Homolog of NCBI NO: 7436816 NR Description: probable carbonate dehydratase (EC 4.2.1.1),
  misc_feature (146)..(545): Homolog of NCBI NO: 7489810 NR Description: probable carbonate dehydratase (EC 4.2.1.1) -
  misc_feature (137)..(544): Homolog of NCBI NO: 7489810 NR Description: probable carbonate dehydratase (EC 4.2.1.1) -
  misc_feature (1)..(545): Homolog of NCBI NO: 7489809 NR Description: probable carbonate dehydratase (EC 4.2.1.1) -
MYTLPVRATTSSIVASLATPAPSSSSGSGRPRLRLIRNAPVFAAPATVCKRDGGQLRSQTREIERERKGGHPPAGGHKRGGERGQRRGGEEEEDEQLPLPSEKKGGASEGEAVHRYPHLVTPSEPEALQPPPPPSKASSKGMDPTVERLKSGFQKFKTEVYDKKPELFEPLKSGQSPRYMVFACSDSRVCPSVTLGLQPGEAFTVRNIASMVPPYDKIKYAGTGSAIEYAVCALKVQVIVVIGHSCCGGIRALLSLKDGAPDNFTFVEDWVRIGSPAKNKVKKEHASVPFDDQCSILEKEAVNVSLQNLKSYPFVKEGLAGGTLKLVGAHSHFVKGQFVTWEPPQDAIERLTSGFQQFKVNVYDKKPELFGPLKSGQAPKYMVFACSDSRVCPSVTLGLQPGEAFTVRNIAAMVPGYDKTKYTGIGSAIEYAVCALKVEVLVVIGHSCCGGIRALLSLQDGAAYTFHFVEDWVKIGFIAKMKVKKEHASVPFDDQCSILEKEAVNVSLENLKTYPFVKEGLANGTLKLIGAHYDFVSGEFLTWKK

SEQ ID NO: 20003 - protein, 404 aa, Zea mays subsp. mays
  peptide (1)..(404): Ceres Seq. ID no. 13493090
  misc_feature (1)..(201): Homolog of NCBI NO: 882248 NR Description: carbonic anhydrase 1
  misc_feature (206)..(404): Homolog of NCBI NO: 729003 NR Description: CARBONIC ANHYDRASE, CHLOROPLAST PRECURSOR
  misc_feature (205)..(404): Homolog of NCBI NO: 882248 NR Description: carbonic anhydrase 1
  misc_feature (1)..(201): Homolog of NCBI NO: 729003 NR Description: CARBONIC ANHYDRASE, CHLOROPLAST PRECURSOR
  misc_feature (199)..(404): Homolog of NCBI NO: 882246 NR Description: carbonic anhydrase 2
  misc_feature (1)..(202): Homolog of NCBI NO: 34911604 NR Description: carbonic anhydrase [Oryza sativa (japonica
  misc_feature (1)..(202): Homolog of NCBI NO: 7436816 NR Description: probable carbonate dehydratase (EC 4.2.1.1),
  misc_feature (5)..(404): Homolog of NCBI NO: 7489810 NR Description: probable carbonate dehydratase (EC 4.2.1.1) -
  misc_feature (1)..(403): Homolog of NCBI NO: 7489810 NR Description: probable carbonate dehydratase (EC 4.2.1.1) -
  misc_feature (1)..(404): Homolog of NCBI NO: 7489809 NR Description: probable carbonate dehydratase (EC 4.2.1.1) -
MDPTVERLKSGFQKFKTEVYDKKPELFEPLKSGQSPRYMVFACSDSRVCPSVTLGLQPGEAFTVRNIASMVPPYDKIKYAGTGSAIEYAVCALKVQVIVVIGHSCCGGIRALLSLKDGAPDNFTFVEDWVRIGSPAKNKVKKEHASVPFDDQCSILEKEAVNVSLQNLKSYPFVKEGLAGGTLKLVGAHSHFVKGQFVTWEPPQDAIERLTSGFQQFKVNVYDKKPELFGPLKSGQAPKYMVFACSDSRVCPSVTLGLQPGEAFTVRNIAAMVPGYDKTKYTGIGSAIEYAVCALKVEVLVVIGHSCCGGIRALLSLQDGAAYTFHFVEDWVKIGFIAKMKVKKEHASVPFDDQCSILEKEAVNVSLENLKTYPFVKEGLANGTLKLIGAHYDFVSGEFLTWKK

SEQ ID NO: 20004 - protein, 366 aa, Zea mays subsp. mays
  peptide (1)..(366): Ceres Seq. ID no. 13493091
  misc_feature (1)..(163): Homolog of NCBI NO: 882248 NR Description: carbonic anhydrase 1
  misc_feature (168)..(366): Homolog of NCBI NO: 729003 NR Description: CARBONIC ANHYDRASE, CHLOROPLAST PRECURSOR
  misc_feature (167)..(366): Homolog of NCBI NO: 882248 NR Description: carbonic anhydrase 1
  misc_feature (1)..(163): Homolog of NCBI NO: 729003 NR Description: CARBONIC ANHYDRASE, CHLOROPLAST PRECURSOR
  misc_feature (161)..(366): Homolog of NCBI NO: 882246 NR Description: carbonic anhydrase 2
  misc_feature (1)..(164): Homolog of NCBI NO: 34911604 NR Description: carbonic anhydrase [Oryza sativa (japonica
  misc_feature (1)..(164): Homolog of NCBI NO: 7436816 NR Description: probable carbonate dehydratase (EC 4.2.1.1),
  misc_feature (1)..(366): Homolog of NCBI NO: 7489810 NR Description: probable carbonate dehydratase (EC 4.2.1.1) -
  misc_feature (1)..(365): Homolog of NCBI NO: 7489810 NR Description: probable carbonate dehydratase (EC 4.2.1.1) -
  misc_feature (1)..(366): Homolog of NCBI NO: 7489809 NR Description: probable carbonate dehydratase (EC 4.2.1.1) -
MVFACSDSRVCPSVTLGLQPGEAFTVRNIASMVPPYDKIKYAGTGSAIEYAVCALKVQVIVVIGHSCCGGIRALLSLKDGAPDNFTFVEDWVRIGSPAKNKVKKEHASVPFDDQCSILEKEAVNVSLQNLKSYPFVKEGLAGGTLKLVGAHSHFVKGQFVTWEPPQDAIERLTSGFQQFKVNVYDKKPELFGPLKSGQAPKYMVFACSDSRVCPSVTLGLQPGEAFTVRNIAAMVPGYDKTKYTGIGSAIEYAVCALKVEVLVVIGHSCCGGIRALLSLQDGAAYTFHFVEDWVKIGFIAKMKVKKEHASVPFDDQCSILEKEAVNVSLENLKTYPFVKEGLANGTLKLIGAHYDFVSGEFLTWKK

SEQ ID NO: 20005 - DNA, 724 bp, Zea mays subsp. mays
  misc_feature (1)..(724): Ceres Seq. ID no. 12378048
  misc_feature: MA Experiment ID: 108527 Result: Up-regulated in Transcription
  misc_feature: MA Experiment 108527 PARAMETER Experiment Name: Zm_5mM_NO_P Parameter: Age (day) Value: 8
  misc_feature: MA Experiment 108527 PARAMETER Experiment Name: Zm_5mM_NO_P Parameter: Organism Value: Zea mays
  misc_feature: MA Experiment 108527 PARAMETER Experiment Name: Zm_5mM_NO_P Parameter: Plant Line Value: 35A19
  misc_feature: MA Experiment 108527 PARAMETER Experiment Name: Zm_5mM_NO_P Parameter: Timepoint (hr) Value: 6
  misc_feature: MA Experiment 108527 PARAMETER Experiment Name: Zm_5mM_NO_P Parameter: Tissue Value: Aerial
  misc_feature: MA Experiment 108527 PARAMETER Experiment Name: Zm_5mM_NO_P Parameter: Treatment Value: 5mM NO vs. No Treatment
  misc_feature: MA Experiment ID: 108529 Result: Down-regulated in Transcription
  misc_feature: MA Experiment 108529 PARAMETER Experiment Name: Zm_Imbibed_Seeds_P Parameter: Age (day) Value: 5 vs. 2
  misc_feature: MA Experiment 108529 PARAMETER Experiment Name: Zm_Imbibed_Seeds_P Parameter: Organism Value: Zea mays
  misc_feature: MA Experiment 108529 PARAMETER Experiment Name: Zm_Imbibed_Seeds_P Parameter: Plant Line Value: 35A19
  misc_feature: MA Experiment 108529 PARAMETER Experiment Name: Zm_Imbibed_Seeds_P Parameter: Tissue Value: Roots vs. Embryo
  misc_feature: MA Experiment ID: 108535 Result: Up-regulated in Transcription
  misc_feature: MA Experiment 108535 PARAMETER Experiment Name: Zm_Meristem_P Parameter: Age (day) Value: 8
  misc_feature: MA Experiment 108535 PARAMETER Experiment Name: Zm_Meristem_P Parameter: Organism Value: Zea mays
  misc_feature: MA Experiment 108535 PARAMETER Experiment Name: Zm_Meristem_P Parameter: Plant Line Value: 35A19
  misc_feature: MA Experiment 108535 PARAMETER Experiment Name: Zm_Meristem_P Parameter: Tissue Value: Root Meristem vs. Above Root Meristem
  misc_feature: MA Experiment ID: 108536 Result: Down-regulated in Transcription
  misc_feature: MA Experiment 108536 PARAMETER Experiment Name: Zm_Meristem_P Parameter: Age (day) Value: 8
  misc_feature: MA Experiment 108536 PARAMETER Experiment Name: Zm_Meristem_P Parameter: Organism Value: Zea mays
  misc_feature: MA Experiment 108536 PARAMETER Experiment Name: Zm_Meristem_P Parameter: Plant Line Value: 35A19
  misc_feature: MA Experiment 108536 PARAMETER Experiment Name: Zm_Meristem_P Parameter: Tissue Value: Shoot Meristem vs. Above Shoot Meristem
  misc_feature: MA Experiment ID: 108543 Result: Up-regulated in Transcription
  misc_feature: MA Experiment ID: 20000492 Result: Up-regulated in Transcription
  misc_feature: MA Experiment 20000492 PARAMETER Experiment Name: Zm_Hybrid_Seed_Dev_P Parameter: DAP Value: 12
  misc_feature: MA Experiment 20000492 PARAMETER Experiment Name: Zm_Hybrid_Seed_Dev_P Parameter: Organism Value: Zea mays
  misc_feature: MA Experiment 20000492 PARAMETER Experiment Name: Zm_Hybrid_Seed_Dev_P Parameter: Plant Line Value: 35A19
  misc_feature: MA Experiment 20000492 PARAMETER Experiment Name: Zm_Hybrid_Seed_Dev_P Parameter: Tissue Value: Fert Kernel vs. Unfert Floret
ccccagctgccggctgttcggtgcccagagatcgccgcacgatctcctcggcggcggcgccgttgcggatgtggtgctgtggaggaagaaggaggtggccaccgggacgctggcggccgtggtggcctcatgggcgctcttctactgcgtgcccggctacactctgctctccttcctggcccaggtgctcatgatcctgctcaccgtcctcttcgtctgggccaaggctgcgcagctgctcaacagggcacctccgcctatcccattgatgaaaatttctgacgagtcaatgagtgaagcagcagaaatggttggtagcttcatcaacaaggtgctcaaggatttcgaaaacattgcacttgggaaggataacagcctcttctacaaggtggcttttgtgctgttgctggcctccatagttggacgactgaccgatcttatcactttagtatatacaagtgctattattgctctcacggtccctgcattgctggagaaatccgaagaacacattgccagattnttcaagaaaacttcgatatatgttcaggcatttggcagagcatgcaaagagtataaatgtaagatgacgaatatgatatcggaaacgaagaaactgcgttgatgtcaatgtgttttcactagcaaattttgacttgtgagattgcttcttcggaagcgaaatagttgtgacttttggcatcaatcacaatcgtgatcttac

SEQ ID NO: 20006 - protein, 207 aa, Zea mays subsp. mays
  peptide (1)..(207): Ceres Seq. ID no. 12378049
  misc_feature (4)..(171): Homolog of NCBI NO: 18406991 NR Description: expressed protein
  misc_feature (4)..(194): Homolog of NCBI NO: 34909318 NR Description: OSJNBb0021A09.5 [Oryza sativa (japonica
  misc_feature (4)..(171): Homolog of NCBI NO: 34904202 NR Description: P0492F05.25 [Oryza sativa (japonica
  misc_feature (4)..(171): Homolog of NCBI NO: 34899590 NR Description: hypothetical protein~similar to Oryza sativa
  misc_feature (4)..(171): Homolog of NCBI NO: 15238125 NR Description: putative protein
  misc_feature (11)..(187): Homolog of NCBI NO: 21593206 NR Description: unknown [Arabidopsis thaliana]
  misc_feature (11)..(187): Homolog of NCBI NO: 18402246 NR Description: expressed protein
  misc_feature (26)..(156): Homolog of NCBI NO: 38344513 NR Description: OSJNBa0016N04.6 [Oryza sativa (japonica
  misc_feature (8)..(171): Homolog of NCBI NO: 38345298 NR Description: OSJNBa0043A12.26 [Oryza sativa (japonica
  misc_feature (2)..(171): Homolog of NCBI NO: 15232423 NR Description: putative protein; protein id: At3g54120.1
  misc_feature (174)..(174): Xaa is any aa, unknown or other
PSCRLFGAQRSPHDLLGGGAVADVVLWRKKEVATGTLAAVVASWALFYCVPGYTLLSFLAQVLMILLTVLFVWAKAAQLLNRAPPPIPLMKISDESMSEAAEMVGSFINKVLKDFENIALGKDNSLFYKVAFVLLLASIVGRLTDLITLVYTSAIIALTVPALLEKSEEHIARXFKKTSIYVQAFGRACKEYKCKMTNMISETKKLR

SEQ ID NO: 20007 - protein, 144 aa, Zea mays subsp. mays
  peptide (1)..(144): Ceres Seq. ID no. 12378050
  misc_feature (1)..(108): Homolog of NCBI NO: 18406991 NR Description: expressed protein
  misc_feature (1)..(131): Homolog of NCBI NO: 34909318 NR Description: OSJNBb0021A09.5 [Oryza sativa (japonica
  misc_feature (1)..(108): Homolog of NCBI NO: 34904202 NR Description: P0492F05.25 [Oryza sativa (japonica
  misc_feature (1)..(108): Homolog of NCBI NO: 34899590 NR Description: hypothetical protein~similar to Oryza sativa
  misc_feature (1)..(108): Homolog of NCBI NO: 15238125 NR Description: putative protein
  misc_feature (1)..(124): Homolog of NCBI NO: 21593206 NR Description: unknown [Arabidopsis thaliana]
  misc_feature (1)..(124): Homolog of NCBI NO: 18402246 NR Description: expressed protein
  misc_feature (1)..(93): Homolog of NCBI NO: 38344513 NR Description: OSJNBa0016N04.6 [Oryza sativa (japonica
  misc_feature (1)..(108): Homolog of NCBI NO: 38345298 NR Description: OSJNBa0043A12.26 [Oryza sativa (japonica
  misc_feature (1)..(108): Homolog of NCBI NO: 15232423 NR Description: putative protein; protein id: At3g54120.1
  misc_feature (111)..(111): Xaa is any aa, unknown or other
MILLTVLFVWAKAAQLLNRAPPPIPLMKISDESMSEAAEMVGSFINKVLKDFENIALGKDNSLFYKVAFVLLLASIVGRLTDLITLVYTSAIIALTVPALLEKSEEHIARXFKKTSIYVQAFGRACKEYKCKMTNMISETKKLR

SEQ ID NO: 20008 - protein, 118 aa, Zea mays subsp. mays
  peptide (1)..(118): Ceres Seq. ID no. 12378051
  misc_feature (1)..(82): Homolog of NCBI NO: 18406991 NR Description: expressed protein
  misc_feature (1)..(105): Homolog of NCBI NO: 34909318 NR Description: OSJNBb0021A09.5 [Oryza sativa (japonica
  misc_feature (1)..(82): Homolog of NCBI NO: 34904202 NR Description: P0492F05.25 [Oryza sativa (japonica
  misc_feature (1)..(82): Homolog of NCBI NO: 34899590 NR Description: hypothetical protein~similar to Oryza sativa
  misc_feature (1)..(82): Homolog of NCBI NO: 15238125 NR Description: putative protein
  misc_feature (1)..(98): Homolog of NCBI NO: 21593206 NR Description: unknown [Arabidopsis thaliana]
  misc_feature (1)..(98): Homolog of NCBI NO: 18402246 NR Description: expressed protein
  misc_feature (1)..(67): Homolog of NCBI NO: 38344513 NR Description: OSJNBa0016N04.6 [Oryza sativa (japonica
  misc_feature (1)..(82): Homolog of NCBI NO: 38345298 NR Description: OSJNBa0043A12.26 [Oryza sativa (japonica
  misc_feature (1)..(82): Homolog of NCBI NO: 15232423 NR Description: putative protein; protein id: At3g54120.1
  misc_feature (85)..(85): Xaa is any aa, unknown or other
MKISDESMSEAAEMVGSFINKVLKDFENIALGKDNSLFYKVAFVLLLASIVGRLTDLITLVYTSAIIALTVPALLEKSEEHIARXFKKTSIYVQAFGRACKEYKCKMTNMISETKKLR

SEQ ID NO: 20009 - DNA, 1453 bp, Zea mays subsp. mays
  misc_feature (1)..(1453): Ceres Seq. ID no. 12381732
  misc_feature: MA Experiment ID: 108528 Result: Down-regulated in Transcription
  misc_feature: MA Experiment 108528 PARAMETER Experiment Name: Zm_Imbibed_Seeds_P Parameter: Age (day) Value: 5 vs. 2
  misc_feature: MA Experiment 108528 PARAMETER Experiment Name: Zm_Imbibed_Seeds_P Parameter: Organism Value: Zea mays
  misc_feature: MA Experiment 108528 PARAMETER Experiment Name: Zm_Imbibed_Seeds_P Parameter: Plant Line Value: 35A19
  misc_feature: MA Experiment 108528 PARAMETER Experiment Name: Zm_Imbibed_Seeds_P Parameter: Tissue Value: Aerial vs. Embryo
  misc_feature: MA Experiment ID: 108530 Result: Down-regulated in Transcription
  misc_feature: MA Experiment 108530 PARAMETER Experiment Name: Zm_Imbibed_Seeds_P Parameter: Age (day) Value: 6 vs. 2
  misc_feature: MA Experiment 108530 PARAMETER Experiment Name: Zm_Imbibed_Seeds_P Parameter: Organism Value: Zea mays
  misc_feature: MA Experiment 108530 PARAMETER Experiment Name: Zm_Imbibed_Seeds_P Parameter: Plant Line Value: 35A19
  misc_feature: MA Experiment 108530 PARAMETER Experiment Name: Zm_Imbibed_Seeds_P Parameter: Tissue Value: Aerial vs. Embryo
  misc_feature: MA Experiment ID: 108535 Result: Down-regulated in Transcription
  misc_feature: MA Experiment 108535 PARAMETER Experiment Name: Zm_Meristem_P Parameter: Age (day) Value: 8
  misc_feature: MA Experiment 108535 PARAMETER Experiment Name: Zm_Meristem_P Parameter: Organism Value: Zea mays
  misc_feature: MA Experiment 108535 PARAMETER Experiment Name: Zm_Meristem_P Parameter: Plant Line Value: 35A19
  misc_feature: MA Experiment 108535 PARAMETER Experiment Name: Zm_Meristem_P Parameter: Tissue Value: Root Meristem vs. Above Root Meristem
  misc_feature: MA Experiment ID: 108536 Result: Up-regulated in Transcription
  misc_feature: MA Experiment 108536 PARAMETER Experiment Name: Zm_Meristem_P Parameter: Age (day) Value: 8
  misc_feature: MA Experiment 108536 PARAMETER Experiment Name: Zm_Meristem_P Parameter: Organism Value: Zea mays
  misc_feature: MA Experiment 108536 PARAMETER Experiment Name: Zm_Meristem_P Parameter: Plant Line Value: 35A19
  misc_feature: MA Experiment 108536 PARAMETER Experiment Name: Zm_Meristem_P Parameter: Tissue Value: Shoot Meristem vs. Above Shoot Meristem
  misc_feature: MA Experiment ID: 108543 Result: Up-regulated in Transcription
  misc_feature: MA Experiment ID: 108544 Result: Up-regulated in Transcription
  misc_feature: MA Experiment ID: 108547 Result: Down-regulated in Transcription
  misc_feature: MA Experiment 108547 PARAMETER Experiment Name: Zm_Imbibed_Seeds_P Parameter: Age (day) Value: 4 vs. 2
  misc_feature: MA Experiment 108547 PARAMETER Experiment Name: Zm_Imbibed_Seeds_P Parameter: Organism Value: Zea mays
  misc_feature: MA Experiment 108547 PARAMETER Experiment Name: Zm_Imbibed_Seeds_P Parameter: Plant Line Value: 35A19
  misc_feature: MA Experiment 108547 PARAMETER Experiment Name: Zm_Imbibed_Seeds_P Parameter: Tissue Value: Aerial vs. Embryo
  misc_feature: MA Experiment ID: 108689 Result: Down-regulated in Transcription
  misc_feature: MA Experiment 108689 PARAMETER Experiment Name: Zm_Drought_Roots_P Parameter: Age (day) Value: 9
  misc_feature: MA Experiment 108689 PARAMETER Experiment Name: Zm_Drought_Roots_P Parameter: Organism Value: Zea mays
  misc_feature: MA Experiment 108689 PARAMETER Experiment Name: Zm_Drought_Roots_P Parameter: Plant Line Value: 35A19
  misc_feature: MA Experiment 108689 PARAMETER Experiment Name: Zm_Drought_Roots_P Parameter: Timepoint (hr) Value: 24
  misc_feature: MA Experiment 108689 PARAMETER Experiment Name: Zm_Drought_Roots_P Parameter: Tissue Value: Roots
  misc_feature: MA Experiment 108689 PARAMETER Experiment Name: Zm_Drought_Roots_P Parameter: Treatment Value: Drought vs. No Drought
  misc_feature: MA Experiment ID: 20000108 Result: Down-regulated in Transcription
  misc_feature: MA Experiment 20000108 PARAMETER Experiment Name: Zm_Root-Tips_P Parameter: Age (day) Value: 12
  misc_feature: MA Experiment 20000108 PARAMETER Experiment Name: Zm_Root-Tips_P Parameter: Organism Value: Zea mays
  misc_feature: MA Experiment 20000108 PARAMETER Experiment Name: Zm_Root-Tips_P Parameter: Tissue Value: Root tips vs. Root mid region    35
  misc_feature: MA Experiment 20000108 PARAMETER Experiment Name: Zm_Root-Tips_P Parameter: Tissue Value: Root tips vs. Root mid region   Sequence Listing-Misc Features (4)
  misc_feature: MA Experiment ID: 20000477 Result: Down-regulated in Transcription
  misc_feature: MA Experiment 20000477 PARAMETER Experiment Name: Zm_5mM_SA_P Parameter: Age (day) Value: 10
  misc_feature: MA Experiment 20000477 PARAMETER Experiment Name: Zm_5mM_SA_P Parameter: Organism Value: Zea mays
  misc_feature: MA Experiment 20000477 PARAMETER Experiment Name: Zm_5mM_SA_P Parameter: Plant Line Value: 35A19
  misc_feature: MA Experiment 20000477 PARAMETER Experiment Name: Zm_5mM_SA_P Parameter: Timepoint (hr) Value: 48
  misc_feature: MA Experiment 20000477 PARAMETER Experiment Name: Zm_5mM_SA_P Parameter: Tissue Value: Aerial
  misc_feature: MA Experiment 20000477 PARAMETER Experiment Name: Zm_5mM_SA_P Parameter: Treatment Value: 5mM SA vs. No Treatment
  misc_feature: MA Experiment ID: 20000478 Result: Down-regulated in Transcription
  misc_feature: MA Experiment 20000478 PARAMETER Experiment Name: Zm_5mM_SA_P Parameter: Age (day) Value: 11
  misc_feature: MA Experiment 20000478 PARAMETER Experiment Name: Zm_5mM_SA_P Parameter: Organism Value: Zea mays
  misc_feature: MA Experiment 20000478 PARAMETER Experiment Name: Zm_5mM_SA_P Parameter: Plant Line Value: 35A19
  misc_feature: MA Experiment 20000478 PARAMETER Experiment Name: Zm_5mM_SA_P Parameter: Timepoint (hr) Value: 72
  misc_feature: MA Experiment 20000478 PARAMETER Experiment Name: Zm_5mM_SA_P Parameter: Tissue Value: Aerial
  misc_feature: MA Experiment 20000478 PARAMETER Experiment Name: Zm_5mM_SA_P Parameter: Treatment Value: 5mM SA vs. No Treatment
  misc_feature: MA Experiment ID: 20000492 Result: Up-regulated in Transcription
  misc_feature: MA Experiment 20000492 PARAMETER Experiment Name: Zm_Hybrid_Seed_Dev_P Parameter: DAP Value: 12
  misc_feature: MA Experiment 20000492 PARAMETER Experiment Name: Zm_Hybrid_Seed_Dev_P Parameter: Organism Value: Zea mays
  misc_feature: MA Experiment 20000492 PARAMETER Experiment Name: Zm_Hybrid_Seed_Dev_P Parameter: Plant Line Value: 35A19
  misc_feature: MA Experiment 20000492 PARAMETER Experiment Name: Zm_Hybrid_Seed_Dev_P Parameter: Tissue Value: Fert Kernel vs. Unfert Floret
  misc_feature: MA Experiment ID: 20000535 Result: Up-regulated in Transcription
  misc_feature: MA Experiment 20000535 PARAMETER Experiment Name: Zm_Hybrid_Seed_Dev_P Parameter: DAP Value: 30 vs. 12
  misc_feature: MA Experiment 20000535 PARAMETER Experiment Name: Zm_Hybrid_Seed_Dev_P Parameter: Organism Value: Zea mays
  misc_feature: MA Experiment 20000535 PARAMETER Experiment Name: Zm_Hybrid_Seed_Dev_P Parameter: Plant Line Value: 35A19
  misc_feature: MA Experiment 20000535 PARAMETER Experiment Name: Zm_Hybrid_Seed_Dev_P Parameter: Tissue Value: Embryo vs. Unfert Floret
gcacgagaccattacctagaacatcctaatcgaaaaattactgcacttgctctccggctccgggcagccacgagtatcagccccggcgagcggcggcgatgcagaacctgctgtccggcgcgtcccacgagacgctcccggacagcttcatcttcccggccgagcagcgcccgccggcgtcggcagccgccgtcgcgctccccgtcatcgacctgtccgggccccgcgacgaggtccggcgagccgttcttgaagctggcaaggagctaggcttcttccaggtggtgaaccacggcgtgccggagcaggtggtgcgggacatggaggcgtgctgcgaggagttcttccgcctccccgcggaggacaaggcggccttctactcggaggacacaagcaagcccaaccgcctcttcaccagcaccacctacggcaccggcggcgagcgctactggcgggactgcctccgcctggcctgcggcttccccgtcgccgccgacgccagggacgcctggcccgacaagcccgacggcctcagggaggcggcggagaggttcgtcgcgtcgacgaggcgcctgaacctggagctgctgcggctgctgtgcgagggcgtgggcctccgcgcggactacttcgagggggacctcagcgccggcgacgtggtcgtgaatgtcaaccactacccgccgtgcccggacccggcgcgcacgctgggcctgccgccgcactgcgaccgcaacctcatcacgctgctgctccagggcagcgtcgccggcctccaggtgtcctaccgcggcgactggatccgcgtccagcccgtgcccggcgccttcgtcgtcaactttggccaccagctcgagatcgccacgaacgggctgctgaagagcatcgagcaccgcgcggtggccagcgcggcggtgccgcgcacctcggtggcgacgttcatcatgcccaccgacgactgccttgtcgcccccgccgcggagctcgccggcggcggagacaagccgccgccgcggtaccgcgccgtcacgttccgggatttcatgaaggtgtacaagaccgtcggcgcgcgcagggagagcgtcgagaaggccttcaagatctgatggacgcgtatacatgctcgacatgcgttctgctcggcagagatctggtagttgttatctgcactgaataaaaggatgggagaaaaaacagaaaacgtcgcaagcagttcgcggcacaaactctctgtctctttcgttccaatttgcaactgtgtgtgtgagccgatgatagtgagtagagagcttcgttcccaactccggtgagtgccagaagagccaacaagtcctgcacgaacaccagtcgtcaccggagagcttcctgccggtgtcggcaaggatgcaaaggtgccaagagaatcgctttgtgtgtgaccttgtgccccgaaataaagggattgttcttgttt

SEQ ID NO: 20010 - protein, 335 aa, Zea mays subsp. mays
  peptide (1)..(335): Ceres Seq. ID no. 12381733
  misc_feature (185)..(284): Pfam Name: 2OG-Fe(II) oxygenase superfamily Pfam Description: 2OG-Fe(II) oxygenase superfamily
  misc_feature (1)..(319): Homolog of NCBI NO: 15238567 NR Description: flavanone 3-hydroxylase-like protein
  misc_feature (1)..(322): Homolog of NCBI NO: 1076723 NR Description: dioxygenase, iron defiency-specific (clone 2) -
  misc_feature (1)..(322): Homolog of NCBI NO: 4514655 NR Description: IDS3 [Hordeum vulgare subsp. vulgare]
  misc_feature (1)..(334): Homolog of NCBI NO: 38345872 NR Description: OSJNBa0064M23.14 [Oryza sativa (japonica
  misc_feature (1)..(334): Homolog of NCBI NO: 15235124 NR Description: putative flavanone 3-beta-hydroxylase; protein
  misc_feature (1)..(334): Homolog of NCBI NO: 37536444 NR Description: unknown protein [Oryza sativa (japonica
  misc_feature (1)..(319): Homolog of NCBI NO: 21553527 NR Description: flavanone 3-hydroxylase-like protein [Arabidopsis
  misc_feature (1)..(322): Homolog of NCBI NO: 7433181 NR Description: iron deficiency protein Ids3 - barley
  misc_feature (1)..(322): Homolog of NCBI NO: 9711238 NR Description: IDS3 [Hordeum vulgare subsp. vulgare]
  misc_feature (8)..(335): Homolog of NCBI NO: 34395014 NR Description: putative iron deficiency protein Ids3
MQNLLSGASHETLPDSFIFPAEQRPPASAAAVALPVIDLSGPRDEVRRAVLEAGKELGFFQVVNHGVPEQVVRDMEACCEEFFRLPAEDKAAFYSEDTSKPNRLFTSTTYGTGGERYWRDCLRLACGFPVAADARDAWPDKPDGLREAAERFVASTRRLNLELLRLLCEGVGLRADYFEGDLSAGDVVVNVNHYPPCPDPARTLGLPPHCDRNLITLLLQGSVAGLQVSYRGDWIRVQPVPGAFVVNFGHQLEIATNGLLKSIEHRAVASAAVPRTSVATFIMPTDDCLVAPAAELAGGGDKPPPRYRAVTFRDFMKVYKTVGARRESVEKAFKI

SEQ ID NO: 20011 - protein, 261 aa, Zea mays subsp. mays
  peptide (1)..(261): Ceres Seq. ID no. 12381734
  misc_feature (111)..(210): Pfam Name: 2OG-Fe(II) oxygenase superfamily Pfam Description: 2OG-Fe(II) oxygenase superfamily
  misc_feature (1)..(260): Homolog of NCBI NO: 38345872 NR Description: OSJNBa0064M23.14 [Oryza sativa (japonica
  misc_feature (1)..(245): Homolog of NCBI NO: 21553527 NR Description: flavanone 3-hydroxylase-like protein [Arabidopsis
  misc_feature (1)..(260): Homolog of NCBI NO: 15235124 NR Description: putative flavanone 3-beta-hydroxylase; protein
  misc_feature (1)..(260): Homolog of NCBI NO: 37536444 NR Description: unknown protein [Oryza sativa (japonica
  misc_feature (1)..(245): Homolog of NCBI NO: 15238567 NR Description: flavanone 3-hydroxylase-like protein
  misc_feature (1)..(248): Homolog of NCBI NO: 1076723 NR Description: dioxygenase, iron defiency-specific (clone 2) -
  misc_feature (1)..(248): Homolog of NCBI NO: 4514655 NR Description: IDS3 [Hordeum vulgare subsp. vulgare]
  misc_feature (1)..(248): Homolog of NCBI NO: 7433181 NR Description: iron deficiency protein Ids3 - barley
  misc_feature (1)..(248): Homolog of NCBI NO: 9711238 NR Description: IDS3 [Hordeum vulgare subsp. vulgare]
  misc_feature (1)..(261): Homolog of NCBI NO: 34395014 NR Description: putative iron deficiency protein Ids3
MEACCEEFFRLPAEDKAAFYSEDTSKPNRLFTSTTYGTGGERYWRDCLRLACGFPVAADARDAWPDKPDGLREAAERFVASTRRLNLELLRLLCEGVGLRADYFEGDLSAGDVVVNVNHYPPCPDPARTLGLPPHCDRNLITLLLQGSVAGLQVSYRGDWIRVQPVPGAFVVNFGHQLEIATNGLLKSIEHRAVASAAVPRTSVATFIMPTDDCLVAPAAELAGGGDKPPPRYRAVTFRDFMKVYKTVGARRESVEKAFKI

SEQ ID NO: 20012 - DNA, 1093 bp, Zea mays subsp. mays
  misc_feature (1)..(1093): Ceres Seq. ID no. 12383116
  misc_feature: MA Experiment ID: 20000478 Result: Down-regulated in Transcription
  misc_feature: MA Experiment 20000478 PARAMETER Experiment Name: Zm_5mM_SA_P Parameter: Age (day) Value: 11
  misc_feature: MA Experiment 20000478 PARAMETER Experiment Name: Zm_5mM_SA_P Parameter: Organism Value: Zea mays
  misc_feature: MA Experiment 20000478 PARAMETER Experiment Name: Zm_5mM_SA_P Parameter: Plant Line Value: 35A19
  misc_feature: MA Experiment 20000478 PARAMETER Experiment Name: Zm_5mM_SA_P Parameter: Timepoint (hr) Value: 72
  misc_feature: MA Experiment 20000478 PARAMETER Experiment Name: Zm_5mM_SA_P Parameter: Tissue Value: Aerial
  misc_feature: MA Experiment 20000478 PARAMETER Experiment Name: Zm_5mM_SA_P Parameter: Treatment Value: 5mM SA vs. No Treatment
  misc_feature: MA Experiment ID: 20000488 Result: Down-regulated in Transcription
  misc_feature: MA Experiment 20000488 PARAMETER Experiment Name: Zm_50mM_NH4NO3_L_to_H_P Parameter: Organism Value: Zea mays
  misc_feature: MA Experiment 20000488 PARAMETER Experiment Name: Zm_50mM_NH4NO3_L_to_H_P Parameter: Timepoint (hr) Value: 8
  misc_feature: MA Experiment 20000488 PARAMETER Experiment Name: Zm_50mM_NH4NO3_L_to_H_P Parameter: Tissue Value: Leaves
  misc_feature: MA Experiment 20000488 PARAMETER Experiment Name: Zm_50mM_NH4NO3_L_to_H_P Parameter: Treatment Value: 50mM NH4NO3 vs. 100mM Mannitol
aaaactaggaatgagttcgctcgctaaaattggccggatgtgagcgctcccgttcgttcctctctcgcaaaatcaaccgccttccacggctcctccatctcgtcgccactgtgagaagctccatcgtcgtgcatcaactcagcaagattttgaggagagaagaacaagaattttgcagcaagactttgacagaagcaaaatacttcacgctattggagagctacgaaaagagtttatgagaccaccatctacatcaactctagctaaaattgcagggaatccaagatgggatccttactttaagtgttgtattggtgcaataaatggcacacatgtgcaagcatatgttcctaaacacatggaggcttcctttcacggtagaaagagttatgctactcaaaatgtcatggcagcagtatattttaatcttcgattcacatttgtcttggtcggttgggaggagacaactcatgatgcactagtcttacatgatgctttagaaagagaaaatggtattcgtgtgcctgaaggcaagttctacctagtcgatgccggatatggagccaaacttggatttatgccccttttcgtggtgtacaataccacttgaacgagcggggaaataatccagtgcaaaatgagaaaaaattattcaatcataggcattcatctctaagagtttcagtagagtgagcatttggttcattgaaaagaagatttaaaattcttgatgatgctacaccgttcttccccttctctacacaagtagaaattgtggttgcttgttgtattattcacaattgggttatacaagatggacgtgatgactttatcattcctgagaatgaggaattgcctaccattaatcatcacgtatcttcgcatggacaagcaatagagcatgatattatgattaactttaggcaggaacttgccaatgctatgtgggaagactatcatgcaaacactatttgattgctatgtattttccaatgtctctatcatttgtatggacatgtagaatttatttgtatggacatgtatcttttatttgtatggacatgtgtattttattcgtatggacatatatctt

SEQ ID NO: 20013 - protein, 124 aa, Zea mays subsp. mays
  peptide (1)..(124): Ceres Seq. ID no. 12383117
  misc_feature (1)..(115): Homolog of NCBI NO: 37530994 NR Description: putative transposase [Oryza sativa (japonica
  misc_feature (1)..(115): Homolog of NCBI NO: 34915332 NR Description: transposase-like [Oryza sativa (japonica
  misc_feature (1)..(118): Homolog of NCBI NO: 15230463 NR Description: putative protein; protein id: At3g44640.1
  misc_feature (1)..(118): Homolog of NCBI NO: 21397269 NR Description: Unknown protein [Oryza sativa (japonica
  misc_feature (25)..(118): Homolog of NCBI NO: 34911316 NR Description: P0519D04.27 [Oryza sativa (japonica
  misc_feature (1)..(118): Homolog of NCBI NO: 38345208 NR Description: OSJNBb0012E08.4 [Oryza sativa (japonica
  misc_feature (25)..(118): Homolog of NCBI NO: 40786599 NR Description: expressed protein [Oryza sativa (japonica
  misc_feature (25)..(118): Homolog of NCBI NO: 37530780 NR Description: putative transposase [Oryza sativa (japonica
  misc_feature (1)..(118): Homolog of NCBI NO: 38569160 NR Description: OSJNBa0042N22.14 [Oryza sativa (japonica
  misc_feature (1)..(118): Homolog of NCBI NO: 38345857 NR Description: OSJNBa0084K11.21 [Oryza sativa (japonica
MRPPSTSTLAKIAGNPRWDPYFKCCIGAINGTHVQAYVPKHMEASFHGRKSYATQNVMAAVYFNLRFTFVLVGWEETTHDALVLHDALERENGIRVPEGKFYLVDAGYGAKLGFMPLFVVYNTT

SEQ ID NO: 20014 - protein, 83 aa, Zea mays subsp. mays
  peptide (1)..(83): Ceres Seq. ID no. 12383118
  misc_feature (1)..(74): Homolog of NCBI NO: 37530994 NR Description: putative transposase [Oryza sativa (japonica
  misc_feature (1)..(74): Homolog of NCBI NO: 34915332 NR Description: transposase-like [Oryza sativa (japonica
  misc_feature (1)..(77): Homolog of NCBI NO: 15230463 NR Description: putative protein; protein id: At3g44640.1
  misc_feature (1)..(77): Homolog of NCBI NO: 21397269 NR Description: Unknown protein [Oryza sativa (japonica
  misc_feature (1)..(77): Homolog of NCBI NO: 34911316 NR Description: P0519D04.27 [Oryza sativa (japonica
  misc_feature (1)..(77): Homolog of NCBI NO: 38345208 NR Description: OSJNBb0012E08.4 [Oryza sativa (japonica
  misc_feature (1)..(77): Homolog of NCBI NO: 40786599 NR Description: expressed protein [Oryza sativa (japonica
  misc_feature (1)..(77): Homolog of NCBI NO: 37530780 NR Description: putative transposase [Oryza sativa (japonica
  misc_feature (1)..(77): Homolog of NCBI NO: 38569160 NR Description: OSJNBa0042N22.14 [Oryza sativa (japonica
  misc_feature (1)..(77): Homolog of NCBI NO: 38345857 NR Description: OSJNBa0084K11.21 [Oryza sativa (japonica
MEASFHGRKSYATQNVMAAVYFNLRFTFVLVGWEETTHDALVLHDALERENGIRVPEGKFYLVDAGYGAKLGFMPLFVVYNTT

SEQ ID NO: 20015 - protein, 67 aa, Zea mays subsp. mays
  peptide (1)..(67): Ceres Seq. ID no. 12383119
  misc_feature (1)..(58): Homolog of NCBI NO: 37530994 NR Description: putative transposase [Oryza sativa (japonica
  misc_feature (1)..(58): Homolog of NCBI NO: 34915332 NR Description: transposase-like [Oryza sativa (japonica
  misc_feature (1)..(61): Homolog of NCBI NO: 15230463 NR Description: putative protein; protein id: At3g44640.1
  misc_feature (1)..(61): Homolog of NCBI NO: 21397269 NR Description: Unknown protein [Oryza sativa (japonica
  misc_feature (1)..(61): Homolog of NCBI NO: 34911316 NR Description: P0519D04.27 [Oryza sativa (japonica
  misc_feature (1)..(61): Homolog of NCBI NO: 38345208 NR Description: OSJNBb0012E08.4 [Oryza sativa (japonica
  misc_feature (1)..(61): Homolog of NCBI NO: 40786599 NR Description: expressed protein [Oryza sativa (japonica
  misc_feature (1)..(61): Homolog of NCBI NO: 37530780 NR Description: putative transposase [Oryza sativa (japonica
  misc_feature (1)..(61): Homolog of NCBI NO: 38569160 NR Description: OSJNBa0042N22.14 [Oryza sativa (japonica
  misc_feature (1)..(61): Homolog of NCBI NO: 38345857 NR Description: OSJNBa0084K11.21 [Oryza sativa (japonica
MAAVYFNLRFTFVLVGWEETTHDALVLHDALERENGIRVPEGKFYLVDAGYGAKLGFMPLFVVYNTT

SEQ ID NO: 20016 - DNA, 1513 bp, Zea mays subsp. mays
  misc_feature (1)..(1513): Ceres Seq. ID no. 13580212
  misc_feature: MA Experiment ID: 108527 Result: Down-regulated in Transcription
  misc_feature: MA Experiment 108527 PARAMETER Experiment Name: Zm_5mM_NO_P Parameter: Age (day) Value: 8
  misc_feature: MA Experiment 108527 PARAMETER Experiment Name: Zm_5mM_NO_P Parameter: Organism Value: Zea mays
  misc_feature: MA Experiment 108527 PARAMETER Experiment Name: Zm_5mM_NO_P Parameter: Plant Line Value: 35A19
  misc_feature: MA Experiment 108527 PARAMETER Experiment Name: Zm_5mM_NO_P Parameter: Timepoint (hr) Value: 6
  misc_feature: MA Experiment 108527 PARAMETER Experiment Name: Zm_5mM_NO_P Parameter: Tissue Value: Aerial
  misc_feature: MA Experiment 108527 PARAMETER Experiment Name: Zm_5mM_NO_P Parameter: Treatment Value: 5mM NO vs. No Treatment
  misc_feature: MA Experiment ID: 108529 Result: Up-regulated in Transcription
  misc_feature: MA Experiment 108529 PARAMETER Experiment Name: Zm_Imbibed_Seeds_P Parameter: Age (day) Value: 5 vs. 2
  misc_feature: MA Experiment 108529 PARAMETER Experiment Name: Zm_Imbibed_Seeds_P Parameter: Organism Value: Zea mays
  misc_feature: MA Experiment 108529 PARAMETER Experiment Name: Zm_Imbibed_Seeds_P Parameter: Plant Line Value: 35A19
  misc_feature: MA Experiment 108529 PARAMETER Experiment Name: Zm_Imbibed_Seeds_P Parameter: Tissue Value: Roots vs. Embryo
  misc_feature: MA Experiment ID: 108534 Result: Up-regulated in Transcription
  misc_feature: MA Experiment 108534 PARAMETER Experiment Name: Zm_4deg_Cold_P Parameter: Age (hr) Value: 8
  misc_feature: MA Experiment 108534 PARAMETER Experiment Name: Zm_4deg_Cold_P Parameter: Organism Value: Zea mays
  misc_feature: MA Experiment 108534 PARAMETER Experiment Name: Zm_4deg_Cold_P Parameter: Plant Line Value: 35A19
  misc_feature: MA Experiment 108534 PARAMETER Experiment Name: Zm_4deg_Cold_P Parameter: Temperature (deg C) Value: 4 vs. 22
  misc_feature: MA Experiment 108534 PARAMETER Experiment Name: Zm_4deg_Cold_P Parameter: Timepoint (hr) Value: 6
  misc_feature: MA Experiment 108534 PARAMETER Experiment Name: Zm_4deg_Cold_P Parameter: Tissue Value: Aerial
  misc_feature: MA Experiment ID: 108535 Result: Down-regulated in Transcription
  misc_feature: MA Experiment 108535 PARAMETER Experiment Name: Zm_Meristem_P Parameter: Age (day) Value: 8
  misc_feature: MA Experiment 108535 PARAMETER Experiment Name: Zm_Meristem_P Parameter: Organism Value: Zea mays
  misc_feature: MA Experiment 108535 PARAMETER Experiment Name: Zm_Meristem_P Parameter: Plant Line Value: 35A19
  misc_feature: MA Experiment 108535 PARAMETER Experiment Name: Zm_Meristem_P Parameter: Tissue Value: Root Meristem vs. Above Root Meristem
  misc_feature: MA Experiment ID: 108545 Result: Down-regulated in Transcription
  misc_feature: MA Experiment 108545 PARAMETER Experiment Name: Zm_Imbibed_Seeds_P Parameter: Age (day) Value: 3 vs. 2
  misc_feature: MA Experiment 108545 PARAMETER Experiment Name: Zm_Imbibed_Seeds_P Parameter: Organism Value: Zea mays
  misc_feature: MA Experiment 108545 PARAMETER Experiment Name: Zm_Imbibed_Seeds_P Parameter: Plant Line Value: 35A19
  misc_feature: MA Experiment 108545 PARAMETER Experiment Name: Zm_Imbibed_Seeds_P Parameter: Tissue Value: Aerial vs. Embryo
  misc_feature: MA Experiment ID: 108559 Result: Down-regulated in Transcription
  misc_feature: MA Experiment 108559 PARAMETER Experiment Name: Zm_5mM_NO_P Parameter: Age (day) Value: 8
  misc_feature: MA Experiment 108559 PARAMETER Experiment Name: Zm_5mM_NO_P Parameter: Organism Value: Zea mays
  misc_feature: MA Experiment 108559 PARAMETER Experiment Name: Zm_5mM_NO_P Parameter: Plant Line Value: 35A19
  misc_feature: MA Experiment 108559 PARAMETER Experiment Name: Zm_5mM_NO_P Parameter: Timepoint (hr) Value: 12
  misc_feature: MA Experiment 108559 PARAMETER Experiment Name: Zm_5mM_NO_P Parameter: Tissue Value: Aerial
  misc_feature: MA Experiment 108559 PARAMETER Experiment Name: Zm_5mM_NO_P Parameter: Treatment Value: 5mM NO vs. No Treatment
  misc_feature: MA Experiment ID: 20000108 Result: Down-regulated in Transcription
  misc_feature: MA Experiment 20000108 PARAMETER Experiment Name: Zm_Root-Tips_P Parameter: Age (day) Value: 12
  misc_feature: MA Experiment 20000108 PARAMETER Experiment Name: Zm_Root-Tips_P Parameter: Organism Value: Zea mays
  misc_feature: MA Experiment 20000108 PARAMETER Experiment Name: Zm_Root-Tips_P Parameter: Tissue Value: Root tips vs. Root mid region    35
  misc_feature: MA Experiment 20000108 PARAMETER Experiment Name: Zm_Root-Tips_P Parameter: Tissue Value: Root tips vs. Root mid region   Sequence Listing-Misc Features (4)
  misc_feature: MA Experiment ID: 20000535 Result: Down-regulated in Transcription
  misc_feature: MA Experiment 20000535 PARAMETER Experiment Name: Zm_Hybrid_Seed_Dev_P Parameter: DAP Value: 30 vs. 12
  misc_feature: MA Experiment 20000535 PARAMETER Experiment Name: Zm_Hybrid_Seed_Dev_P Parameter: Organism Value: Zea mays
  misc_feature: MA Experiment 20000535 PARAMETER Experiment Name: Zm_Hybrid_Seed_Dev_P Parameter: Plant Line Value: 35A19
  misc_feature: MA Experiment 20000535 PARAMETER Experiment Name: Zm_Hybrid_Seed_Dev_P Parameter: Tissue Value: Embryo vs. Unfert Floret
aggatgaatcggaagagagaatcctaccaaacctagctaccaactcgatcgtcgtcatcacgctcgaccgcacaactgcaccaaggggggaggagacctaaaaactactacatcttttagctacacatctagctaaagatcgagaggggtaaataaggacgagcgggcgcgagctagaagagcagctgcaggtactaccatcatcgtcgtcgtcgtcgccaggatgaccgtcgtcgacgccgtcgtctcctccaccgatgccggcgcccctgctgccgccgccaccgcggtaccggcggggaacgggcagaccgtgtgcgtgaccggcgcggccgggtacatcgcctcgtggttggtgaagctgctgctcgagaagggatacactgtgaagggcaccgtcaggaacccagatgacccgaagaacgcgcacctcaaggcgctggacggcgccgccgagcggctgatcctctgcaaggccgatctgctggactacgacgccatctgccgcgccgtgcagggctgccagggcgtcttccacaccgcctcccccgtcaccgacgacccggagcaaatggtggagccggcggtgcgcggcaccgagtacgtgatcaacgcggcggcggaggccggcacggtgcggcgggtggtgttcacgtcgtccatcggcgccgtgaccatggaccccaagcgcgggcccgacgtcgtggtcgacgagtcgtgctggagcgacctcgagttctgcgagaaaaccaggaactggtactgctacggcaaggcggtggcggagcacgcggcgtgggagacggcccggcggcggggcgtggacctggtggtggtgaaccccgtgctggtggtgggccccctgctgcaggcgacggtgaacgccagcatcgcgcacatcctcaagtacctggacggctcggcccgcaccttcgccaacgccgtgcaggcgtacgtggacgtgcgcgacgtggccgacgcgcacctccgcgtcttcgagagcccccgcgcgtccggccgccacctctgcgccgagcgcgtcctccaccgcgaggacgtcgtccgcatcctcgccaagctcttccccgagtaccccgtcccagccaggtgctccgacgaggtgaatccgcggaagcagccgtacaagttctccaaccagaagctccgggacctggggctgcagttccggccggtcagccagtcgctttacgacacggtgaagaacctccaggagaagggacacctgccggtgctcggagagcggacgacgacggaggccgccgacaaggatgcccccacggccgagatgcagcagggagggatcgccatccgtgcctgagagggcgatgccacacatgaacacaaagcaatgttcatactgctgccctgcacctgctgtgtaaacaggcctgtgtttgttctggctgatagtgatgtaccctaagacttgtaacgtcatgttcgttcttgtgaactatagcgagtgaataaaattggttaatgttggatgttc

SEQ ID NO: 20017 - protein, 371 aa, Zea mays subsp. mays
  peptide (1)..(371): Ceres Seq. ID no. 13580213
  misc_feature (31)..(146): Pfam Name: NAD dependent epimerase/dehydratase family Pfam Description: NAD dependent epimerase/dehydratase family
  misc_feature (22)..(343): Homolog of NCBI NO: 25989515 NR Description: cinnamoyl CoA reductase [Eucalyptus globulus]
  misc_feature (22)..(343): Homolog of NCBI NO: 7431407 NR Description: cinnamoyl-CoA reductase (EC 1.2.1.44) CCR - cider
  misc_feature (25)..(343): Homolog of NCBI NO: 2960364 NR Description: cinnamoyl CoA reductase [Populus balsamifera
  misc_feature (25)..(343): Homolog of NCBI NO: 9998901 NR Description: cinnamoyl-CoA reductase [Populus balsamifera
  misc_feature (20)..(343): Homolog of NCBI NO: 9964087 NR Description: cinnamoyl CoA reductase [Lolium perenne]
  misc_feature (11)..(360): Homolog of NCBI NO: 25140432 NR Description: cinnamoyl CoA reductase [Hordeum vulgare]
  misc_feature (1)..(371): Homolog of NCBI NO: 17978549 NR Description: cinnamoyl-CoA reductase [Lolium perenne]
  misc_feature (1)..(371): Homolog of NCBI NO: 3341511 NR Description: cinnamoyl-CoA reductase [Saccharum officinarum]
  misc_feature (1)..(371): Homolog of NCBI NO: 3242328 NR Description: cinnamoyl-CoA reductase [Zea mays]
  misc_feature (1)..(371): Homolog of NCBI NO: 7431410 NR Description: cinnamoyl CoA reductase - maize
MTVVDAVVSSTDAGAPAAAATAVPAGNGQTVCVTGAAGYIASWLVKLLLEKGYTVKGTVRNPDDPKNAHLKALDGAAERLILCKADLLDYDAICRAVQGCQGVFHTASPVTDDPEQMVEPAVRGTEYVINAAAEAGTVRRVVFTSSIGAVTMDPKRGPDVVVDESCWSDLEFCEKTRNWYCYGKAVAEHAAWETARRRGVDLVVVNPVLVVGPLLQATVNASIAHILKYLDGSARTFANAVQAYVDVRDVADAHLRVFESPRASGRHLCAERVLHREDVVRILAKLFPEYPVPARCSDEVNPRKQPYKFSNQKLRDLGLQFRPVSQSLYDTVKNLQEKGHLPVLGERTTTEAADKDAPTAEMQQGGIAIRA

SEQ ID NO: 20018 - protein, 255 aa, Zea mays subsp. mays
  peptide (1)..(255): Ceres Seq. ID no. 13580214
  misc_feature (1)..(143): Pfam Name: 3-beta hydroxysteroid dehydrogenase/isomerase family Pfam Description: 3-beta hydroxysteroid dehydrogenase/isomerase
  misc_feature (1)..(227): Homolog of NCBI NO: 25989515 NR Description: cinnamoyl CoA reductase [Eucalyptus globulus]
  misc_feature (1)..(227): Homolog of NCBI NO: 7431407 NR Description: cinnamoyl-CoA reductase (EC 1.2.1.44) CCR - cider
  misc_feature (1)..(227): Homolog of NCBI NO: 2960364 NR Description: cinnamoyl CoA reductase [Populus balsamifera
  misc_feature (1)..(227): Homolog of NCBI NO: 9998901 NR Description: cinnamoyl-CoA reductase [Populus balsamifera
  misc_feature (1)..(227): Homolog of NCBI NO: 9964087 NR Description: cinnamoyl CoA reductase [Lolium perenne]
  misc_feature (1)..(244): Homolog of NCBI NO: 25140432 NR Description: cinnamoyl CoA reductase [Hordeum vulgare]
  misc_feature (1)..(255): Homolog of NCBI NO: 17978549 NR Description: cinnamoyl-CoA reductase [Lolium perenne]
  misc_feature (1)..(255): Homolog of NCBI NO: 3341511 NR Description: cinnamoyl-CoA reductase [Saccharum officinarum]
  misc_feature (1)..(255): Homolog of NCBI NO: 3242328 NR Description: cinnamoyl-CoA reductase [Zea mays]
  misc_feature (1)..(255): Homolog of NCBI NO: 7431410 NR Description: cinnamoyl CoA reductase - maize
MVEPAVRGTEYVINAAAEAGTVRRVVFTSSIGAVTMDPKRGPDVVVDESCWSDLEFCEKTRNWYCYGKAVAEHAAWETARRRGVDLVVVNPVLVVGPLLQATVNASIAHILKYLDGSARTFANAVQAYVDVRDVADAHLRVFESPRASGRHLCAERVLHREDVVRILAKLFPEYPVPARCSDEVNPRKQPYKFSNQKLRDLGLQFRPVSQSLYDTVKNLQEKGHLPVLGERTTTEAADKDAPTAEMQQGGIAIRA

SEQ ID NO: 20019 - protein, 220 aa, Zea mays subsp. mays
  peptide (1)..(220): Ceres Seq. ID no. 13580215
  misc_feature (1)..(108): Pfam Name: 3-beta hydroxysteroid dehydrogenase/isomerase family Pfam Description: 3-beta hydroxysteroid dehydrogenase/isomerase
  misc_feature (1)..(192): Homolog of NCBI NO: 25989515 NR Description: cinnamoyl CoA reductase [Eucalyptus globulus]
  misc_feature (1)..(192): Homolog of NCBI NO: 7431407 NR Description: cinnamoyl-CoA reductase (EC 1.2.1.44) CCR - cider
  misc_feature (1)..(192): Homolog of NCBI NO: 2960364 NR Description: cinnamoyl CoA reductase [Populus balsamifera
  misc_feature (1)..(192): Homolog of NCBI NO: 9998901 NR Description: cinnamoyl-CoA reductase [Populus balsamifera
  misc_feature (1)..(192): Homolog of NCBI NO: 9964087 NR Description: cinnamoyl CoA reductase [Lolium perenne]
  misc_feature (1)..(209): Homolog of NCBI NO: 25140432 NR Description: cinnamoyl CoA reductase [Hordeum vulgare]
  misc_feature (1)..(220): Homolog of NCBI NO: 17978549 NR Description: cinnamoyl-CoA reductase [Lolium perenne]
  misc_feature (1)..(220): Homolog of NCBI NO: 3341511 NR Description: cinnamoyl-CoA reductase [Saccharum officinarum]
  misc_feature (1)..(220): Homolog of NCBI NO: 3242328 NR Description: cinnamoyl-CoA reductase [Zea mays]
  misc_feature (1)..(220): Homolog of NCBI NO: 7431410 NR Description: cinnamoyl CoA reductase - maize
MDPKRGPDVVVDESCWSDLEFCEKTRNWYCYGKAVAEHAAWETARRRGVDLVVVNPVLVVGPLLQATVNASIAHILKYLDGSARTFANAVQAYVDVRDVADAHLRVFESPRASGRHLCAERVLHREDVVRILAKLFPEYPVPARCSDEVNPRKQPYKFSNQKLRDLGLQFRPVSQSLYDTVKNLQEKGHLPVLGERTTTEAADKDAPTAEMQQGGIAIRA

SEQ ID NO: 20020 - DNA, 1294 bp, Zea mays subsp. mays; identical to SEQ ID NO: 15951
  misc_feature (1)..(1294): Ceres Seq. ID no. 13494804
  misc_feature: MA Experiment ID: 108522 Result: Down-regulated in Transcription
  misc_feature: MA Experiment 108522 PARAMETER Experiment Name: Zm_42deg_Heat_P Parameter: Age (day) Value: 8
  misc_feature: MA Experiment 108522 PARAMETER Experiment Name: Zm_42deg_Heat_P Parameter: Organism Value: Zea mays
  misc_feature: MA Experiment 108522 PARAMETER Experiment Name: Zm_42deg_Heat_P Parameter: Plant Line Value: 35A19
  misc_feature: MA Experiment 108522 PARAMETER Experiment Name: Zm_42deg_Heat_P Parameter: Temperature (deg C) Value: 42 vs. 22
  misc_feature: MA Experiment 108522 PARAMETER Experiment Name: Zm_42deg_Heat_P Parameter: Timepoint (hr) Value: 1
  misc_feature: MA Experiment 108522 PARAMETER Experiment Name: Zm_42deg_Heat_P Parameter: Tissue Value: Aerial
  misc_feature: MA Experiment ID: 108523 Result: Down-regulated in Transcription
  misc_feature: MA Experiment 108523 PARAMETER Experiment Name: Zm_42deg_Heat_P Parameter: Age (day) Value: 8
  misc_feature: MA Experiment 108523 PARAMETER Experiment Name: Zm_42deg_Heat_P Parameter: Organism Value: Zea mays
  misc_feature: MA Experiment 108523 PARAMETER Experiment Name: Zm_42deg_Heat_P Parameter: Plant Line Value: 35A19
  misc_feature: MA Experiment 108523 PARAMETER Experiment Name: Zm_42deg_Heat_P Parameter: Temperature (deg C) Value: 42 vs. 22
  misc_feature: MA Experiment 108523 PARAMETER Experiment Name: Zm_42deg_Heat_P Parameter: Timepoint (hr) Value: 6
  misc_feature: MA Experiment 108523 PARAMETER Experiment Name: Zm_42deg_Heat_P Parameter: Tissue Value: Aerial
  misc_feature: MA Experiment ID: 108535 Result: Up-regulated in Transcription
  misc_feature: MA Experiment 108535 PARAMETER Experiment Name: Zm_Meristem_P Parameter: Age (day) Value: 8
  misc_feature: MA Experiment 108535 PARAMETER Experiment Name: Zm_Meristem_P Parameter: Organism Value: Zea mays
  misc_feature: MA Experiment 108535 PARAMETER Experiment Name: Zm_Meristem_P Parameter: Plant Line Value: 35A19
  misc_feature: MA Experiment 108535 PARAMETER Experiment Name: Zm_Meristem_P Parameter: Tissue Value: Root Meristem vs. Above Root Meristem
  misc_feature: MA Experiment ID: 20000108 Result: Up-regulated in Transcription
  misc_feature: MA Experiment 20000108 PARAMETER Experiment Name: Zm_Root-Tips_P Parameter: Age (day) Value: 12
  misc_feature: MA Experiment 20000108 PARAMETER Experiment Name: Zm_Root-Tips_P Parameter: Organism Value: Zea mays
  misc_feature: MA Experiment 20000108 PARAMETER Experiment Name: Zm_Root-Tips_P Parameter: Tissue Value: Root tips vs. Root mid region    35
  misc_feature: MA Experiment 20000108 PARAMETER Experiment Name: Zm_Root-Tips_P Parameter: Tissue Value: Root tips vs. Root mid region   Sequence Listing-Misc Features (4)
  misc_feature: MA Experiment ID: 20000534 Result: Down-regulated in Transcription
  misc_feature: MA Experiment 20000534 PARAMETER Experiment Name: Zm_Hybrid_Pollen_P Parameter: Age (day) Value: 8
  misc_feature: MA Experiment 20000534 PARAMETER Experiment Name: Zm_Hybrid_Pollen_P Parameter: Organism Value: Zea mays
  misc_feature: MA Experiment 20000534 PARAMETER Experiment Name: Zm_Hybrid_Pollen_P Parameter: Plant Line Value: 35A19
  misc_feature: MA Experiment 20000534 PARAMETER Experiment Name: Zm_Hybrid_Pollen_P Parameter: Tissue Value: Pollen vs. Aerial
  misc_feature: MA Experiment ID: 20000535 Result: Up-regulated in Transcription
  misc_feature: MA Experiment 20000535 PARAMETER Experiment Name: Zm_Hybrid_Seed_Dev_P Parameter: DAP Value: 30 vs. 12
  misc_feature: MA Experiment 20000535 PARAMETER Experiment Name: Zm_Hybrid_Seed_Dev_P Parameter: Organism Value: Zea mays
  misc_feature: MA Experiment 20000535 PARAMETER Experiment Name: Zm_Hybrid_Seed_Dev_P Parameter: Plant Line Value: 35A19
  misc_feature: MA Experiment 20000535 PARAMETER Experiment Name: Zm_Hybrid_Seed_Dev_P Parameter: Tissue Value: Embryo vs. Unfert Floret

SEQ ID NO: 20021 - protein, 431 aa, Zea mays subsp. mays; identical to SEQ ID NO: 15952
  peptide (1)..(431): Ceres Seq. ID no. 13494805
  misc_feature (254)..(430): Pfam Name: Peptidase M16 inactive domain Pfam Description: Peptidase M16 inactive domain
  misc_feature (254)..(430): Pfam Name: Peptidase M16 inactive domain Pfam Description: Peptidase M16 inactive domain
  misc_feature (24)..(430): Homolog of NCBI NO: 15076515 NR Description: mitochondrial processing peptidase alpha subunit
  misc_feature (24)..(430): Homolog of NCBI NO: 11993905 NR Description: mitochondrial processing peptidase alpha-chain
  misc_feature (40)..(430): Homolog of NCBI NO: 34906418 NR Description: putative mitochondrial processing peptidase
  misc_feature (24)..(430): Homolog of NCBI NO: 21594004 NR Description: mitochondrial processing peptidase alpha subunit,
  misc_feature (24)..(430): Homolog of NCBI NO: 15218090 NR Description: mitochondrial processing peptidase alpha subunit
  misc_feature (24)..(430): Homolog of NCBI NO: 15076515 NR Description: mitochondrial processing peptidase alpha subunit
  misc_feature (40)..(430): Homolog of NCBI NO: 34906418 NR Description: putative mitochondrial processing peptidase
  misc_feature (24)..(430): Homolog of NCBI NO: 15218090 NR Description: mitochondrial processing peptidase alpha subunit
  misc_feature (25)..(430): Homolog of NCBI NO: 34909352 NR Description: putative mitochondrial processing peptidase alpha
  misc_feature (24)..(428): Homolog of NCBI NO: 2117355 NR Description: mitochondrial processing peptidase (EC 3.4.24.64)
  misc_feature (24)..(430): Homolog of NCBI NO: 266567 NR Description: Mitochondrial processing peptidase alpha subunit, precursor (Alpha-MPP) (Ubiquinol-cytochrome C reductase subunit
  misc_feature (24)..(430): Homolog of NCBI NO: 18401141 NR Description: mitochondrial processing peptidase alpha subunit
  misc_feature (24)..(430): Homolog of NCBI NO: 14334534 NR Description: putative mitochondrial processing peptidase alpha
  misc_feature (24)..(430): Homolog of NCBI NO: 21594004 NR Description: mitochondrial processing peptidase alpha subunit,
  misc_feature (24)..(430): Homolog of NCBI NO: 11993905 NR Description: mitochondrial processing peptidase alpha-chain
  misc_feature (24)..(430): Homolog of NCBI NO: 14334534 NR Description: putative mitochondrial processing peptidase alpha
  misc_feature (24)..(430): Homolog of NCBI NO: 18401141 NR Description: mitochondrial processing peptidase alpha subunit
  misc_feature (24)..(430): Homolog of NCBI NO: 266567 NR Description: Mitochondrial processing peptidase alpha subunit, precursor (Alpha-MPP) (Ubiquinol-cytochrome C reductase subunit
  misc_feature (24)..(428): Homolog of NCBI NO: 2117355 NR Description: mitochondrial processing peptidase (EC 3.4.24.64)
  misc_feature (25)..(430): Homolog of NCBI NO: 34909352 NR Description: putative mitochondrial processing peptidase alpha

SEQ ID NO: 20022 - protein, 408 aa, Zea mays subsp. mays; identical to SEQ ID NO: 15953
  peptide (1)..(408): Ceres Seq. ID no. 13494806
  misc_feature (231)..(407): Pfam Name: Peptidase M16 inactive domain Pfam Description: Peptidase M16 inactive domain
  misc_feature (231)..(407): Pfam Name: Peptidase M16 inactive domain Pfam Description: Peptidase M16 inactive domain
  misc_feature (1)..(407): Homolog of NCBI NO: 21594004 NR Description: mitochondrial processing peptidase alpha subunit,
  misc_feature (1)..(407): Homolog of NCBI NO: 15218090 NR Description: mitochondrial processing peptidase alpha subunit
  misc_feature (1)..(407): Homolog of NCBI NO: 14334534 NR Description: putative mitochondrial processing peptidase alpha
  misc_feature (1)..(407): Homolog of NCBI NO: 18401141 NR Description: mitochondrial processing peptidase alpha subunit
  misc_feature (1)..(407): Homolog of NCBI NO: 11993905 NR Description: mitochondrial processing peptidase alpha-chain
  misc_feature (17)..(407): Homolog of NCBI NO: 34906418 NR Description: putative mitochondrial processing peptidase
  misc_feature (1)..(407): Homolog of NCBI NO: 15218090 NR Description: mitochondrial processing peptidase alpha subunit
  misc_feature (1)..(407): Homolog of NCBI NO: 18401141 NR Description: mitochondrial processing peptidase alpha subunit
  misc_feature (1)..(407): Homolog of NCBI NO: 11993905 NR Description: mitochondrial processing peptidase alpha-chain
  misc_feature (1)..(407): Homolog of NCBI NO: 15076515 NR Description: mitochondrial processing peptidase alpha subunit
  misc_feature (2)..(407): Homolog of NCBI NO: 34909352 NR Description: putative mitochondrial processing peptidase alpha
  misc_feature (1)..(405): Homolog of NCBI NO: 2117355 NR Description: mitochondrial processing peptidase (EC 3.4.24.64)
  misc_feature (1)..(407): Homolog of NCBI NO: 266567 NR Description: Mitochondrial processing peptidase alpha subunit, precursor (Alpha-MPP) (Ubiquinol-cytochrome C reductase subunit
  misc_feature (1)..(407): Homolog of NCBI NO: 14334534 NR Description: putative mitochondrial processing peptidase alpha
  misc_feature (1)..(407): Homolog of NCBI NO: 21594004 NR Description: mitochondrial processing peptidase alpha subunit,
  misc_feature (17)..(407): Homolog of NCBI NO: 34906418 NR Description: putative mitochondrial processing peptidase
  misc_feature (1)..(407): Homolog of NCBI NO: 15076515 NR Description: mitochondrial processing peptidase alpha subunit
  misc_feature (1)..(407): Homolog of NCBI NO: 266567 NR Description: Mitochondrial processing peptidase alpha subunit, precursor (Alpha-MPP) (Ubiquinol-cytochrome C reductase subunit
  misc_feature (1)..(405): Homolog of NCBI NO: 2117355 NR Description: mitochondrial processing peptidase (EC 3.4.24.64)
  misc_feature (2)..(407): Homolog of NCBI NO: 34909352 NR Description: putative mitochondrial processing peptidase alpha

SEQ ID NO: 20023 - protein, 291 aa, Zea mays subsp. mays; identical to SEQ ID NO: 15954
  peptide (1)..(291): Ceres Seq. ID no. 13494807
  misc_feature (114)..(290): Pfam Name: Peptidase M16 inactive domain Pfam Description: Peptidase M16 inactive domain
  misc_feature (114)..(290): Pfam Name: Peptidase M16 inactive domain Pfam Description: Peptidase M16 inactive domain
  misc_feature (1)..(290): Homolog of NCBI NO: 15076515 NR Description: mitochondrial processing peptidase alpha subunit
  misc_feature (1)..(290): Homolog of NCBI NO: 11993905 NR Description: mitochondrial processing peptidase alpha-chain
  misc_feature (1)..(290): Homolog of NCBI NO: 34906418 NR Description: putative mitochondrial processing peptidase
  misc_feature (1)..(290): Homolog of NCBI NO: 21594004 NR Description: mitochondrial processing peptidase alpha subunit,
  misc_feature (1)..(290): Homolog of NCBI NO: 15218090 NR Description: mitochondrial processing peptidase alpha subunit
  misc_feature (1)..(290): Homolog of NCBI NO: 15076515 NR Description: mitochondrial processing peptidase alpha subunit
  misc_feature (1)..(290): Homolog of NCBI NO: 34906418 NR Description: putative mitochondrial processing peptidase
  misc_feature (1)..(290): Homolog of NCBI NO: 15218090 NR Description: mitochondrial processing peptidase alpha subunit
  misc_feature (1)..(290): Homolog of NCBI NO: 34909352 NR Description: putative mitochondrial processing peptidase alpha
  misc_feature (1)..(288): Homolog of NCBI NO: 2117355 NR Description: mitochondrial processing peptidase (EC 3.4.24.64)
  misc_feature (1)..(290): Homolog of NCBI NO: 266567 NR Description: Mitochondrial processing peptidase alpha subunit, precursor (Alpha-MPP) (Ubiquinol-cytochrome C reductase subunit
  misc_feature (1)..(290): Homolog of NCBI NO: 18401141 NR Description: mitochondrial processing peptidase alpha subunit
  misc_feature (1)..(290): Homolog of NCBI NO: 14334534 NR Description: putative mitochondrial processing peptidase alpha
  misc_feature (1)..(290): Homolog of NCBI NO: 21594004 NR Description: mitochondrial processing peptidase alpha subunit,
  misc_feature (1)..(290): Homolog of NCBI NO: 11993905 NR Description: mitochondrial processing peptidase alpha-chain
  misc_feature (1)..(290): Homolog of NCBI NO: 14334534 NR Description: putative mitochondrial processing peptidase alpha
  misc_feature (1)..(290): Homolog of NCBI NO: 18401141 NR Description: mitochondrial processing peptidase alpha subunit
  misc_feature (1)..(290): Homolog of NCBI NO: 266567 NR Description: Mitochondrial processing peptidase alpha subunit, precursor (Alpha-MPP) (Ubiquinol-cytochrome C reductase subunit
  misc_feature (1)..(288): Homolog of NCBI NO: 2117355 NR Description: mitochondrial processing peptidase (EC 3.4.24.64)
  misc_feature (1)..(290): Homolog of NCBI NO: 34909352 NR Description: putative mitochondrial processing peptidase alpha

SEQ ID NO: 20024 - DNA, 981 bp, Zea mays subsp. mays
  misc_feature (1)..(981): Ceres Seq. ID no. 14305860
  misc_feature: MA Experiment ID: 108528 Result: Up-regulated in Transcription
  misc_feature: MA Experiment 108528 PARAMETER Experiment Name: Zm_Imbibed_Seeds_P Parameter: Age (day) Value: 5 vs. 2
  misc_feature: MA Experiment 108528 PARAMETER Experiment Name: Zm_Imbibed_Seeds_P Parameter: Organism Value: Zea mays
  misc_feature: MA Experiment 108528 PARAMETER Experiment Name: Zm_Imbibed_Seeds_P Parameter: Plant Line Value: 35A19
  misc_feature: MA Experiment 108528 PARAMETER Experiment Name: Zm_Imbibed_Seeds_P Parameter: Tissue Value: Aerial vs. Embryo
  misc_feature: MA Experiment ID: 108530 Result: Up-regulated in Transcription
  misc_feature: MA Experiment 108530 PARAMETER Experiment Name: Zm_Imbibed_Seeds_P Parameter: Age (day) Value: 6 vs. 2
  misc_feature: MA Experiment 108530 PARAMETER Experiment Name: Zm_Imbibed_Seeds_P Parameter: Organism Value: Zea mays
  misc_feature: MA Experiment 108530 PARAMETER Experiment Name: Zm_Imbibed_Seeds_P Parameter: Plant Line Value: 35A19
  misc_feature: MA Experiment 108530 PARAMETER Experiment Name: Zm_Imbibed_Seeds_P Parameter: Tissue Value: Aerial vs. Embryo
  misc_feature: MA Experiment ID: 108535 Result: Down-regulated in Transcription
  misc_feature: MA Experiment 108535 PARAMETER Experiment Name: Zm_Meristem_P Parameter: Age (day) Value: 8
  misc_feature: MA Experiment 108535 PARAMETER Experiment Name: Zm_Meristem_P Parameter: Organism Value: Zea mays
  misc_feature: MA Experiment 108535 PARAMETER Experiment Name: Zm_Meristem_P Parameter: Plant Line Value: 35A19
  misc_feature: MA Experiment 108535 PARAMETER Experiment Name: Zm_Meristem_P Parameter: Tissue Value: Root Meristem vs. Above Root Meristem
  misc_feature: MA Experiment ID: 108543 Result: Down-regulated in Transcription
  misc_feature: MA Experiment ID: 108597 Result: Down-regulated in Transcription
  misc_feature: MA Experiment 108597 PARAMETER Experiment Name: Zm_100uM_ABA_P Parameter: Age (day) Value: 9
  misc_feature: MA Experiment 108597 PARAMETER Experiment Name: Zm_100uM_ABA_P Parameter: Organism Value: Zea mays
  misc_feature: MA Experiment 108597 PARAMETER Experiment Name: Zm_100uM_ABA_P Parameter: Plant Line Value: 35A19
  misc_feature: MA Experiment 108597 PARAMETER Experiment Name: Zm_100uM_ABA_P Parameter: Timepoint (hr) Value: 24
  misc_feature: MA Experiment 108597 PARAMETER Experiment Name: Zm_100uM_ABA_P Parameter: Tissue Value: Aerial
  misc_feature: MA Experiment 108597 PARAMETER Experiment Name: Zm_100uM_ABA_P Parameter: Treatment Value: 100uM ABA vs. No Treatment
  misc_feature: MA Experiment ID: 108687 Result: Down-regulated in Transcription
  misc_feature: MA Experiment 108687 PARAMETER Experiment Name: Zm_Embryos-Flowers__P Parameter: Tissue Value: Embryo vs. Aerial+
  misc_feature: MA Experiment ID: 108688 Result: Down-regulated in Transcription
  misc_feature: MA Experiment 108688 PARAMETER Experiment Name: Zm_Embryos-Flowers__P Parameter: Tissue Value: Immature Flowers vs. Aerial+
  misc_feature: MA Experiment ID: 20000108 Result: Down-regulated in Transcription
  misc_feature: MA Experiment 20000108 PARAMETER Experiment Name: Zm_Root-Tips_P Parameter: Age (day) Value: 12
  misc_feature: MA Experiment 20000108 PARAMETER Experiment Name: Zm_Root-Tips_P Parameter: Organism Value: Zea mays
  misc_feature: MA Experiment 20000108 PARAMETER Experiment Name: Zm_Root-Tips_P Parameter: Tissue Value: Root tips vs. Root mid region    35
  misc_feature: MA Experiment 20000108 PARAMETER Experiment Name: Zm_Root-Tips_P Parameter: Tissue Value: Root tips vs. Root mid region   Sequence Listing-Misc Features (4)
  misc_feature: MA Experiment ID: 20000478 Result: Down-regulated in Transcription
  misc_feature: MA Experiment 20000478 PARAMETER Experiment Name: Zm_5mM_SA_P Parameter: Age (day) Value: 11
  misc_feature: MA Experiment 20000478 PARAMETER Experiment Name: Zm_5mM_SA_P Parameter: Organism Value: Zea mays
  misc_feature: MA Experiment 20000478 PARAMETER Experiment Name: Zm_5mM_SA_P Parameter: Plant Line Value: 35A19
  misc_feature: MA Experiment 20000478 PARAMETER Experiment Name: Zm_5mM_SA_P Parameter: Timepoint (hr) Value: 72
  misc_feature: MA Experiment 20000478 PARAMETER Experiment Name: Zm_5mM_SA_P Parameter: Tissue Value: Aerial
  misc_feature: MA Experiment 20000478 PARAMETER Experiment Name: Zm_5mM_SA_P Parameter: Treatment Value: 5mM SA vs. No Treatment
  misc_feature: MA Experiment ID: 20001612 Result: Up-regulated in Transcription
  misc_feature: MA Experiment 20001612 PARAMETER Experiment Name: Zm_50ppm_KNO3_L-to-H_P Parameter: Age (day) Value: 19
  misc_feature: MA Experiment 20001612 PARAMETER Experiment Name: Zm_50ppm_KNO3_L-to-H_P Parameter: Organism Value: Zea mays
  misc_feature: MA Experiment 20001612 PARAMETER Experiment Name: Zm_50ppm_KNO3_L-to-H_P Parameter: Plant Line Value: 35A19
  misc_feature: MA Experiment 20001612 PARAMETER Experiment Name: Zm_50ppm_KNO3_L-to-H_P Parameter: Timepoint (hr) Value: 8
  misc_feature: MA Experiment 20001612 PARAMETER Experiment Name: Zm_50ppm_KNO3_L-to-H_P Parameter: Tissue Value: Roots
  misc_feature: MA Experiment 20001612 PARAMETER Experiment Name: Zm_50ppm_KNO3_L-to-H_P Parameter: Treatment Value: 50ppm KNO3 vs. 50ppm KCl
aaaaaatagccttatagccacatcccggccagccgcagcaagtgcccagaaggccagaaccagaaccaggtagcccgtgcaacctcatatcatcccctgccacgcacctccgtccgccgcgccatggaatcgaggaggagggccgtgcccaccgtgacggcggttgcggtggcgacgctgctgctgctgctgatgtcgtcgggcgtgggcggcgacttcgcggcggaccgggcggagtgctcggagcagctggcggggctggcgacgtgcctgacgtacgtgcaggagcaggcgacggcgacggcgccgacgcccgactgctgcgcgggcctgaaggcggtgctgcagagcagccgcaagtgcctgtgcgtgctggtcaaggaccgggacgaccccaacctaggcctcaagctcaacgtcgacaaggcgctcggcctccccgccgtctgccacgcgcccgccaacatctccgactgccccaggctgctggacctgccggccggctccaaggacgcgcaggtgttcgagcagtacgcgaagcagcaggcggcggcggcggcgcagggcggcggcgcacccaccagtggacgcagcagcgcggcggcgagcacgaccgcgggcgcgcagaagagcggagcctcagccgccggtcggtggttgggagtggggagggtcggtggtgctggtggcggcgcacgcgcggtggcgccgctcgccgtgcctttcctgctcctgctcgggtagataataataataactttacgcgcgcggccaacggccggagtcccggcggtttggttggcgccgcgcgttgccgacttgtgtgcttcgggtgcgtgcgtgtgtggtggggtacttttcacactatattggaaaaagaagctattatatatctttgactgaaaaaaagtgtcgttgtataattatctttttttcgtgtccgtgtatgcaacccctcctctcatagacccatagcgccaa

SEQ ID NO: 20025 - protein, 206 aa, Zea mays subsp. mays
  peptide (1)..(206): Ceres Seq. ID no. 14305861
  misc_feature (39)..(118): Pfam Name: Protease inhibitor/seed storage/LTP family Pfam Description: Protease inhibitor/seed storage/LTP family
  misc_feature (34)..(118): Homolog of NCBI NO: 18424785 NR Description: protease inhibitor/seed storage/lipid transfer
  misc_feature (14)..(173): Homolog of NCBI NO: 27765012 NR Description: At2g13820 [Arabidopsis thaliana]
  misc_feature (14)..(173): Homolog of NCBI NO: 15225509 NR Description: protease inhibitor/seed storage/lipid transfer
  misc_feature (19)..(172): Homolog of NCBI NO: 21555220 NR Description: unknown [Arabidopsis thaliana]
  misc_feature (9)..(172): Homolog of NCBI NO: 15231070 NR Description: protease inhibitor/seed storage/lipid transfer
  misc_feature (24)..(181): Homolog of NCBI NO: 21537387 NR Description: unknown [Arabidopsis thaliana]
  misc_feature (12)..(181): Homolog of NCBI NO: 18405294 NR Description: protease inhibitor/seed storage/lipid transfer
  misc_feature (1)..(181): Homolog of NCBI NO: 15224862 NR Description: lipid transfer protein family [Arabidopsis
  misc_feature (1)..(181): Homolog of NCBI NO: 15224863 NR Description: lipid transfer protein - related [Arabidopsis
  misc_feature (1)..(203): Homolog of NCBI NO: 34394084 NR Description: lipid transfer protein-like
MESRRRAVPTVTAVAVATLLLLLMSSGVGGDFAADRAECSEQLAGLATCLTYVQEQATATAPTPDCCAGLKAVLQSSRKCLCVLVKDRDDPNLGLKLNVDKALGLPAVCHAPANISDCPRLLDLPAGSKDAQVFEQYAKQQAAAAAQGGGAPTSGRSSAAASTTAGAQKSGASAAGRWLGVGRVGGAGGGARAVAPLAVPFLLLLG

SEQ ID NO: 20026 - protein, 183 aa, Zea mays subsp. mays
  peptide (1)..(183): Ceres Seq. ID no. 14305862
  misc_feature (16)..(95): Pfam Name: Protease inhibitor/seed storage/LTP family Pfam Description: Protease inhibitor/seed storage/LTP family
  misc_feature (11)..(95): Homolog of NCBI NO: 18424785 NR Description: protease inhibitor/seed storage/lipid transfer
  misc_feature (1)..(150): Homolog of NCBI NO: 27765012 NR Description: At2g13820 [Arabidopsis thaliana]
  misc_feature (1)..(150): Homolog of NCBI NO: 15225509 NR Description: protease inhibitor/seed storage/lipid transfer
  misc_feature (1)..(149): Homolog of NCBI NO: 21555220 NR Description: unknown [Arabidopsis thaliana]
  misc_feature (1)..(149): Homolog of NCBI NO: 15231070 NR Description: protease inhibitor/seed storage/lipid transfer
  misc_feature (1)..(158): Homolog of NCBI NO: 21537387 NR Description: unknown [Arabidopsis thaliana]
  misc_feature (1)..(158): Homolog of NCBI NO: 18405294 NR Description: protease inhibitor/seed storage/lipid transfer
  misc_feature (1)..(158): Homolog of NCBI NO: 15224862 NR Description: lipid transfer protein family [Arabidopsis
  misc_feature (1)..(158): Homolog of NCBI NO: 15224863 NR Description: lipid transfer protein - related [Arabidopsis
  misc_feature (1)..(180): Homolog of NCBI NO: 34394084 NR Description: lipid transfer protein-like
MSSGVGGDFAADRAECSEQLAGLATCLTYVQEQATATAPTPDCCAGLKAVLQSSRKCLCVLVKDRDDPNLGLKLNVDKALGLPAVCHAPANISDCPRLLDLPAGSKDAQVFEQYAKQQAAAAAQGGGAPTSGRSSAAASTTAGAQKSGASAAGRWLGVGRVGGAGGGARAVAPLAVPFLLLLG

SEQ ID NO: 20027 - DNA, 464 bp, Zea mays subsp. mays
  misc_feature (1)..(464): Ceres Seq. ID no. 12634242
  misc_feature: MA Experiment ID: 108522 Result: Up-regulated in Transcription
  misc_feature: MA Experiment 108522 PARAMETER Experiment Name: Zm_42deg_Heat_P Parameter: Age (day) Value: 8
  misc_feature: MA Experiment 108522 PARAMETER Experiment Name: Zm_42deg_Heat_P Parameter: Organism Value: Zea mays
  misc_feature: MA Experiment 108522 PARAMETER Experiment Name: Zm_42deg_Heat_P Parameter: Plant Line Value: 35A19
  misc_feature: MA Experiment 108522 PARAMETER Experiment Name: Zm_42deg_Heat_P Parameter: Temperature (deg C) Value: 42 vs. 22
  misc_feature: MA Experiment 108522 PARAMETER Experiment Name: Zm_42deg_Heat_P Parameter: Timepoint (hr) Value: 1
  misc_feature: MA Experiment 108522 PARAMETER Experiment Name: Zm_42deg_Heat_P Parameter: Tissue Value: Aerial
  misc_feature: MA Experiment ID: 108523 Result: Up-regulated in Transcription
  misc_feature: MA Experiment 108523 PARAMETER Experiment Name: Zm_42deg_Heat_P Parameter: Age (day) Value: 8
  misc_feature: MA Experiment 108523 PARAMETER Experiment Name: Zm_42deg_Heat_P Parameter: Organism Value: Zea mays
  misc_feature: MA Experiment 108523 PARAMETER Experiment Name: Zm_42deg_Heat_P Parameter: Plant Line Value: 35A19
  misc_feature: MA Experiment 108523 PARAMETER Experiment Name: Zm_42deg_Heat_P Parameter: Temperature (deg C) Value: 42 vs. 22
  misc_feature: MA Experiment 108523 PARAMETER Experiment Name: Zm_42deg_Heat_P Parameter: Timepoint (hr) Value: 6
  misc_feature: MA Experiment 108523 PARAMETER Experiment Name: Zm_42deg_Heat_P Parameter: Tissue Value: Aerial
agaaggcttcttcttgcgtaccttccacttccacccaacgcgactcgctctttcccgcatctggaagtcgccggctcagatccagccgggctgcggcgctggtcggatggccgagcagggcggcgcagccggggaggccgctggcagcgacccccctgcgcctgcgcctgcgactgccccggcgccagccccagcgcttgctgcggacgcggccgggcagaggtccctgccgacgccgttcctgaccaagacgtaccagctggtggacgacccggcggtggacgacgtgatctcgtggaacgaggacggctcgacgttcgtggtgtggcggccggcggagtttgcgcgcgacctcctccccaagtatttcaagcacaataacttctccagctttgtgcggcagctcaacacctacggatttaggaagatggtgcccgaccggtgggagtcgccaacgacttctt

SEQ ID NO: 20028 - protein, 154 aa, Zea mays subsp. mays
  peptide (1)..(154): Ceres Seq. ID no. 12634243
  misc_feature (78)..(149): Pfam Name: HSF-type DNA-binding Pfam Description: HSF-type DNA-binding
  misc_feature (72)..(149): Homolog of NCBI NO: 15220101 NR Description: heat shock transcription factor, putative
  misc_feature (66)..(149): Homolog of NCBI NO: 15234583 NR Description: heat shock transcription factor HSF4; protein id:
  misc_feature (62)..(149): Homolog of NCBI NO: 30697614 NR Description: heat shock transcription factor 6 (HSF6)
  misc_feature (73)..(149): Homolog of NCBI NO: 6624618 NR Description: heat shock factor 7 [Arabidopsis thaliana]
  misc_feature (40)..(149): Homolog of NCBI NO: 15234264 NR Description: heat shock transcription factor - like protein
  misc_feature (24)..(149): Homolog of NCBI NO: 33591098 NR Description: heat shock factor RHSF2 [Oryza sativa (japonica
EGFFLRTFHFHPTRLALSRIWKSPAQIQPGCGAGRMAEQGGAAGEAAGSDPPAPAPATAPAPAPALAADAAGQRSLPTPFLTKTYQLVDDPAVDDVISWNEDGSTFVVWRPAEFARDLLPKYFKHNNFSSFVRQLNTYGFRKMVPDRWESPTTS

SEQ ID NO: 20029 - protein, 126 aa, Zea mays subsp. mays
  peptide (1)..(126): Ceres Seq. ID no. 12634244
RRLLLAYLPLPPNATRSFPHLEVAGSDPAGLRRWSDGRAGRRSRGGRWQRPPCACACDCPGASPSACCGRGRAEVPADAVPDQDVPAGGRPGGGRRDLVERGRLDVRGVAAGGVCARPPPQVFQAQ

SEQ ID NO: 20030 - protein, 119 aa, Zea mays subsp. mays
  peptide (1)..(119): Ceres Seq. ID no. 12634245
  misc_feature (43)..(114): Pfam Name: HSF-type DNA-binding Pfam Description: HSF-type DNA-binding
  misc_feature (37)..(114): Homolog of NCBI NO: 15220101 NR Description: heat shock transcription factor, putative
  misc_feature (31)..(114): Homolog of NCBI NO: 15234583 NR Description: heat shock transcription factor HSF4; protein id:
  misc_feature (27)..(114): Homolog of NCBI NO: 30697614 NR Description: heat shock transcription factor 6 (HSF6)
  misc_feature (38)..(114): Homolog of NCBI NO: 6624618 NR Description: heat shock factor 7 [Arabidopsis thaliana]
  misc_feature (5)..(114): Homolog of NCBI NO: 15234264 NR Description: heat shock transcription factor - like protein
  misc_feature (1)..(114): Homolog of NCBI NO: 33591098 NR Description: heat shock factor RHSF2 [Oryza sativa (japonica
MAEQGGAAGEAAGSDPPAPAPATAPAPAPALAADAAGQRSLPTPFLTKTYQLVDDPAVDDVISWNEDGSTFVVWRPAEFARDLLPKYFKHNNFSSFVRQLNTYGFRKMVPDRWESPTTS

SEQ ID NO: 20031 - DNA, 1351 bp, Zea mays subsp. mays
  misc_feature (1)..(1351): Ceres Seq. ID no. 12418243
  misc_feature: MA Experiment ID: 108528 Result: Up-regulated in Transcription
  misc_feature: MA Experiment 108528 PARAMETER Experiment Name: Zm_Imbibed_Seeds_P Parameter: Age (day) Value: 5 vs. 2
  misc_feature: MA Experiment 108528 PARAMETER Experiment Name: Zm_Imbibed_Seeds_P Parameter: Organism Value: Zea mays
  misc_feature: MA Experiment 108528 PARAMETER Experiment Name: Zm_Imbibed_Seeds_P Parameter: Plant Line Value: 35A19
  misc_feature: MA Experiment 108528 PARAMETER Experiment Name: Zm_Imbibed_Seeds_P Parameter: Tissue Value: Aerial vs. Embryo
  misc_feature: MA Experiment ID: 108530 Result: Up-regulated in Transcription
  misc_feature: MA Experiment 108530 PARAMETER Experiment Name: Zm_Imbibed_Seeds_P Parameter: Age (day) Value: 6 vs. 2
  misc_feature: MA Experiment 108530 PARAMETER Experiment Name: Zm_Imbibed_Seeds_P Parameter: Organism Value: Zea mays
  misc_feature: MA Experiment 108530 PARAMETER Experiment Name: Zm_Imbibed_Seeds_P Parameter: Plant Line Value: 35A19
  misc_feature: MA Experiment 108530 PARAMETER Experiment Name: Zm_Imbibed_Seeds_P Parameter: Tissue Value: Aerial vs. Embryo
  misc_feature: MA Experiment ID: 108535 Result: Down-regulated in Transcription
  misc_feature: MA Experiment 108535 PARAMETER Experiment Name: Zm_Meristem_P Parameter: Age (day) Value: 8
  misc_feature: MA Experiment 108535 PARAMETER Experiment Name: Zm_Meristem_P Parameter: Organism Value: Zea mays
  misc_feature: MA Experiment 108535 PARAMETER Experiment Name: Zm_Meristem_P Parameter: Plant Line Value: 35A19
  misc_feature: MA Experiment 108535 PARAMETER Experiment Name: Zm_Meristem_P Parameter: Tissue Value: Root Meristem vs. Above Root Meristem
  misc_feature: MA Experiment ID: 108536 Result: Down-regulated in Transcription
  misc_feature: MA Experiment 108536 PARAMETER Experiment Name: Zm_Meristem_P Parameter: Age (day) Value: 8
  misc_feature: MA Experiment 108536 PARAMETER Experiment Name: Zm_Meristem_P Parameter: Organism Value: Zea mays
  misc_feature: MA Experiment 108536 PARAMETER Experiment Name: Zm_Meristem_P Parameter: Plant Line Value: 35A19
  misc_feature: MA Experiment 108536 PARAMETER Experiment Name: Zm_Meristem_P Parameter: Tissue Value: Shoot Meristem vs. Above Shoot Meristem
  misc_feature: MA Experiment ID: 108543 Result: Down-regulated in Transcription
  misc_feature: MA Experiment ID: 108545 Result: Up-regulated in Transcription
  misc_feature: MA Experiment 108545 PARAMETER Experiment Name: Zm_Imbibed_Seeds_P Parameter: Age (day) Value: 3 vs. 2
  misc_feature: MA Experiment 108545 PARAMETER Experiment Name: Zm_Imbibed_Seeds_P Parameter: Organism Value: Zea mays
  misc_feature: MA Experiment 108545 PARAMETER Experiment Name: Zm_Imbibed_Seeds_P Parameter: Plant Line Value: 35A19
  misc_feature: MA Experiment 108545 PARAMETER Experiment Name: Zm_Imbibed_Seeds_P Parameter: Tissue Value: Aerial vs. Embryo
  misc_feature: MA Experiment ID: 108547 Result: Up-regulated in Transcription
  misc_feature: MA Experiment 108547 PARAMETER Experiment Name: Zm_Imbibed_Seeds_P Parameter: Age (day) Value: 4 vs. 2
  misc_feature: MA Experiment 108547 PARAMETER Experiment Name: Zm_Imbibed_Seeds_P Parameter: Organism Value: Zea mays
  misc_feature: MA Experiment 108547 PARAMETER Experiment Name: Zm_Imbibed_Seeds_P Parameter: Plant Line Value: 35A19
  misc_feature: MA Experiment 108547 PARAMETER Experiment Name: Zm_Imbibed_Seeds_P Parameter: Tissue Value: Aerial vs. Embryo
  misc_feature: MA Experiment ID: 108688 Result: Down-regulated in Transcription
  misc_feature: MA Experiment 108688 PARAMETER Experiment Name: Zm_Embryos-Flowers__P Parameter: Tissue Value: Immature Flowers vs. Aerial+
  misc_feature: MA Experiment ID: 20000535 Result: Down-regulated in Transcription
  misc_feature: MA Experiment 20000535 PARAMETER Experiment Name: Zm_Hybrid_Seed_Dev_P Parameter: DAP Value: 30 vs. 12
  misc_feature: MA Experiment 20000535 PARAMETER Experiment Name: Zm_Hybrid_Seed_Dev_P Parameter: Organism Value: Zea mays
  misc_feature: MA Experiment 20000535 PARAMETER Experiment Name: Zm_Hybrid_Seed_Dev_P Parameter: Plant Line Value: 35A19
  misc_feature: MA Experiment 20000535 PARAMETER Experiment Name: Zm_Hybrid_Seed_Dev_P Parameter: Tissue Value: Embryo vs. Unfert Floret
aacaaaaatcacgtttccatccatcctggcgcacaagaggaagcggagagctctctctctcccgcccgcaatataatggcgagagcacacctagccctggtcagcttcttcgctgcctcaattattggtgcggcgtccaagtcgttcaccatcgccaacaactgcgagcacacggtgtggccggggatcctctcgagcgccgggtccgcgggagtggacaccacaggcttcgcgctggcgccgggggagtcgcgcgctctgagcgtgcgtcggggtggtcgggccggctgtggggccgcacgctctgctccaccgacgcggccacgggccggttcgcctgcgtgaccggcgactgcggctcgggcaggcaggactgcggcggcggcggggccgccccgccggccacgcctggcagagttcaccatggacggcagcgggggcatggacttctacgacgtgagcctggtggacgggtacaacctgccgatgctggtggcgccgcagggcgcggccgctgccgcggggggcagctgcgtgcccaccggctgcatggcggacctcaacggcgcgtgccccgccgacctgcgcgtggcggcttcgacgacgtcctccggcggcggcggcgtggcctgcaagagcgcgtgcgaggcgttcgggtcggcgcagtactgctgcaacggcgactacgggaaccccagcacctgcaagccgtcggcgtactcgcagttcttcaagaacgcgtgcccccgggcgtacagctacgcctacgacgacgccacctccaccttcacctgcgccggcgacaccgcgtacgccatcaccttctgccccagcacgaccagcgtcaaggcggccggaggtagcccgcaggagcaaggagccctgccgctgatgaacgccaccatggtgtacctcggcggcgaccaggtcggatccgccacagccgcggcccggctgccgtccggcctcctccaccacgtcgtggtcctcgccgttgtgtccctcgcgctagcaggggctctgtactgatggtgatggcgaaccccactgcacagtgacgacgcgacgccacgcgggacaacagcccacgagacaatcgtgctcctctacagaccgaaggaaaaaaaattaaggatagaaacgagaaatggacgcatcacctgcctgccggtgtggacggcggtggtcctcgcggtccagcgagactgcgagccccgacgacggtgtgattattcacccgtgccgaccgagagagacgtgtgtagtggcgatacaaatttgattgaagacattattgtgcgttttcttagatatttattaattacacgataatacacacatgtattattat

SEQ ID NO: 20032 - protein, 286 aa, Zea mays subsp. mays
  peptide (1)..(286): Ceres Seq. ID no. 12418244
  misc_feature (94)..(135): Homolog of NCBI NO: 21553002 NR Description: osmotin-like protein 4 [Chenopodium quinoa]
  misc_feature (82)..(132): Homolog of NCBI NO: 7488208 NR Description: probable serine/threonine-specific protein kinase
QKSRFHPSWRTRGSGELSLSRPQYNGESTPSPGQLLRCLNYWCGVQVVHHRQQLRAHGVAGDPLERRVRGSGHHRLRAGAGGVARSERASGWSGRLWGRTLCSTDAATGRFACVTGDCGSGRQDCGGGGAAPPATPGRVHHGRQRGHGLLRREPGGRVQPADAGGAAGRGRCRGGQLRAHRLHGGPQRRVPRRPARGGFDDVLRRRRRGLQERVRGVRVGAVLLQRRLREPQHLQAVGVLAVLQERVPPGVQLRLRRRHLHLHLRRRHRVRHHLLPQHDQRQGGRR

SEQ ID NO: 20033 - protein, 201 aa, Zea mays subsp. mays
  peptide (1)..(201): Ceres Seq. ID no. 12418245
  misc_feature (1)..(136): Pfam Name: Thaumatin family Pfam Description: Thaumatin family
  misc_feature (1)..(137): Homolog of NCBI NO: 15227907 NR Description: putative thaumatin-like pathogenesis-related
  misc_feature (1)..(137): Homolog of NCBI NO: 4105697 NR Description: thaumatin-like protein [Arabidopsis thaliana]
  misc_feature (1)..(155): Homolog of NCBI NO: 15222875 NR Description: thaumatin, putative
  misc_feature (1)..(183): Homolog of NCBI NO: 37531036 NR Description: putative thaumatin-like protein
  misc_feature (1)..(144): Homolog of NCBI NO: 30686652 NR Description: thaumatin family [Arabidopsis thaliana]
  misc_feature (1)..(164): Homolog of NCBI NO: 30692042 NR Description: thaumatin family [Arabidopsis thaliana]
  misc_feature (1)..(144): Homolog of NCBI NO: 25296204 NR Description: hypothetical protein T20H2.19 [imported] -
  misc_feature (1)..(196): Homolog of NCBI NO: 6273383 NR Description: SCUTL1 [Vitis vinifera]
  misc_feature (1)..(144): Homolog of NCBI NO: 15233437 NR Description: thaumatin-like protein
  misc_feature (1)..(200): Homolog of NCBI NO: 37531042 NR Description: putative thaumatin-like protein
MDGSGGMDFYDVSLVDGYNLPMLVAPQGAAAAAGGSCVPTGCMADLNGACPADLRVAASTTSSGGGGVACKSACEAFGSAQYCCNGDYGNPSTCKPSAYSQFFKNACPRAYSYAYDDATSTFTCAGDTAYAITFCPSTTSVKAAGGSPQEQGALPLMNATMVYLGGDQVGSATAAARLPSGLLHHVVVLAVVSLALAGALY

SEQ ID NO: 20034 - protein, 195 aa, Zea mays subsp. mays
  peptide (1)..(195): Ceres Seq. ID no. 12418246
  misc_feature (1)..(130): Pfam Name: Thaumatin family Pfam Description: Thaumatin family
  misc_feature (1)..(131): Homolog of NCBI NO: 15227907 NR Description: putative thaumatin-like pathogenesis-related
  misc_feature (1)..(131): Homolog of NCBI NO: 4105697 NR Description: thaumatin-like protein [Arabidopsis thaliana]
  misc_feature (1)..(149): Homolog of NCBI NO: 15222875 NR Description: thaumatin, putative
  misc_feature (1)..(177): Homolog of NCBI NO: 37531036 NR Description: putative thaumatin-like protein
  misc_feature (1)..(138): Homolog of NCBI NO: 30686652 NR Description: thaumatin family [Arabidopsis thaliana]
  misc_feature (1)..(158): Homolog of NCBI NO: 30692042 NR Description: thaumatin family [Arabidopsis thaliana]
  misc_feature (1)..(138): Homolog of NCBI NO: 25296204 NR Description: hypothetical protein T20H2.19 [imported] -
  misc_feature (1)..(190): Homolog of NCBI NO: 6273383 NR Description: SCUTL1 [Vitis vinifera]
  misc_feature (1)..(138): Homolog of NCBI NO: 15233437 NR Description: thaumatin-like protein
  misc_feature (1)..(194): Homolog of NCBI NO: 37531042 NR Description: putative thaumatin-like protein
MDFYDVSLVDGYNLPMLVAPQGAAAAAGGSCVPTGCMADLNGACPADLRVAASTTSSGGGGVACKSACEAFGSAQYCCNGDYGNPSTCKPSAYSQFFKNACPRAYSYAYDDATSTFTCAGDTAYAITFCPSTTSVKAAGGSPQEQGALPLMNATMVYLGGDQVGSATAAARLPSGLLHHVVVLAVVSLALAGALY

SEQ ID NO: 20035 - DNA, 419 bp, Zea mays subsp. mays
  misc_feature (1)..(419): Ceres Seq. ID no. 4614060
  misc_feature: MA Experiment ID: 20000534 Result: Up-regulated in Transcription
  misc_feature: MA Experiment 20000534 PARAMETER Experiment Name: Zm_Hybrid_Pollen_P Parameter: Age (day) Value: 8
  misc_feature: MA Experiment 20000534 PARAMETER Experiment Name: Zm_Hybrid_Pollen_P Parameter: Organism Value: Zea mays
  misc_feature: MA Experiment 20000534 PARAMETER Experiment Name: Zm_Hybrid_Pollen_P Parameter: Plant Line Value: 35A19
  misc_feature: MA Experiment 20000534 PARAMETER Experiment Name: Zm_Hybrid_Pollen_P Parameter: Tissue Value: Pollen vs. Aerial
  misc_feature: MA Experiment ID: 20000535 Result: Up-regulated in Transcription
  misc_feature: MA Experiment 20000535 PARAMETER Experiment Name: Zm_Hybrid_Seed_Dev_P Parameter: DAP Value: 30 vs. 12
  misc_feature: MA Experiment 20000535 PARAMETER Experiment Name: Zm_Hybrid_Seed_Dev_P Parameter: Organism Value: Zea mays
  misc_feature: MA Experiment 20000535 PARAMETER Experiment Name: Zm_Hybrid_Seed_Dev_P Parameter: Plant Line Value: 35A19
  misc_feature: MA Experiment 20000535 PARAMETER Experiment Name: Zm_Hybrid_Seed_Dev_P Parameter: Tissue Value: Embryo vs. Unfert Floret
cggaccacacggtccacacagcccaacaaaggagcgcggcggcccctccttccsttcctcccacttctctcgcgcggcgctcgcttacctcgcctcgcattccgttcgagcaggggagcggcagtgagaagggagggaattaaggcaagatgttcatcgagagcttccgcgtcgagagcccccacgtgcggtacggcccgacsgagatcgagtcggagtaccggtacgacacgacggagctggtgcacgaggccaaggacggcgcctcccgctgggtcgtccgccccaagtccgtcaagtacaacttccggaccagcaccgcggtccccaagctcggggtcatgcttgtggggtggggaggcaacaacgggtccacgcttacggctggggtcattgccaacagggaggggatctcatgg

SEQ ID NO: 20036 - protein, 139 aa, Zea mays subsp. mays
  peptide (1)..(139): Ceres Seq. ID no. 4614061
  misc_feature (24)..(137): Pfam Name: Cupin Pfam Description: Cupin
  misc_feature (18)..(18): Xaa is any aa, unknown or other
  misc_feature (68)..(68): Xaa is any aa, unknown or other
RTTRSTQPNKGARRPLLXFLPLLSRGARLPRLAFRSSRGAAVRREGIKARCSSRASASRAPTCGTARXRSSRSTGTTRRSWCTRPRTAPPAGSSAPSPSSTTSGPAPRSPSSGSCLWGGEATTGPRLRLGSLPTGRGSH

SEQ ID NO: 20037 - protein, 90 aa, Zea mays subsp. mays
  peptide (1)..(90): Ceres Seq. ID no. 4614062
  misc_feature (1)..(89): Homolog of NCBI NO: 32140125 NR Description: inositol 1-phosphate synthase [Porteresia
  misc_feature (1)..(89): Homolog of NCBI NO: 14548088 NR Description: Inositol-3-phosphate synthase
  misc_feature (1)..(89): Homolog of NCBI NO: 32492882 NR Description: myo-inositol-1-phosphate synthase INO1 [Xerophyta
  misc_feature (1)..(89): Homolog of NCBI NO: 14548094 NR Description: Inositol-3-phosphate synthase
  misc_feature (1)..(89): Homolog of NCBI NO: 11762100 NR Description: myo-inositol 1-phosphate synthase [Zea mays]
  misc_feature (1)..(89): Homolog of NCBI NO: 14582467 NR Description: 1L-myo-inositol-1-phosphate synthase [Phaseolus
  misc_feature (1)..(89): Homolog of NCBI NO: 1170568 NR Description: Inositol-3-phosphate synthase
  misc_feature (1)..(89): Homolog of NCBI NO: 24429925 NR Description: myo-inositol phosphate synthase [Lolium perenne]
  misc_feature (1)..(89): Homolog of NCBI NO: 18181983 NR Description: myo-inositol-1-phosphate synthase [Avena sativa]
  misc_feature (1)..(89): Homolog of NCBI NO: 14548089 NR Description: Inositol-3-phosphate synthase
  misc_feature (18)..(18): Xaa is any aa, unknown or other
MFIESFRVESPHVRYGPXEIESEYRYDTTELVHEAKDGASRWVVRPKSVKYNFRTSTAVPKLGVMLVGWGGNNGSTLTAGVIANREGISW

SEQ ID NO: 20038 - DNA, 1860 bp, Zea mays subsp. mays
  misc_feature (1)..(1860): Ceres Seq. ID no. 12391528
  misc_feature: MA Experiment ID: 20000477 Result: Down-regulated in Transcription
  misc_feature: MA Experiment 20000477 PARAMETER Experiment Name: Zm_5mM_SA_P Parameter: Age (day) Value: 10
  misc_feature: MA Experiment 20000477 PARAMETER Experiment Name: Zm_5mM_SA_P Parameter: Organism Value: Zea mays
  misc_feature: MA Experiment 20000477 PARAMETER Experiment Name: Zm_5mM_SA_P Parameter: Plant Line Value: 35A19
  misc_feature: MA Experiment 20000477 PARAMETER Experiment Name: Zm_5mM_SA_P Parameter: Timepoint (hr) Value: 48
  misc_feature: MA Experiment 20000477 PARAMETER Experiment Name: Zm_5mM_SA_P Parameter: Tissue Value: Aerial
  misc_feature: MA Experiment 20000477 PARAMETER Experiment Name: Zm_5mM_SA_P Parameter: Treatment Value: 5mM SA vs. No Treatment
  misc_feature: MA Experiment ID: 20000478 Result: Down-regulated in Transcription
  misc_feature: MA Experiment 20000478 PARAMETER Experiment Name: Zm_5mM_SA_P Parameter: Age (day) Value: 11
  misc_feature: MA Experiment 20000478 PARAMETER Experiment Name: Zm_5mM_SA_P Parameter: Organism Value: Zea mays
  misc_feature: MA Experiment 20000478 PARAMETER Experiment Name: Zm_5mM_SA_P Parameter: Plant Line Value: 35A19
  misc_feature: MA Experiment 20000478 PARAMETER Experiment Name: Zm_5mM_SA_P Parameter: Timepoint (hr) Value: 72
  misc_feature: MA Experiment 20000478 PARAMETER Experiment Name: Zm_5mM_SA_P Parameter: Tissue Value: Aerial
  misc_feature: MA Experiment 20000478 PARAMETER Experiment Name: Zm_5mM_SA_P Parameter: Treatment Value: 5mM SA vs. No Treatment
  misc_feature: MA Experiment ID: 20000535 Result: Up-regulated in Transcription
  misc_feature: MA Experiment 20000535 PARAMETER Experiment Name: Zm_Hybrid_Seed_Dev_P Parameter: DAP Value: 30 vs. 12
  misc_feature: MA Experiment 20000535 PARAMETER Experiment Name: Zm_Hybrid_Seed_Dev_P Parameter: Organism Value: Zea mays
  misc_feature: MA Experiment 20000535 PARAMETER Experiment Name: Zm_Hybrid_Seed_Dev_P Parameter: Plant Line Value: 35A19
  misc_feature: MA Experiment 20000535 PARAMETER Experiment Name: Zm_Hybrid_Seed_Dev_P Parameter: Tissue Value: Embryo vs. Unfert Floret
acttctcattcctcacttccgtcctcgcgcaccaccccctccatccgttccggatggtgccttcgaaatcccgtccggcgccctagcgtagctcgggctcggccaggctccgggcccgccgcgccgttccgcagtccagctccacctccagatcttttcttgagtttaaggaagatgcttgcctttatttagaaggccctttttggtacgtcagcagtgttctttcctataggagtaaatgccattccgtagcatcgtgcgtgatgtaagggatggtttcgggagcttgtctaggaggggatttgaggtcaggtttctgagtcatcgcagagggaaatctcatggtgctgtccatgagctgcacgacccagtgcttgtggtacagagtagctgctgggctagcttgcctcctgaattacttcgagatgtgattgagaggttggagaccagtgaggatacatggccttctaggaaacatgtagttgcttgtgcagctgtctgcagaacatggagagagatgtgtagagagattgtcaagagcccagagttttctggaaaaatcacttttcctgtttccttgaagcagcctgggcctcgagatggaactattcagtgttttattaagagggataaatctacccaaatctacagtctgtaccttagttttagctctgccgtgcctgtcgaaaatggcaaattccttctatccgcaaaaaggaactgccgtgcaacatatacagaatatataatatcaataaattctggtgatacatctaggtgtacaagtaacaacacatacattgggaaattaaggtcaaatttccttggcacaaaatttgtaatatacgatactcatccgccatacaatggaactagtcaaacagtggcagggaaaacaagtcagagattctactccaagaagggatcaaccaaggtttcttgcaggtggtacagtattgcacaaatctcatacgagctgaatgtcttgggaactcgaggcccaaggcggatgaactgtgtaatgcactccatcccagcttcatgccttgaggctggtggcagtgtcccttgccagccggacagcattgcagcccactctgttggcggatcattcagcagtgtgtccttgtcaaagtcatcgactatggaccactctatgcatttcaccagttcccggctctctgatgccataacaggagatggcattgtgaacagaggccaggcattgaatgatgctgacgatgaagagtgcaaggacatgcctttgatcctccgcaacaaggccccaaggtggcacgagcagcttcagtgctggtgcctcaacttccggggccgggtgactgtcgcctcggtcaagaacttccagctagtcgcggcgacacagcctgccgccggagccctgaccccatcacaggcagccccgcagccagctccgcctcctccgccggaccaagagaaggtcatactgcagtttgggaaggtcggcaaggacatcttcaccatggactactgctacccgctgtcagccttccaggccttcgccatctgcctgagcagcttcgacaccaagttggcctgcgaataaatcctacctacaattctggtacctaccaaataatcaaaaacactgattgtcgtggtgttcgtccaagaaccgagtttagctgagacgccattgggcaccatgtgctggtgccttgttaactcagaaacgcgtgggggctgaatctgtttcagcagcttccttgtgataatctgtagctgctgcttcgctgctgttgtatcctatgctttcatttctttccggttccgctgtagcttcttaccccccggtgacattagttcggtacccgtatctgc

SEQ ID NO: 20039 - protein, 448 aa, Zea mays subsp. mays
  peptide (1)..(448): Ceres Seq. ID no. 12391529
  misc_feature (117)..(448): Pfam Name: Tub family Pfam Description: Tub family
  misc_feature (18)..(435): Homolog of NCBI NO: 28188615 NR Description: unknown protein [Arabidopsis thaliana]
  misc_feature (18)..(435): Homolog of NCBI NO: 28188595 NR Description: unknown protein [Arabidopsis thaliana]
  misc_feature (18)..(435): Homolog of NCBI NO: 28188613 NR Description: unknown protein [Arabidopsis thaliana]
  misc_feature (291)..(448): Homolog of NCBI NO: 18400968 NR Description: expressed protein
  misc_feature (1)..(310): Homolog of NCBI NO: 18400968 NR Description: expressed protein
  misc_feature (1)..(448): Homolog of NCBI NO: 38637048 NR Description: putative chain A, C-terminal domain of mouse
  misc_feature (1)..(448): Homolog of NCBI NO: 15222543 NR Description: F-box containing tubby family protein; protein
  misc_feature (1)..(448): Homolog of NCBI NO: 5777631 NR Description: CAA303719.1 protein [Oryza sativa]
  misc_feature (1)..(448): Homolog of NCBI NO: 34908598 NR Description: putative tubby protein [Oryza sativa (japonica
  misc_feature (1)..(448): Homolog of NCBI NO: 15223772 NR Description: Tub family protein, putative; protein id:
MPFRSIVRDVRDGFGSLSRRGFEVRFLSHRRGKSHGAVHELHDPVLVVQSSCWASLPPELLRDVIERLETSEDTWPSRKHVVACAAVCRTWREMCREIVKSPEFSGKITFPVSLKQPGPRDGTIQCFIKRDKSTQIYSLYLSFSSAVPVENGKFLLSAKRNCRATYTEYIISINSGDTSRCTSNNTYIGKLRSNFLGTKFVIYDTHPPYNGTSQTVAGKTSQRFYSKKGSTKVSCRWYSIAQISYELNVLGTRGPRRMNCVMHSIPASCLEAGGSVPCQPDSIAAHSVGGSFSSVSLSKSSTMDHSMHFTSSRLSDAITGDGIVNRGQALNDADDEECKDMPLILRNKAPRWHEQLQCWCLNFRGRVTVASVKNFQLVAATQPAAGALTPSQAAPQPAPPPPPDQEKVILQFGKVGKDIFTMDYCYPLSAFQAFAICLSSFDTKLACE

SEQ ID NO: 20040 - protein, 355 aa, Zea mays subsp. mays
  peptide (1)..(355): Ceres Seq. ID no. 12391530
  misc_feature (24)..(355): Pfam Name: Tub family Pfam Description: Tub family
  misc_feature (1)..(342): Homolog of NCBI NO: 28188615 NR Description: unknown protein [Arabidopsis thaliana]
  misc_feature (1)..(342): Homolog of NCBI NO: 28188595 NR Description: unknown protein [Arabidopsis thaliana]
  misc_feature (1)..(342): Homolog of NCBI NO: 28188613 NR Description: unknown protein [Arabidopsis thaliana]
  misc_feature (198)..(355): Homolog of NCBI NO: 18400968 NR Description: expressed protein
  misc_feature (1)..(217): Homolog of NCBI NO: 18400968 NR Description: expressed protein
  misc_feature (1)..(355): Homolog of NCBI NO: 38637048 NR Description: putative chain A, C-terminal domain of mouse
  misc_feature (1)..(355): Homolog of NCBI NO: 15222543 NR Description: F-box containing tubby family protein; protein
  misc_feature (1)..(355): Homolog of NCBI NO: 5777631 NR Description: CAA303719.1 protein [Oryza sativa]
  misc_feature (1)..(355): Homolog of NCBI NO: 34908598 NR Description: putative tubby protein [Oryza sativa (japonica
  misc_feature (1)..(355): Homolog of NCBI NO: 15223772 NR Description: Tub family protein, putative; protein id:
MCREIVKSPEFSGKITFPVSLKQPGPRDGTIQCFIKRDKSTQIYSLYLSFSSAVPVENGKFLLSAKRNCRATYTEYIISINSGDTSRCTSNNTYIGKLRSNFLGTKFVIYDTHPPYNGTSQTVAGKTSQRFYSKKGSTKVSCRWYSIAQISYELNVLGTRGPRRMNCVMHSIPASCLEAGGSVPCQPDSIAAHSVGGSFSSVSLSKSSTMDHSMHFTSSRLSDAITGDGIVNRGQALNDADDEECKDMPLILRNKAPRWHEQLQCWCLNFRGRVTVASVKNFQLVAATQPAAGALTPSQAAPQPAPPPPPDQEKVILQFGKVGKDIFTMDYCYPLSAFQAFAICLSSFDTKLACE

SEQ ID NO: 20041 - DNA, 1233 bp, Zea mays subsp. mays
  misc_feature (1)..(1233): Ceres Seq. ID no. 12383372
  misc_feature: MA Experiment ID: 108544 Result: Up-regulated in Transcription
acccgcacacccaccatcagcacgctcccggactctgatggcgctgagccccacgcccacggccgttgctgcaccgccgccggagccgggccccgagcccgcgccgtccgctgagctgccgctgccggacgccatcgcggccgcgctgccgccggacccgtacgagcagctggaggtggcgcgcaagatcacggccgtggccgtggcgtcccgggcctcgcgcctcgagctggaggccgcgcggctacggcagaggctggccgacagggaccgcctcgccgccgagctcgccgacagggccgccaagctcgagcaggcgctccgcgacgccgacgcgcggntccgcagcgcactcgacgacaacgccaagctggccaaggagcgggactcgctcgcgcagacgtccaagaagctggccagggacctcgccaagctggaaaccttcaagcggcacctgatgcagtcgctgggcgatgataattcccaaactcatcatcaggaaacagtagacataagaacctacgagcaatcggtggcaaaagcgaattcctggaaagacgggctagagaagaacagccatcctgtatcctctctatccgacgagtccgtcgaagccgacagcgtaaatcaggaagtgacgacgaggccatttgagcagaaactgaccatcacgcacatcactccacgcctcacctcggatcctgcgccgaagctgagaaccgccgcgacatccccgagaaggtactccacggcggtgtcgcccaaactggcgtccggcgccacctcgccgcgattggagggccacatggcgatgtcgccatggctaccctcgagcaagatgtcctctgcagccaactcgccacctcgtggacagtctatctcaggacgcggtacaagagtagatggcaaggagttctttcgtcaagcaagacaccgcctgtcatacgaacaatttgcggcttttctttccaatatcaaggagctcaacgcccataggcaatctcgagaggagaccctgaggaaggcggacgagatcttcggtgcagaaaacatggacctcttcaggtcgttccaagggctgcttagccgcagcctatcgtagtaaaaaggaaaagaagcttgcccattctatcaattactactccttgttgcggttgttcatgattcatatggacagggccgacagcaggtatacgctttgtgtataataaataaaaaaacgacgtggaccgt

SEQ ID NO: 20042 - protein, 366 aa, Zea mays subsp. mays
  peptide (1)..(366): Ceres Seq. ID no. 12383373
  misc_feature (49)..(209): Homolog of NCBI NO: 23613663 NR Description: hypothetical protein, conserved [Plasmodium
  misc_feature (41)..(254): Homolog of NCBI NO: 25404089 NR Description: hypothetical protein T6H22.12 [imported] -
  misc_feature (76)..(366): Homolog of NCBI NO: 38344261 NR Description: OSJNBa0008M17.14 [Oryza sativa (japonica
  misc_feature (20)..(336): Homolog of NCBI NO: 7485048 NR Description: hypothetical protein - Arabidopsis thaliana
  misc_feature (41)..(305): Homolog of NCBI NO: 38344261 NR Description: OSJNBa0008M17.14 [Oryza sativa (japonica
  misc_feature (90)..(312): Homolog of NCBI NO: 34909876 NR Description: B1143G03.2 [Oryza sativa (japonica
  misc_feature (13)..(287): Homolog of NCBI NO: 34909876 NR Description: B1143G03.2 [Oryza sativa (japonica
  misc_feature (36)..(364): Homolog of NCBI NO: 18414476 NR Description: Expressed protein
  misc_feature (41)..(362): Homolog of NCBI NO: 15222835 NR Description: hypothetical protein; protein id: At1g56080.1
  misc_feature (38)..(365): Homolog of NCBI NO: 30684901 NR Description: expressed protein [Arabidopsis thaliana]
  misc_feature (114)..(114): Xaa is any aa, unknown or other
PAHPPSARSRTLMALSPTPTAVAAPPPEPGPEPAPSAELPLPDAIAAALPPDPYEQLEVARKITAVAVASRASRLELEAARLRQRLADRDRLAAELADRAAKLEQALRDADARXRSALDDNAKLAKERDSLAQTSKKLARDLAKLETFKRHLMQSLGDDNSQTHHQETVDIRTYEQSVAKANSWKDGLEKNSHPVSSLSDESVEADSVNQEVTTRPFEQKLTITHITPRLTSDPAPKLRTAATSPRRYSTAVSPKLASGATSPRLEGHMAMSPWLPSSKMSSAANSPPRGQSISGRGTRVDGKEFFRQARHRLSYEQFAAFLSNIKELNAHRQSREETLRKADEIFGAENMDLFRSFQGLLSRSLS

SEQ ID NO: 20043 - protein, 354 aa, Zea mays subsp. mays
  peptide (1)..(354): Ceres Seq. ID no. 12383374
  misc_feature (37)..(197): Homolog of NCBI NO: 23613663 NR Description: hypothetical protein, conserved [Plasmodium
  misc_feature (29)..(242): Homolog of NCBI NO: 25404089 NR Description: hypothetical protein T6H22.12 [imported] -
  misc_feature (64)..(354): Homolog of NCBI NO: 38344261 NR Description: OSJNBa0008M17.14 [Oryza sativa (japonica
  misc_feature (8)..(324): Homolog of NCBI NO: 7485048 NR Description: hypothetical protein - Arabidopsis thaliana
  misc_feature (29)..(293): Homolog of NCBI NO: 38344261 NR Description: OSJNBa0008M17.14 [Oryza sativa (japonica
  misc_feature (78)..(300): Homolog of NCBI NO: 34909876 NR Description: B1143G03.2 [Oryza sativa (japonica
  misc_feature (1)..(275): Homolog of NCBI NO: 34909876 NR Description: B1143G03.2 [Oryza sativa (japonica
  misc_feature (24)..(352): Homolog of NCBI NO: 18414476 NR Description: Expressed protein
  misc_feature (29)..(350): Homolog of NCBI NO: 15222835 NR Description: hypothetical protein; protein id: At1g56080.1
  misc_feature (26)..(353): Homolog of NCBI NO: 30684901 NR Description: expressed protein [Arabidopsis thaliana]
  misc_feature (102)..(102): Xaa is any aa, unknown or other
MALSPTPTAVAAPPPEPGPEPAPSAELPLPDAIAAALPPDPYEQLEVARKITAVAVASRASRLELEAARLRQRLADRDRLAAELADRAAKLEQALRDADARXRSALDDNAKLAKERDSLAQTSKKLARDLAKLETFKRHLMQSLGDDNSQTHHQETVDIRTYEQSVAKANSWKDGLEKNSHPVSSLSDESVEADSVNQEVTTRPFEQKLTITHITPRLTSDPAPKLRTAATSPRRYSTAVSPKLASGATSPRLEGHMAMSPWLPSSKMSSAANSPPRGQSISGRGTRVDGKEFFRQARHRLSYEQFAAFLSNIKELNAHRQSREETLRKADEIFGAENMDLFRSFQGLLSRSLS

SEQ ID NO: 20044 - protein, 214 aa, Zea mays subsp. mays
  peptide (1)..(214): Ceres Seq. ID no. 12383375
  misc_feature (1)..(57): Homolog of NCBI NO: 23613663 NR Description: hypothetical protein, conserved [Plasmodium
  misc_feature (1)..(102): Homolog of NCBI NO: 25404089 NR Description: hypothetical protein T6H22.12 [imported] -
  misc_feature (1)..(214): Homolog of NCBI NO: 38344261 NR Description: OSJNBa0008M17.14 [Oryza sativa (japonica
  misc_feature (1)..(184): Homolog of NCBI NO: 7485048 NR Description: hypothetical protein - Arabidopsis thaliana
  misc_feature (1)..(153): Homolog of NCBI NO: 38344261 NR Description: OSJNBa0008M17.14 [Oryza sativa (japonica
  misc_feature (1)..(160): Homolog of NCBI NO: 34909876 NR Description: B1143G03.2 [Oryza sativa (japonica
  misc_feature (1)..(135): Homolog of NCBI NO: 34909876 NR Description: B1143G03.2 [Oryza sativa (japonica
  misc_feature (1)..(212): Homolog of NCBI NO: 18414476 NR Description: Expressed protein
  misc_feature (1)..(210): Homolog of NCBI NO: 15222835 NR Description: hypothetical protein; protein id: At1g56080.1
  misc_feature (1)..(213): Homolog of NCBI NO: 30684901 NR Description: expressed protein [Arabidopsis thaliana]
MQSLGDDNSQTHHQETVDIRTYEQSVAKANSWKDGLEKNSHPVSSLSDESVEADSVNQEVTTRPFEQKLTITHITPRLTSDPAPKLRTAATSPRRYSTAVSPKLASGATSPRLEGHMAMSPWLPSSKMSSAANSPPRGQSISGRGTRVDGKEFFRQARHRLSYEQFAAFLSNIKELNAHRQSREETLRKADEIFGAENMDLFRSFQGLLSRSLS

SEQ ID NO: 20045 - DNA, 1909 bp, Zea mays subsp. mays
  misc_feature (1)..(1909): Ceres Seq. ID no. 12435641
  misc_feature: MA Experiment ID: 108522 Result: Up-regulated in Transcription
  misc_feature: MA Experiment 108522 PARAMETER Experiment Name: Zm_42deg_Heat_P Parameter: Age (day) Value: 8
  misc_feature: MA Experiment 108522 PARAMETER Experiment Name: Zm_42deg_Heat_P Parameter: Organism Value: Zea mays
  misc_feature: MA Experiment 108522 PARAMETER Experiment Name: Zm_42deg_Heat_P Parameter: Plant Line Value: 35A19
  misc_feature: MA Experiment 108522 PARAMETER Experiment Name: Zm_42deg_Heat_P Parameter: Temperature (deg C) Value: 42 vs. 22
  misc_feature: MA Experiment 108522 PARAMETER Experiment Name: Zm_42deg_Heat_P Parameter: Timepoint (hr) Value: 1
  misc_feature: MA Experiment 108522 PARAMETER Experiment Name: Zm_42deg_Heat_P Parameter: Tissue Value: Aerial
  misc_feature: MA Experiment ID: 108527 Result: Up-regulated in Transcription
  misc_feature: MA Experiment 108527 PARAMETER Experiment Name: Zm_5mM_NO_P Parameter: Age (day) Value: 8
  misc_feature: MA Experiment 108527 PARAMETER Experiment Name: Zm_5mM_NO_P Parameter: Organism Value: Zea mays
  misc_feature: MA Experiment 108527 PARAMETER Experiment Name: Zm_5mM_NO_P Parameter: Plant Line Value: 35A19
  misc_feature: MA Experiment 108527 PARAMETER Experiment Name: Zm_5mM_NO_P Parameter: Timepoint (hr) Value: 6
  misc_feature: MA Experiment 108527 PARAMETER Experiment Name: Zm_5mM_NO_P Parameter: Tissue Value: Aerial
  misc_feature: MA Experiment 108527 PARAMETER Experiment Name: Zm_5mM_NO_P Parameter: Treatment Value: 5mM NO vs. No Treatment
  misc_feature: MA Experiment ID: 108543 Result: Down-regulated in Transcription
  misc_feature: MA Experiment ID: 108687 Result: Up-regulated in Transcription
  misc_feature: MA Experiment 108687 PARAMETER Experiment Name: Zm_Embryos-Flowers__P Parameter: Tissue Value: Embryo vs. Aerial+
  misc_feature: MA Experiment ID: 20000477 Result: Up-regulated in Transcription
  misc_feature: MA Experiment 20000477 PARAMETER Experiment Name: Zm_5mM_SA_P Parameter: Age (day) Value: 10
  misc_feature: MA Experiment 20000477 PARAMETER Experiment Name: Zm_5mM_SA_P Parameter: Organism Value: Zea mays
  misc_feature: MA Experiment 20000477 PARAMETER Experiment Name: Zm_5mM_SA_P Parameter: Plant Line Value: 35A19
  misc_feature: MA Experiment 20000477 PARAMETER Experiment Name: Zm_5mM_SA_P Parameter: Timepoint (hr) Value: 48
  misc_feature: MA Experiment 20000477 PARAMETER Experiment Name: Zm_5mM_SA_P Parameter: Tissue Value: Aerial
  misc_feature: MA Experiment 20000477 PARAMETER Experiment Name: Zm_5mM_SA_P Parameter: Treatment Value: 5mM SA vs. No Treatment
  misc_feature: MA Experiment ID: 20000478 Result: Up-regulated in Transcription
  misc_feature: MA Experiment 20000478 PARAMETER Experiment Name: Zm_5mM_SA_P Parameter: Age (day) Value: 11
  misc_feature: MA Experiment 20000478 PARAMETER Experiment Name: Zm_5mM_SA_P Parameter: Organism Value: Zea mays
  misc_feature: MA Experiment 20000478 PARAMETER Experiment Name: Zm_5mM_SA_P Parameter: Plant Line Value: 35A19
  misc_feature: MA Experiment 20000478 PARAMETER Experiment Name: Zm_5mM_SA_P Parameter: Timepoint (hr) Value: 72
  misc_feature: MA Experiment 20000478 PARAMETER Experiment Name: Zm_5mM_SA_P Parameter: Tissue Value: Aerial
  misc_feature: MA Experiment 20000478 PARAMETER Experiment Name: Zm_5mM_SA_P Parameter: Treatment Value: 5mM SA vs. No Treatment
  misc_feature: MA Experiment ID: 20000487 Result: Up-regulated in Transcription
  misc_feature: MA Experiment 20000487 PARAMETER Experiment Name: Zm_50mM_NH4NO3_L_to_H_P Parameter: Organism Value: Zea mays
  misc_feature: MA Experiment 20000487 PARAMETER Experiment Name: Zm_50mM_NH4NO3_L_to_H_P Parameter: Timepoint (hr) Value: 4
  misc_feature: MA Experiment 20000487 PARAMETER Experiment Name: Zm_50mM_NH4NO3_L_to_H_P Parameter: Tissue Value: Leaves
  misc_feature: MA Experiment 20000487 PARAMETER Experiment Name: Zm_50mM_NH4NO3_L_to_H_P Parameter: Treatment Value: 50mM NH4NO3 vs. 100mM Mannitol
  misc_feature: MA Experiment ID: 20000492 Result: Up-regulated in Transcription
  misc_feature: MA Experiment 20000492 PARAMETER Experiment Name: Zm_Hybrid_Seed_Dev_P Parameter: DAP Value: 12
  misc_feature: MA Experiment 20000492 PARAMETER Experiment Name: Zm_Hybrid_Seed_Dev_P Parameter: Organism Value: Zea mays
  misc_feature: MA Experiment 20000492 PARAMETER Experiment Name: Zm_Hybrid_Seed_Dev_P Parameter: Plant Line Value: 35A19
  misc_feature: MA Experiment 20000492 PARAMETER Experiment Name: Zm_Hybrid_Seed_Dev_P Parameter: Tissue Value: Fert Kernel vs. Unfert Floret
  misc_feature: MA Experiment ID: 20000626 Result: Up-regulated in Transcription
  misc_feature: MA Experiment 20000626 PARAMETER Experiment Name: Zm_Herbicide-Treatments_P Parameter: Timepoint (hr) Value: 12
  misc_feature: MA Experiment 20000626 PARAMETER Experiment Name: Zm_Herbicide-Treatments_P Parameter: Tissue Value: Aerial
  misc_feature: MA Experiment 20000626 PARAMETER Experiment Name: Zm_Herbicide-Treatments_P Parameter: Treatment Value: Roundup vs. No Treatment
atgcatcgggaacccttacacaggtagataccacaaccctgtgcagagttcttgcattctcgtcaaggtgacaggaacgacataggaaatggaggccaccctgtgcccaaagccccatttcgtggtcatcccatggccagccaccagccacatgatccccatcgtggacatcggctgcctcctcgccgcgcacggcgccgcggtcacgatcatcaccacgccctccagctcgcaactcgtccagagccgcgtggaccgcgccgggcaaggctcagcgggggtcacggtcaccgcgatcccgttcccgggcgcggaggccggcctgccggacggctgcgagaggacggaccacatcccctcccctgacctcgtgcccaacttcttcgtcgccaccgcgcggttcggcgaggccgtggcgcggcactgccgccgcctgcccacggccacggcggcgcacccccggccgagctgcgtcgtcgccgggatgtgccacacgtgggcgcacggcgtggcgcgcgagctcggcgccccctgcttcatcttccacggcttctgcgcgttcgctctgctgtgctgcgagtacctcaacacgcacaggccgcacgaggcggtcgggtcgccggacgagctcttcgacctccccgccctgccgccgttcgagttcaggttcgccaggaggcagctgccgatccacttccagccgtcttcctccatcccggaggaccgccaccgggagctccggaagttcgagctggccgtggacggcatcgtcgtgaacagcttcgaggagctggagcacggctcggtttcgcgcctcgcggcggccacgggcaaggccgtgctctccgtcggccccgtctcgctgtgcggcgccgccgcacctcctagcctcctcgactcgcgggccaactcggacgatgccaggctgtgcatggcgtggctggacgccaagagagccgactccgttctctacgtcagcttcggcagcgccgggcgcatgcctccagcgcagctgatacagctcgggctggcgctcgtgtcgtgcccctggcctgtcctttgggtcatcaagggcgcagacacgttgcccgatgacgtcaacgagtggttgcagcgcaacaccgatggaagcggcctcccggagagccagtgtcttgcgcttcgcgggtgggcgccgcaggtcgccatcctggagcacccggccgtcggcggctttctgacgcactgcgggtggggctcgacgctggagagcgtcgccgcgggcgtgcccatggccacctggccgttctccgccgagcagttcctgaacgagaagttgatcgtccacgtgcttggcatcggattgtctgtcggcgtgacgaagcccacggagagcgtgctgaccggtgccaaagacggcggtggcaaggcggacgcagatgtgggaatggaacaggtgaagcaagccttggatatgctcatggatggaggggcggatggggaggcaaggaagacgaaagctaaggaactgaaggccaaatcaaagactgctctggagcatggaggatcgtcatatatgaacctggagaagctgatacagtttggtgcttgaaaatggagtggtcgtggactcgtggtctgtttcggcacccaaacttagtttatttctccctaataaaggttaataaactaggactgcaagcaaaacgtggtacatgtaggtttcaggaacgctgcaggccgggcaaactttgtccaggattgcgagtggacaggacaggagcagaggaaaaacggcaacagaagcgacaaaatgaagagtaacaaagagccgttggattgaagatcaatgactcatgtgcgttgcctaagaattagacatatagtcatatgagcgtcttctctatgatacctgaggtttcttcgattc

SEQ ID NO: 20046 - protein, 500 aa, Zea mays subsp. mays
  peptide (1)..(500): Ceres Seq. ID no. 12435642
  misc_feature (2)..(497): Homolog of NCBI NO: 15228037 NR Description: putative glucosyl transferase
  misc_feature (7)..(497): Homolog of NCBI NO: 26450153 NR Description: putative glucosyl transferase [Arabidopsis
  misc_feature (7)..(497): Homolog of NCBI NO: 15228035 NR Description: putative glucosyl transferase; protein id:
  misc_feature (10)..(497): Homolog of NCBI NO: 34910294 NR Description: putative glucosyl transferase
  misc_feature (1)..(497): Homolog of NCBI NO: 15228031 NR Description: putative glucosyl transferase; protein id:
  misc_feature (7)..(497): Homolog of NCBI NO: 15228034 NR Description: putative glucosyl transferase
  misc_feature (10)..(497): Homolog of NCBI NO: 34910292 NR Description: putative glucosyl transferase
  misc_feature (1)..(497): Homolog of NCBI NO: 15231757 NR Description: glucosyltransferase - like protein; protein id:
  misc_feature (8)..(497): Homolog of NCBI NO: 34910296 NR Description: putative glucosyl transferase
  misc_feature (7)..(497): Homolog of NCBI NO: 22208467 NR Description: putative glucosyl transferase [Sorghum bicolor]
MEATLCPKPHFVVIPWPATSHMIPIVDIGCLLAAHGAAVTIITTPSSSQLVQSRVDRAGQGSAGVTVTAIPFPGAEAGLPDGCERTDHIPSPDLVPNFFVATARFGEAVARHCRRLPTATAAHPRPSCVVAGMCHTWAHGVARELGAPCFIFHGFCAFALLCCEYLNTHRPHEAVGSPDELFDLPALPPFEFRFARRQLPIHFQPSSSIPEDRHRELRKFELAVDGIVVNSFEELEHGSVSRLAAATGKAVLSVGPVSLCGAAAPPSLLDSRANSDDARLCMAWLDAKRADSVLYVSFGSAGRMPPAQLIQLGLALVSCPWPVLWVIKGADTLPDDVNEWLQRNTDGSGLPESQCLALRGWAPQVAILEHPAVGGFLTHCGWGSTLESVAAGVPMATWPFSAEQFLNEKLIVHVLGIGLSVGVTKPTESVLTGAKDGGGKADADVGMEQVKQALDMLMDGGADGEARKTKAKELKAKSKTALEHGGSSYMNLEKLIQFGA

SEQ ID NO: 20047 - protein, 479 aa, Zea mays subsp. mays
  peptide (1)..(479): Ceres Seq. ID no. 12435643
  misc_feature (1)..(476): Homolog of NCBI NO: 15228037 NR Description: putative glucosyl transferase
  misc_feature (1)..(476): Homolog of NCBI NO: 26450153 NR Description: putative glucosyl transferase [Arabidopsis
  misc_feature (1)..(476): Homolog of NCBI NO: 15228035 NR Description: putative glucosyl transferase; protein id:
  misc_feature (1)..(476): Homolog of NCBI NO: 34910294 NR Description: putative glucosyl transferase
  misc_feature (1)..(476): Homolog of NCBI NO: 15228031 NR Description: putative glucosyl transferase; protein id:
  misc_feature (1)..(476): Homolog of NCBI NO: 15228034 NR Description: putative glucosyl transferase
  misc_feature (1)..(476): Homolog of NCBI NO: 34910292 NR Description: putative glucosyl transferase
  misc_feature (1)..(476): Homolog of NCBI NO: 15231757 NR Description: glucosyltransferase - like protein; protein id:
  misc_feature (1)..(476): Homolog of NCBI NO: 34910296 NR Description: putative glucosyl transferase
  misc_feature (1)..(476): Homolog of NCBI NO: 22208467 NR Description: putative glucosyl transferase [Sorghum bicolor]
MIPIVDIGCLLAAHGAAVTIITTPSSSQLVQSRVDRAGQGSAGVTVTAIPFPGAEAGLPDGCERTDHIPSPDLVPNFFVATARFGEAVARHCRRLPTATAAHPRPSCVVAGMCHTWAHGVARELGAPCFIFHGFCAFALLCCEYLNTHRPHEAVGSPDELFDLPALPPFEFRFARRQLPIHFQPSSSIPEDRHRELRKFELAVDGIVVNSFEELEHGSVSRLAAATGKAVLSVGPVSLCGAAAPPSLLDSRANSDDARLCMAWLDAKRADSVLYVSFGSAGRMPPAQLIQLGLALVSCPWPVLWVIKGADTLPDDVNEWLQRNTDGSGLPESQCLALRGWAPQVAILEHPAVGGFLTHCGWGSTLESVAAGVPMATWPFSAEQFLNEKLIVHVLGIGLSVGVTKPTESVLTGAKDGGGKADADVGMEQVKQALDMLMDGGADGEARKTKAKELKAKSKTALEHGGSSYMNLEKLIQFGA

SEQ ID NO: 20048 - protein, 368 aa, Zea mays subsp. mays
  peptide (1)..(368): Ceres Seq. ID no. 12435644
  misc_feature (1)..(365): Homolog of NCBI NO: 34910296 NR Description: putative glucosyl transferase
  misc_feature (1)..(365): Homolog of NCBI NO: 22208467 NR Description: putative glucosyl transferase [Sorghum bicolor]
  misc_feature (1)..(365): Homolog of NCBI NO: 15228037 NR Description: putative glucosyl transferase
  misc_feature (1)..(365): Homolog of NCBI NO: 26450153 NR Description: putative glucosyl transferase [Arabidopsis
  misc_feature (1)..(365): Homolog of NCBI NO: 15228035 NR Description: putative glucosyl transferase; protein id:
  misc_feature (1)..(365): Homolog of NCBI NO: 34910294 NR Description: putative glucosyl transferase
  misc_feature (1)..(365): Homolog of NCBI NO: 15228031 NR Description: putative glucosyl transferase; protein id:
  misc_feature (1)..(365): Homolog of NCBI NO: 15228034 NR Description: putative glucosyl transferase
  misc_feature (1)..(365): Homolog of NCBI NO: 34910292 NR Description: putative glucosyl transferase
  misc_feature (1)..(365): Homolog of NCBI NO: 15231757 NR Description: glucosyltransferase - like protein; protein id:
MCHTWAHGVARELGAPCFIFHGFCAFALLCCEYLNTHRPHEAVGSPDELFDLPALPPFEFRFARRQLPIHFQPSSSIPEDRHRELRKFELAVDGIVVNSFEELEHGSVSRLAAATGKAVLSVGPVSLCGAAAPPSLLDSRANSDDARLCMAWLDAKRADSVLYVSFGSAGRMPPAQLIQLGLALVSCPWPVLWVIKGADTLPDDVNEWLQRNTDGSGLPESQCLALRGWAPQVAILEHPAVGGFLTHCGWGSTLESVAAGVPMATWPFSAEQFLNEKLIVHVLGIGLSVGVTKPTESVLTGAKDGGGKADADVGMEQVKQALDMLMDGGADGEARKTKAKELKAKSKTALEHGGSSYMNLEKLIQFGA

SEQ ID NO: 20049 - DNA, 989 bp, Zea mays subsp. mays; identical to SEQ ID NO: 18479
  misc_feature (1)..(989): Ceres Seq. ID no. 12378246
  misc_feature: MA Experiment ID: 108528 Result: Up-regulated in Transcription
  misc_feature: MA Experiment 108528 PARAMETER Experiment Name: Zm_Imbibed_Seeds_P Parameter: Age (day) Value: 5 vs. 2
  misc_feature: MA Experiment 108528 PARAMETER Experiment Name: Zm_Imbibed_Seeds_P Parameter: Organism Value: Zea mays
  misc_feature: MA Experiment 108528 PARAMETER Experiment Name: Zm_Imbibed_Seeds_P Parameter: Plant Line Value: 35A19
  misc_feature: MA Experiment 108528 PARAMETER Experiment Name: Zm_Imbibed_Seeds_P Parameter: Tissue Value: Aerial vs. Embryo
  misc_feature: MA Experiment ID: 108530 Result: Up-regulated in Transcription
  misc_feature: MA Experiment 108530 PARAMETER Experiment Name: Zm_Imbibed_Seeds_P Parameter: Age (day) Value: 6 vs. 2
  misc_feature: MA Experiment 108530 PARAMETER Experiment Name: Zm_Imbibed_Seeds_P Parameter: Organism Value: Zea mays
  misc_feature: MA Experiment 108530 PARAMETER Experiment Name: Zm_Imbibed_Seeds_P Parameter: Plant Line Value: 35A19
  misc_feature: MA Experiment 108530 PARAMETER Experiment Name: Zm_Imbibed_Seeds_P Parameter: Tissue Value: Aerial vs. Embryo
  misc_feature: MA Experiment ID: 108534 Result: Up-regulated in Transcription
  misc_feature: MA Experiment 108534 PARAMETER Experiment Name: Zm_4deg_Cold_P Parameter: Age (hr) Value: 8
  misc_feature: MA Experiment 108534 PARAMETER Experiment Name: Zm_4deg_Cold_P Parameter: Organism Value: Zea mays
  misc_feature: MA Experiment 108534 PARAMETER Experiment Name: Zm_4deg_Cold_P Parameter: Plant Line Value: 35A19
  misc_feature: MA Experiment 108534 PARAMETER Experiment Name: Zm_4deg_Cold_P Parameter: Temperature (deg C) Value: 4 vs. 22
  misc_feature: MA Experiment 108534 PARAMETER Experiment Name: Zm_4deg_Cold_P Parameter: Timepoint (hr) Value: 6
  misc_feature: MA Experiment 108534 PARAMETER Experiment Name: Zm_4deg_Cold_P Parameter: Tissue Value: Aerial
  misc_feature: MA Experiment ID: 108536 Result: Down-regulated in Transcription
  misc_feature: MA Experiment 108536 PARAMETER Experiment Name: Zm_Meristem_P Parameter: Age (day) Value: 8
  misc_feature: MA Experiment 108536 PARAMETER Experiment Name: Zm_Meristem_P Parameter: Organism Value: Zea mays
  misc_feature: MA Experiment 108536 PARAMETER Experiment Name: Zm_Meristem_P Parameter: Plant Line Value: 35A19
  misc_feature: MA Experiment 108536 PARAMETER Experiment Name: Zm_Meristem_P Parameter: Tissue Value: Shoot Meristem vs. Above Shoot Meristem
  misc_feature: MA Experiment ID: 108545 Result: Up-regulated in Transcription
  misc_feature: MA Experiment 108545 PARAMETER Experiment Name: Zm_Imbibed_Seeds_P Parameter: Age (day) Value: 3 vs. 2
  misc_feature: MA Experiment 108545 PARAMETER Experiment Name: Zm_Imbibed_Seeds_P Parameter: Organism Value: Zea mays
  misc_feature: MA Experiment 108545 PARAMETER Experiment Name: Zm_Imbibed_Seeds_P Parameter: Plant Line Value: 35A19
  misc_feature: MA Experiment 108545 PARAMETER Experiment Name: Zm_Imbibed_Seeds_P Parameter: Tissue Value: Aerial vs. Embryo
  misc_feature: MA Experiment ID: 108547 Result: Up-regulated in Transcription
  misc_feature: MA Experiment 108547 PARAMETER Experiment Name: Zm_Imbibed_Seeds_P Parameter: Age (day) Value: 4 vs. 2
  misc_feature: MA Experiment 108547 PARAMETER Experiment Name: Zm_Imbibed_Seeds_P Parameter: Organism Value: Zea mays
  misc_feature: MA Experiment 108547 PARAMETER Experiment Name: Zm_Imbibed_Seeds_P Parameter: Plant Line Value: 35A19
  misc_feature: MA Experiment 108547 PARAMETER Experiment Name: Zm_Imbibed_Seeds_P Parameter: Tissue Value: Aerial vs. Embryo
  misc_feature: MA Experiment ID: 108556 Result: Down-regulated in Transcription
  misc_feature: MA Experiment 108556 PARAMETER Experiment Name: Zm_Drought_P Parameter: Age (day) Value: 9
  misc_feature: MA Experiment 108556 PARAMETER Experiment Name: Zm_Drought_P Parameter: Organism Value: Zea mays
  misc_feature: MA Experiment 108556 PARAMETER Experiment Name: Zm_Drought_P Parameter: Plant Line Value: 35A19
  misc_feature: MA Experiment 108556 PARAMETER Experiment Name: Zm_Drought_P Parameter: Timepoint (hr) Value: 24
  misc_feature: MA Experiment 108556 PARAMETER Experiment Name: Zm_Drought_P Parameter: Tissue Value: Aerial
  misc_feature: MA Experiment 108556 PARAMETER Experiment Name: Zm_Drought_P Parameter: Treatment Value: Drought vs. No Drought
  misc_feature: MA Experiment ID: 108687 Result: Down-regulated in Transcription
  misc_feature: MA Experiment 108687 PARAMETER Experiment Name: Zm_Embryos-Flowers__P Parameter: Tissue Value: Embryo vs. Aerial+
  misc_feature: MA Experiment ID: 20000478 Result: Down-regulated in Transcription
  misc_feature: MA Experiment 20000478 PARAMETER Experiment Name: Zm_5mM_SA_P Parameter: Age (day) Value: 11
  misc_feature: MA Experiment 20000478 PARAMETER Experiment Name: Zm_5mM_SA_P Parameter: Organism Value: Zea mays
  misc_feature: MA Experiment 20000478 PARAMETER Experiment Name: Zm_5mM_SA_P Parameter: Plant Line Value: 35A19
  misc_feature: MA Experiment 20000478 PARAMETER Experiment Name: Zm_5mM_SA_P Parameter: Timepoint (hr) Value: 72
  misc_feature: MA Experiment 20000478 PARAMETER Experiment Name: Zm_5mM_SA_P Parameter: Tissue Value: Aerial
  misc_feature: MA Experiment 20000478 PARAMETER Experiment Name: Zm_5mM_SA_P Parameter: Treatment Value: 5mM SA vs. No Treatment
  misc_feature: MA Experiment ID: 20000479 Result: Down-regulated in Transcription
  misc_feature: MA Experiment 20000479 PARAMETER Experiment Name: Zm_Drought_P Parameter: Age (day) Value: 10
  misc_feature: MA Experiment 20000479 PARAMETER Experiment Name: Zm_Drought_P Parameter: Organism Value: Zea mays
  misc_feature: MA Experiment 20000479 PARAMETER Experiment Name: Zm_Drought_P Parameter: Plant Line Value: 35A19
  misc_feature: MA Experiment 20000479 PARAMETER Experiment Name: Zm_Drought_P Parameter: Timepoint (hr) Value: 48
  misc_feature: MA Experiment 20000479 PARAMETER Experiment Name: Zm_Drought_P Parameter: Tissue Value: Aerial
  misc_feature: MA Experiment 20000479 PARAMETER Experiment Name: Zm_Drought_P Parameter: Treatment Value: Drought vs. No Drought
  misc_feature: MA Experiment ID: 20000480 Result: Down-regulated in Transcription
  misc_feature: MA Experiment 20000480 PARAMETER Experiment Name: Zm_Drought_P Parameter: Age (day) Value: 11
  misc_feature: MA Experiment 20000480 PARAMETER Experiment Name: Zm_Drought_P Parameter: Organism Value: Zea mays
  misc_feature: MA Experiment 20000480 PARAMETER Experiment Name: Zm_Drought_P Parameter: Plant Line Value: 35A19
  misc_feature: MA Experiment 20000480 PARAMETER Experiment Name: Zm_Drought_P Parameter: Timepoint (hr) Value: 72
  misc_feature: MA Experiment 20000480 PARAMETER Experiment Name: Zm_Drought_P Parameter: Tissue Value: Aerial
  misc_feature: MA Experiment 20000480 PARAMETER Experiment Name: Zm_Drought_P Parameter: Treatment Value: Drought vs. No Drought

SEQ ID NO: 20050 - protein, 319 aa, Zea mays subsp. mays; identical to SEQ ID NO: 18480
  peptide (1)..(319): Ceres Seq. ID no. 12378247

SEQ ID NO: 20051 - protein, 245 aa, Zea mays subsp. mays; identical to SEQ ID NO: 18481
  peptide (1)..(245): Ceres Seq. ID no. 12378248
  misc_feature (28)..(243): Pfam Name: Dienelactone hydrolase family Pfam Description: Dienelactone hydrolase family
  misc_feature (28)..(243): Pfam Name: Dienelactone hydrolase family Pfam Description: Dienelactone hydrolase family
  misc_feature (8)..(243): Homolog of NCBI NO: 40253306 NR Description: putative Endo-1,3;1,4-beta-D-glucanase precursor
  misc_feature (29)..(243): Homolog of NCBI NO: 40253303 NR Description: putative Endo-1,3;1,4-beta-D-glucanase precursor
  misc_feature (26)..(243): Homolog of NCBI NO: 18676733 NR Description: unnamed protein product [Homo sapiens]
  misc_feature (26)..(243): Homolog of NCBI NO: 20270371 NR Description: hypothetical protein BC001573 [Homo sapiens]
  misc_feature (29)..(243): Homolog of NCBI NO: 40253303 NR Description: putative Endo-1,3;1,4-beta-D-glucanase precursor
  misc_feature (26)..(243): Homolog of NCBI NO: 20270371 NR Description: hypothetical protein BC001573 [Homo sapiens]
  misc_feature (5)..(244): Homolog of NCBI NO: 21553574 NR Description: unknown [Arabidopsis thaliana]
  misc_feature (5)..(244): Homolog of NCBI NO: 18399662 NR Description: expressed protein
  misc_feature (26)..(243): Homolog of NCBI NO: 34854915 NR Description: similar to Ab2-225 [Rattus norvegicus]
  misc_feature (26)..(243): Homolog of NCBI NO: 18676733 NR Description: unnamed protein product [Homo sapiens]
  misc_feature (8)..(243): Homolog of NCBI NO: 40253306 NR Description: putative Endo-1,3;1,4-beta-D-glucanase precursor
  misc_feature (26)..(243): Homolog of NCBI NO: 34854915 NR Description: similar to Ab2-225 [Rattus norvegicus]
  misc_feature (5)..(244): Homolog of NCBI NO: 21553574 NR Description: unknown [Arabidopsis thaliana]
  misc_feature (5)..(244): Homolog of NCBI NO: 18399662 NR Description: expressed protein

SEQ ID NO: 20052 - DNA, 1101 bp, Zea mays subsp. mays
  misc_feature (1)..(1101): Ceres Seq. ID no. 13600500
  misc_feature: MA Experiment ID: 108535 Result: Down-regulated in Transcription
  misc_feature: MA Experiment 108535 PARAMETER Experiment Name: Zm_Meristem_P Parameter: Age (day) Value: 8
  misc_feature: MA Experiment 108535 PARAMETER Experiment Name: Zm_Meristem_P Parameter: Organism Value: Zea mays
  misc_feature: MA Experiment 108535 PARAMETER Experiment Name: Zm_Meristem_P Parameter: Plant Line Value: 35A19
  misc_feature: MA Experiment 108535 PARAMETER Experiment Name: Zm_Meristem_P Parameter: Tissue Value: Root Meristem vs. Above Root Meristem
  misc_feature: MA Experiment ID: 108543 Result: Up-regulated in Transcription
  misc_feature: MA Experiment ID: 108544 Result: Up-regulated in Transcription
  misc_feature: MA Experiment ID: 20000487 Result: Down-regulated in Transcription
  misc_feature: MA Experiment 20000487 PARAMETER Experiment Name: Zm_50mM_NH4NO3_L_to_H_P Parameter: Organism Value: Zea mays
  misc_feature: MA Experiment 20000487 PARAMETER Experiment Name: Zm_50mM_NH4NO3_L_to_H_P Parameter: Timepoint (hr) Value: 4
  misc_feature: MA Experiment 20000487 PARAMETER Experiment Name: Zm_50mM_NH4NO3_L_to_H_P Parameter: Tissue Value: Leaves
  misc_feature: MA Experiment 20000487 PARAMETER Experiment Name: Zm_50mM_NH4NO3_L_to_H_P Parameter: Treatment Value: 50mM NH4NO3 vs. 100mM Mannitol
  misc_feature: MA Experiment ID: 20000488 Result: Down-regulated in Transcription
  misc_feature: MA Experiment 20000488 PARAMETER Experiment Name: Zm_50mM_NH4NO3_L_to_H_P Parameter: Organism Value: Zea mays
  misc_feature: MA Experiment 20000488 PARAMETER Experiment Name: Zm_50mM_NH4NO3_L_to_H_P Parameter: Timepoint (hr) Value: 8
  misc_feature: MA Experiment 20000488 PARAMETER Experiment Name: Zm_50mM_NH4NO3_L_to_H_P Parameter: Tissue Value: Leaves
  misc_feature: MA Experiment 20000488 PARAMETER Experiment Name: Zm_50mM_NH4NO3_L_to_H_P Parameter: Treatment Value: 50mM NH4NO3 vs. 100mM Mannitol
  misc_feature: MA Experiment ID: 20001606 Result: Down-regulated in Transcription
  misc_feature: MA Experiment 20001606 PARAMETER Experiment Name: Zm_50ppm_KNO3_L-to-H_P Parameter: Age (day) Value: 19
  misc_feature: MA Experiment 20001606 PARAMETER Experiment Name: Zm_50ppm_KNO3_L-to-H_P Parameter: Organism Value: Zea mays
  misc_feature: MA Experiment 20001606 PARAMETER Experiment Name: Zm_50ppm_KNO3_L-to-H_P Parameter: Plant Line Value: 35A19
  misc_feature: MA Experiment 20001606 PARAMETER Experiment Name: Zm_50ppm_KNO3_L-to-H_P Parameter: Timepoint (hr) Value: 8
  misc_feature: MA Experiment 20001606 PARAMETER Experiment Name: Zm_50ppm_KNO3_L-to-H_P Parameter: Tissue Value: Shoots
  misc_feature: MA Experiment 20001606 PARAMETER Experiment Name: Zm_50ppm_KNO3_L-to-H_P Parameter: Treatment Value: 50ppm KNO3 vs. 50ppm KCl
  misc_feature: MA Experiment ID: 20001613 Result: Down-regulated in Transcription
  misc_feature: MA Experiment 20001613 PARAMETER Experiment Name: Zm_50ppm_KNO3_L-to-H_P Parameter: Age (day) Value: 20
  misc_feature: MA Experiment 20001613 PARAMETER Experiment Name: Zm_50ppm_KNO3_L-to-H_P Parameter: Organism Value: Zea mays
  misc_feature: MA Experiment 20001613 PARAMETER Experiment Name: Zm_50ppm_KNO3_L-to-H_P Parameter: Plant Line Value: 35A19
  misc_feature: MA Experiment 20001613 PARAMETER Experiment Name: Zm_50ppm_KNO3_L-to-H_P Parameter: Timepoint (hr) Value: 24
  misc_feature: MA Experiment 20001613 PARAMETER Experiment Name: Zm_50ppm_KNO3_L-to-H_P Parameter: Tissue Value: Roots
  misc_feature: MA Experiment 20001613 PARAMETER Experiment Name: Zm_50ppm_KNO3_L-to-H_P Parameter: Treatment Value: 50ppm KNO3 vs. 50ppm KCl
tggattgactggtttgcagacgtggaaatacccaattcctcagggtgaaatacatcatgtcatgaaccctgatccttatcgggggactttcgggtctgatgctgcagcttatgctaaggaagtcgaagaacacataacttatggaagttcaggaagggttgcaggcttcattgcagaaacattccaaggtgtgggaggtgctgttgaactagctcctggatacctaaagttagcttatgacattgtgcgcaaggctggtggcgtttgtattgctgatgaagtccagagtggttttggccgtactggcagtcattactggggattccagacacaaggtgtcattcctgacatagtcaccatggcaaagggaattggcaatggcctaccattgggggcagttgtgacaactcctgagattgcaagtgtgttagctcaaaaaatccaatttaacacatttggtggaaatccagtttgttctgctggtgggttagctgtgcttaaggttcttgacaaggagaaacgccaggcacattgtgctgatgttggatctcacttgttggagcgtctaaaatcgcttcaggagaagcacgaaatcataggtgatgttagaggaaggggactgatgcttggggtggaactcgttacgggcagaaaggagaagacccctgccaagtcagaaaccattgaactgtttgagaagctcagagatctcggggtactagttggaaagggcggtctgcatcgtaacgtcttcagaataaaaccaccgatgtgcttttcgaaggacgatgcagacttcttggtggactccatggactacgcaatgtcaaggctctgaaggaacatgctctgagttgacaatgtgtctgcgtggaaacaacacttcctgcaaccgcaagatgcatggcctgaaatgaaactgaaaggcagatgatttaatgggcatgctccccgggtggtatgttggtgttatggtgaagtttaatagtccccctcccccgaataaattgatgaaaggggacagaacgtcttgcccagcttgtgaactgtttgtagaagaactgcagttaataaatagaatagcgagcaagcaagcgtgat

SEQ ID NO: 20053 - protein, 278 aa, Zea mays subsp. mays
  peptide (1)..(278): Ceres Seq. ID no. 13600501
  misc_feature (1)..(278): Pfam Name: Aminotransferase class-III Pfam Description: Aminotransferase class-III
  misc_feature (37)..(269): Homolog of NCBI NO: 39595899 NR Description: Hypothetical protein CBG12888 [Caenorhabditis
  misc_feature (49)..(263): Homolog of NCBI NO: 31239473 NR Description: ENSANGP00000008948 [Anopheles gambiae]
  misc_feature (29)..(276): Homolog of NCBI NO: 28574759 NR Description: CG11241-PA [Drosophila melanogaster]
  misc_feature (29)..(276): Homolog of NCBI NO: 16198011 NR Description: LD24726p [Drosophila melanogaster]
  misc_feature (1)..(278): Homolog of NCBI NO: 15028237 NR Description: putative beta-alanine-pyruvate aminotransferase
  misc_feature (1)..(278): Homolog of NCBI NO: 15224499 NR Description: alanine--glyoxylate aminotransferase
  misc_feature (47)..(268): Homolog of NCBI NO: 7434175 NR Description: hypothetical protein T19P19.50 - Arabidopsis
  misc_feature (1)..(278): Homolog of NCBI NO: 15231974 NR Description: alanine--glyoxylate aminotransferase
  misc_feature (1)..(278): Homolog of NCBI NO: 18420498 NR Description: alanine--glyoxylate aminotransferase
  misc_feature (1)..(278): Homolog of NCBI NO: 5731259 NR Description: alanine:glyoxylate aminotransferase 2 homolog
GLTGLQTWKYPIPQGEIHHVMNPDPYRGTFGSDAAAYAKEVEEHITYGSSGRVAGFIAETFQGVGGAVELAPGYLKLAYDIVRKAGGVCIADEVQSGFGRTGSHYWGFQTQGVIPDIVTMAKGIGNGLPLGAVVTTPEIASVLAQKIQFNTFGGNPVCSAGGLAVLKVLDKEKRQAHCADVGSHLLERLKSLQEKHEIIGDVRGRGLMLGVELVTGRKEKTPAKSETIELFEKLRDLGVLVGKGGLHRNVFRIKPPMCFSKDDADFLVDSMDYAMSRL

SEQ ID NO: 20054 - protein, 258 aa, Zea mays subsp. mays
  peptide (1)..(258): Ceres Seq. ID no. 13600502
  misc_feature (1)..(258): Pfam Name: Aminotransferase class-III Pfam Description: Aminotransferase class-III
  misc_feature (17)..(249): Homolog of NCBI NO: 39595899 NR Description: Hypothetical protein CBG12888 [Caenorhabditis
  misc_feature (29)..(243): Homolog of NCBI NO: 31239473 NR Description: ENSANGP00000008948 [Anopheles gambiae]
  misc_feature (9)..(256): Homolog of NCBI NO: 28574759 NR Description: CG11241-PA [Drosophila melanogaster]
  misc_feature (9)..(256): Homolog of NCBI NO: 16198011 NR Description: LD24726p [Drosophila melanogaster]
  misc_feature (1)..(258): Homolog of NCBI NO: 15028237 NR Description: putative beta-alanine-pyruvate aminotransferase
  misc_feature (1)..(258): Homolog of NCBI NO: 15224499 NR Description: alanine--glyoxylate aminotransferase
  misc_feature (27)..(248): Homolog of NCBI NO: 7434175 NR Description: hypothetical protein T19P19.50 - Arabidopsis
  misc_feature (1)..(258): Homolog of NCBI NO: 15231974 NR Description: alanine--glyoxylate aminotransferase
  misc_feature (1)..(258): Homolog of NCBI NO: 18420498 NR Description: alanine--glyoxylate aminotransferase
  misc_feature (1)..(258): Homolog of NCBI NO: 5731259 NR Description: alanine:glyoxylate aminotransferase 2 homolog
MNPDPYRGTFGSDAAAYAKEVEEHITYGSSGRVAGFIAETFQGVGGAVELAPGYLKLAYDIVRKAGGVCIADEVQSGFGRTGSHYWGFQTQGVIPDIVTMAKGIGNGLPLGAVVTTPEIASVLAQKIQFNTFGGNPVCSAGGLAVLKVLDKEKRQAHCADVGSHLLERLKSLQEKHEIIGDVRGRGLMLGVELVTGRKEKTPAKSETIELFEKLRDLGVLVGKGGLHRNVFRIKPPMCFSKDDADFLVDSMDYAMSRL

SEQ ID NO: 20055 - protein, 159 aa, Zea mays subsp. mays
  peptide (1)..(159): Ceres Seq. ID no. 13600503
  misc_feature (1)..(159): Pfam Name: Aminotransferase class-III Pfam Description: Aminotransferase class-III
  misc_feature (1)..(150): Homolog of NCBI NO: 39595899 NR Description: Hypothetical protein CBG12888 [Caenorhabditis
  misc_feature (1)..(144): Homolog of NCBI NO: 31239473 NR Description: ENSANGP00000008948 [Anopheles gambiae]
  misc_feature (1)..(157): Homolog of NCBI NO: 28574759 NR Description: CG11241-PA [Drosophila melanogaster]
  misc_feature (1)..(157): Homolog of NCBI NO: 16198011 NR Description: LD24726p [Drosophila melanogaster]
  misc_feature (1)..(159): Homolog of NCBI NO: 15028237 NR Description: putative beta-alanine-pyruvate aminotransferase
  misc_feature (1)..(159): Homolog of NCBI NO: 15224499 NR Description: alanine--glyoxylate aminotransferase
  misc_feature (1)..(149): Homolog of NCBI NO: 7434175 NR Description: hypothetical protein T19P19.50 - Arabidopsis
  misc_feature (1)..(159): Homolog of NCBI NO: 15231974 NR Description: alanine--glyoxylate aminotransferase
  misc_feature (1)..(159): Homolog of NCBI NO: 18420498 NR Description: alanine--glyoxylate aminotransferase
  misc_feature (1)..(159): Homolog of NCBI NO: 5731259 NR Description: alanine:glyoxylate aminotransferase 2 homolog
MAKGIGNGLPLGAVVTTPEIASVLAQKIQFNTFGGNPVCSAGGLAVLKVLDKEKRQAHCADVGSHLLERLKSLQEKHEIIGDVRGRGLMLGVELVTGRKEKTPAKSETIELFEKLRDLGVLVGKGGLHRNVFRIKPPMCFSKDDADFLVDSMDYAMSRL

SEQ ID NO: 20056 - DNA, 497 bp, Zea mays subsp. mays
  misc_feature (1)..(497): Ceres Seq. ID no. 12589112
  misc_feature: MA Experiment ID: 108528 Result: Up-regulated in Transcription
  misc_feature: MA Experiment 108528 PARAMETER Experiment Name: Zm_Imbibed_Seeds_P Parameter: Age (day) Value: 5 vs. 2
  misc_feature: MA Experiment 108528 PARAMETER Experiment Name: Zm_Imbibed_Seeds_P Parameter: Organism Value: Zea mays
  misc_feature: MA Experiment 108528 PARAMETER Experiment Name: Zm_Imbibed_Seeds_P Parameter: Plant Line Value: 35A19
  misc_feature: MA Experiment 108528 PARAMETER Experiment Name: Zm_Imbibed_Seeds_P Parameter: Tissue Value: Aerial vs. Embryo
  misc_feature: MA Experiment ID: 108530 Result: Up-regulated in Transcription
  misc_feature: MA Experiment 108530 PARAMETER Experiment Name: Zm_Imbibed_Seeds_P Parameter: Age (day) Value: 6 vs. 2
  misc_feature: MA Experiment 108530 PARAMETER Experiment Name: Zm_Imbibed_Seeds_P Parameter: Organism Value: Zea mays
  misc_feature: MA Experiment 108530 PARAMETER Experiment Name: Zm_Imbibed_Seeds_P Parameter: Plant Line Value: 35A19
  misc_feature: MA Experiment 108530 PARAMETER Experiment Name: Zm_Imbibed_Seeds_P Parameter: Tissue Value: Aerial vs. Embryo
  misc_feature: MA Experiment ID: 108535 Result: Down-regulated in Transcription
  misc_feature: MA Experiment 108535 PARAMETER Experiment Name: Zm_Meristem_P Parameter: Age (day) Value: 8
  misc_feature: MA Experiment 108535 PARAMETER Experiment Name: Zm_Meristem_P Parameter: Organism Value: Zea mays
  misc_feature: MA Experiment 108535 PARAMETER Experiment Name: Zm_Meristem_P Parameter: Plant Line Value: 35A19
  misc_feature: MA Experiment 108535 PARAMETER Experiment Name: Zm_Meristem_P Parameter: Tissue Value: Root Meristem vs. Above Root Meristem
  misc_feature: MA Experiment ID: 108545 Result: Up-regulated in Transcription
  misc_feature: MA Experiment 108545 PARAMETER Experiment Name: Zm_Imbibed_Seeds_P Parameter: Age (day) Value: 3 vs. 2
  misc_feature: MA Experiment 108545 PARAMETER Experiment Name: Zm_Imbibed_Seeds_P Parameter: Organism Value: Zea mays
  misc_feature: MA Experiment 108545 PARAMETER Experiment Name: Zm_Imbibed_Seeds_P Parameter: Plant Line Value: 35A19
  misc_feature: MA Experiment 108545 PARAMETER Experiment Name: Zm_Imbibed_Seeds_P Parameter: Tissue Value: Aerial vs. Embryo
  misc_feature: MA Experiment ID: 108547 Result: Up-regulated in Transcription
  misc_feature: MA Experiment 108547 PARAMETER Experiment Name: Zm_Imbibed_Seeds_P Parameter: Age (day) Value: 4 vs. 2
  misc_feature: MA Experiment 108547 PARAMETER Experiment Name: Zm_Imbibed_Seeds_P Parameter: Organism Value: Zea mays
  misc_feature: MA Experiment 108547 PARAMETER Experiment Name: Zm_Imbibed_Seeds_P Parameter: Plant Line Value: 35A19
  misc_feature: MA Experiment 108547 PARAMETER Experiment Name: Zm_Imbibed_Seeds_P Parameter: Tissue Value: Aerial vs. Embryo
  misc_feature: MA Experiment ID: 108687 Result: Down-regulated in Transcription
  misc_feature: MA Experiment 108687 PARAMETER Experiment Name: Zm_Embryos-Flowers__P Parameter: Tissue Value: Embryo vs. Aerial+
  misc_feature: MA Experiment ID: 20000534 Result: Down-regulated in Transcription
  misc_feature: MA Experiment 20000534 PARAMETER Experiment Name: Zm_Hybrid_Pollen_P Parameter: Age (day) Value: 8
  misc_feature: MA Experiment 20000534 PARAMETER Experiment Name: Zm_Hybrid_Pollen_P Parameter: Organism Value: Zea mays
  misc_feature: MA Experiment 20000534 PARAMETER Experiment Name: Zm_Hybrid_Pollen_P Parameter: Plant Line Value: 35A19
  misc_feature: MA Experiment 20000534 PARAMETER Experiment Name: Zm_Hybrid_Pollen_P Parameter: Tissue Value: Pollen vs. Aerial
gaaaaatccccagcccaaaatgaacgccaccaccgccgtggctgcgaggcgcctcctcctcccgctccgcgcccagccgccagcaccgcggggcgcagcgccggcctcggcgcacccctggtgtcgatccgttccgcggagacgacgagtccgtgccgccccggcgcgcgcgtcgctggaccgcgccgcggtcctcctcgacaccgcggccgcggtggccaacggcgggacaggttactcgcaggcgagctactacacgtctctgggactcttcgttctctccgttccggggctgtggtccctcatcaagcgctccgtcaagtccaagattgtgcaaaagacatttgtgaaagacgatggacagtcgatggcgccaaatcaggtggctggagagatcctgtcgttcttcactcgcaataacttcaccgtctcagaccgcggtgaggtcatcacattcgagggcacaatgataccaaacagaggccaggcggcgctgc

SEQ ID NO: 20057 - protein, 165 aa, Zea mays subsp. mays
  peptide (1)..(165): Ceres Seq. ID no. 13586476
  misc_feature (78)..(151): Homolog of NCBI NO: 1402889 NR Description: unknown [Arabidopsis thaliana]
  misc_feature (78)..(164): Homolog of NCBI NO: 18405058 NR Description: expressed protein
KNPQPKMNATTAVAARRLLLPLRAQPPAPRGAAPASAHPWCRSVPRRRRVRAAPARASLDRAAVLLDTAAAVANGGTGYSQASYYTSLGLFVLSVPGLWSLIKRSVKSKIVQKTFVKDDGQSMAPNQVAGEILSFFTRNNFTVSDRGEVITFEGTMIPNRGQAAL

SEQ ID NO: 20058 - protein, 159 aa, Zea mays subsp. mays
  peptide (1)..(159): Ceres Seq. ID no. 13586477
  misc_feature (72)..(145): Homolog of NCBI NO: 1402889 NR Description: unknown [Arabidopsis thaliana]
  misc_feature (72)..(158): Homolog of NCBI NO: 18405058 NR Description: expressed protein
MNATTAVAARRLLLPLRAQPPAPRGAAPASAHPWCRSVPRRRRVRAAPARASLDRAAVLLDTAAAVANGGTGYSQASYYTSLGLFVLSVPGLWSLIKRSVKSKIVQKTFVKDDGQSMAPNQVAGEILSFFTRNNFTVSDRGEVITFEGTMIPNRGQAAL

SEQ ID NO: 20059 - protein, 139 aa, Zea mays subsp. mays
  peptide (1)..(139): Ceres Seq. ID no. 13586478
EKSPAQNERHHRRGCEAPPPPAPRPAASTAGRSAGLGAPLVSIRSAETTSPCRPGARVAGPRRGPPRHRGRGGQRRDRLLAGELLHVSGTLRSLRSGAVVPHQALRQVQDCAKDICERRWTVDGAKSGGWRDPVVLHSQ

SEQ ID NO: 20060 - DNA, 1826 bp, Zea mays subsp. mays
  misc_feature (1)..(1826): Ceres Seq. ID no. 12387680
  misc_feature: MA Experiment ID: 108522 Result: Down-regulated in Transcription
  misc_feature: MA Experiment 108522 PARAMETER Experiment Name: Zm_42deg_Heat_P Parameter: Age (day) Value: 8
  misc_feature: MA Experiment 108522 PARAMETER Experiment Name: Zm_42deg_Heat_P Parameter: Organism Value: Zea mays
  misc_feature: MA Experiment 108522 PARAMETER Experiment Name: Zm_42deg_Heat_P Parameter: Plant Line Value: 35A19
  misc_feature: MA Experiment 108522 PARAMETER Experiment Name: Zm_42deg_Heat_P Parameter: Temperature (deg C) Value: 42 vs. 22
  misc_feature: MA Experiment 108522 PARAMETER Experiment Name: Zm_42deg_Heat_P Parameter: Timepoint (hr) Value: 1
  misc_feature: MA Experiment 108522 PARAMETER Experiment Name: Zm_42deg_Heat_P Parameter: Tissue Value: Aerial
  misc_feature: MA Experiment ID: 108523 Result: Down-regulated in Transcription
  misc_feature: MA Experiment 108523 PARAMETER Experiment Name: Zm_42deg_Heat_P Parameter: Age (day) Value: 8
  misc_feature: MA Experiment 108523 PARAMETER Experiment Name: Zm_42deg_Heat_P Parameter: Organism Value: Zea mays
  misc_feature: MA Experiment 108523 PARAMETER Experiment Name: Zm_42deg_Heat_P Parameter: Plant Line Value: 35A19
  misc_feature: MA Experiment 108523 PARAMETER Experiment Name: Zm_42deg_Heat_P Parameter: Temperature (deg C) Value: 42 vs. 22
  misc_feature: MA Experiment 108523 PARAMETER Experiment Name: Zm_42deg_Heat_P Parameter: Timepoint (hr) Value: 6
  misc_feature: MA Experiment 108523 PARAMETER Experiment Name: Zm_42deg_Heat_P Parameter: Tissue Value: Aerial
  misc_feature: MA Experiment ID: 108527 Result: Down-regulated in Transcription
  misc_feature: MA Experiment 108527 PARAMETER Experiment Name: Zm_5mM_NO_P Parameter: Age (day) Value: 8
  misc_feature: MA Experiment 108527 PARAMETER Experiment Name: Zm_5mM_NO_P Parameter: Organism Value: Zea mays
  misc_feature: MA Experiment 108527 PARAMETER Experiment Name: Zm_5mM_NO_P Parameter: Plant Line Value: 35A19
  misc_feature: MA Experiment 108527 PARAMETER Experiment Name: Zm_5mM_NO_P Parameter: Timepoint (hr) Value: 6
  misc_feature: MA Experiment 108527 PARAMETER Experiment Name: Zm_5mM_NO_P Parameter: Tissue Value: Aerial
  misc_feature: MA Experiment 108527 PARAMETER Experiment Name: Zm_5mM_NO_P Parameter: Treatment Value: 5mM NO vs. No Treatment
  misc_feature: MA Experiment ID: 108528 Result: Down-regulated in Transcription
  misc_feature: MA Experiment 108528 PARAMETER Experiment Name: Zm_Imbibed_Seeds_P Parameter: Age (day) Value: 5 vs. 2
  misc_feature: MA Experiment 108528 PARAMETER Experiment Name: Zm_Imbibed_Seeds_P Parameter: Organism Value: Zea mays
  misc_feature: MA Experiment 108528 PARAMETER Experiment Name: Zm_Imbibed_Seeds_P Parameter: Plant Line Value: 35A19
  misc_feature: MA Experiment 108528 PARAMETER Experiment Name: Zm_Imbibed_Seeds_P Parameter: Tissue Value: Aerial vs. Embryo
  misc_feature: MA Experiment ID: 108529 Result: Down-regulated in Transcription
  misc_feature: MA Experiment 108529 PARAMETER Experiment Name: Zm_Imbibed_Seeds_P Parameter: Age (day) Value: 5 vs. 2
  misc_feature: MA Experiment 108529 PARAMETER Experiment Name: Zm_Imbibed_Seeds_P Parameter: Organism Value: Zea mays
  misc_feature: MA Experiment 108529 PARAMETER Experiment Name: Zm_Imbibed_Seeds_P Parameter: Plant Line Value: 35A19
  misc_feature: MA Experiment 108529 PARAMETER Experiment Name: Zm_Imbibed_Seeds_P Parameter: Tissue Value: Roots vs. Embryo
  misc_feature: MA Experiment ID: 108530 Result: Down-regulated in Transcription
  misc_feature: MA Experiment 108530 PARAMETER Experiment Name: Zm_Imbibed_Seeds_P Parameter: Age (day) Value: 6 vs. 2
  misc_feature: MA Experiment 108530 PARAMETER Experiment Name: Zm_Imbibed_Seeds_P Parameter: Organism Value: Zea mays
  misc_feature: MA Experiment 108530 PARAMETER Experiment Name: Zm_Imbibed_Seeds_P Parameter: Plant Line Value: 35A19
  misc_feature: MA Experiment 108530 PARAMETER Experiment Name: Zm_Imbibed_Seeds_P Parameter: Tissue Value: Aerial vs. Embryo
  misc_feature: MA Experiment ID: 108535 Result: Up-regulated in Transcription
  misc_feature: MA Experiment 108535 PARAMETER Experiment Name: Zm_Meristem_P Parameter: Age (day) Value: 8
  misc_feature: MA Experiment 108535 PARAMETER Experiment Name: Zm_Meristem_P Parameter: Organism Value: Zea mays
  misc_feature: MA Experiment 108535 PARAMETER Experiment Name: Zm_Meristem_P Parameter: Plant Line Value: 35A19
  misc_feature: MA Experiment 108535 PARAMETER Experiment Name: Zm_Meristem_P Parameter: Tissue Value: Root Meristem vs. Above Root Meristem
  misc_feature: MA Experiment ID: 108545 Result: Down-regulated in Transcription
  misc_feature: MA Experiment 108545 PARAMETER Experiment Name: Zm_Imbibed_Seeds_P Parameter: Age (day) Value: 3 vs. 2
  misc_feature: MA Experiment 108545 PARAMETER Experiment Name: Zm_Imbibed_Seeds_P Parameter: Organism Value: Zea mays
  misc_feature: MA Experiment 108545 PARAMETER Experiment Name: Zm_Imbibed_Seeds_P Parameter: Plant Line Value: 35A19
  misc_feature: MA Experiment 108545 PARAMETER Experiment Name: Zm_Imbibed_Seeds_P Parameter: Tissue Value: Aerial vs. Embryo
  misc_feature: MA Experiment ID: 108546 Result: Down-regulated in Transcription
  misc_feature: MA Experiment 108546 PARAMETER Experiment Name: Zm_Imbibed_Seeds_P Parameter: Age (day) Value: 3 vs. 2
  misc_feature: MA Experiment 108546 PARAMETER Experiment Name: Zm_Imbibed_Seeds_P Parameter: Organism Value: Zea mays
  misc_feature: MA Experiment 108546 PARAMETER Experiment Name: Zm_Imbibed_Seeds_P Parameter: Plant Line Value: 35A19
  misc_feature: MA Experiment 108546 PARAMETER Experiment Name: Zm_Imbibed_Seeds_P Parameter: Tissue Value: Roots vs. Embryo
  misc_feature: MA Experiment ID: 108547 Result: Down-regulated in Transcription
  misc_feature: MA Experiment 108547 PARAMETER Experiment Name: Zm_Imbibed_Seeds_P Parameter: Age (day) Value: 4 vs. 2
  misc_feature: MA Experiment 108547 PARAMETER Experiment Name: Zm_Imbibed_Seeds_P Parameter: Organism Value: Zea mays
  misc_feature: MA Experiment 108547 PARAMETER Experiment Name: Zm_Imbibed_Seeds_P Parameter: Plant Line Value: 35A19
  misc_feature: MA Experiment 108547 PARAMETER Experiment Name: Zm_Imbibed_Seeds_P Parameter: Tissue Value: Aerial vs. Embryo
  misc_feature: MA Experiment ID: 108559 Result: Down-regulated in Transcription
  misc_feature: MA Experiment 108559 PARAMETER Experiment Name: Zm_5mM_NO_P Parameter: Age (day) Value: 8
  misc_feature: MA Experiment 108559 PARAMETER Experiment Name: Zm_5mM_NO_P Parameter: Organism Value: Zea mays
  misc_feature: MA Experiment 108559 PARAMETER Experiment Name: Zm_5mM_NO_P Parameter: Plant Line Value: 35A19
  misc_feature: MA Experiment 108559 PARAMETER Experiment Name: Zm_5mM_NO_P Parameter: Timepoint (hr) Value: 12
  misc_feature: MA Experiment 108559 PARAMETER Experiment Name: Zm_5mM_NO_P Parameter: Tissue Value: Aerial
  misc_feature: MA Experiment 108559 PARAMETER Experiment Name: Zm_5mM_NO_P Parameter: Treatment Value: 5mM NO vs. No Treatment
  misc_feature: MA Experiment ID: 108597 Result: Down-regulated in Transcription
  misc_feature: MA Experiment 108597 PARAMETER Experiment Name: Zm_100uM_ABA_P Parameter: Age (day) Value: 9
  misc_feature: MA Experiment 108597 PARAMETER Experiment Name: Zm_100uM_ABA_P Parameter: Organism Value: Zea mays
  misc_feature: MA Experiment 108597 PARAMETER Experiment Name: Zm_100uM_ABA_P Parameter: Plant Line Value: 35A19
  misc_feature: MA Experiment 108597 PARAMETER Experiment Name: Zm_100uM_ABA_P Parameter: Timepoint (hr) Value: 24
  misc_feature: MA Experiment 108597 PARAMETER Experiment Name: Zm_100uM_ABA_P Parameter: Tissue Value: Aerial
  misc_feature: MA Experiment 108597 PARAMETER Experiment Name: Zm_100uM_ABA_P Parameter: Treatment Value: 100uM ABA vs. No Treatment
  misc_feature: MA Experiment ID: 20000535 Result: Down-regulated in Transcription
  misc_feature: MA Experiment 20000535 PARAMETER Experiment Name: Zm_Hybrid_Seed_Dev_P Parameter: DAP Value: 30 vs. 12
  misc_feature: MA Experiment 20000535 PARAMETER Experiment Name: Zm_Hybrid_Seed_Dev_P Parameter: Organism Value: Zea mays
  misc_feature: MA Experiment 20000535 PARAMETER Experiment Name: Zm_Hybrid_Seed_Dev_P Parameter: Plant Line Value: 35A19
  misc_feature: MA Experiment 20000535 PARAMETER Experiment Name: Zm_Hybrid_Seed_Dev_P Parameter: Tissue Value: Embryo vs. Unfert Floret
  misc_feature: MA Experiment ID: 20000626 Result: Down-regulated in Transcription
  misc_feature: MA Experiment 20000626 PARAMETER Experiment Name: Zm_Herbicide-Treatments_P Parameter: Timepoint (hr) Value: 12
  misc_feature: MA Experiment 20000626 PARAMETER Experiment Name: Zm_Herbicide-Treatments_P Parameter: Tissue Value: Aerial
  misc_feature: MA Experiment 20000626 PARAMETER Experiment Name: Zm_Herbicide-Treatments_P Parameter: Treatment Value: Roundup vs. No Treatment
gcacgagaccattacctagaacatcctaatcgaaaagtactgtacatcgacatgcgacatcttgcttggcctatctgatctttaatgtcgccgcgcacagagaggagatccggtctcatgaagtggctctgcagattcctcaaggggccgaagcccggcgaaccgagccgccggcggccccaggtggcggccggagaaggggagggcgcgctttggcaccaacgaccagctagaccaaagatcgatccacctaggaacgagaatgaggaactagtggaccgtgccattgccgagcctcttgcagaggctgtcaaaccgcccagagagaaaacccataggggagaagacagcaacgacgacgaagatctcacaagagccgtacaggacagtctgaatatgaacccttacacgccttacaacccctatccaccctctcaagcccaacctatagggcacagggtatgcggaggctgcaagcatgagatagggcgtggccattacttgagctgcatgggcatttactggcaccctcagtgcttccgctgcaggtcctgcggtcaccttatccgtgagaccgagttcaccttgctgggtacggattcgtaccacaagctgtgctacaaggagctgcatcatccaaagtgcgacgtctgccttcagtttgtaaggcctcgtgtcctcggaaaacctgaggcgatctgcactgcagactgtgataaactgcatcccaacgaacgggagtggcttgatagagtacagagcccacccgttctggggccagaagtattgcccttcgcatgagcgcgacaggacgccacgttgctgcagctgtgagaaaatggaggtacagccaaggaacacgaagtacatgtcgctgggagacggacgcggcctgtgcatggaatgcctgggatctgcagtgatggacacgagcgagtgccagcctctgtaccattctatcagatactactacgaggggatggacatgagactggaccagcagatacccgtgctcttggttgagcggcaagcgctcaacgaagccatggaaggggagagtaaaggcccacaccacatgcctgagactaggggcctatgtctgtccgaggagcggactgtgagcagtatacttaggaggcccagaattggtggaaaccggttactaggcatgagaactcggccacagaagctgacgaggagatgtgaagttactgcaatacttgtcctgtatggcctccccaggctactgacaggttccatcctcgcccatgagctgatgcacgggtggctgcgcctcaaaggttaccgaaacctaaacgcggaggtggaagaaggcatatgccaggtcatgtcttacttgtggctggaatcagagattcttccgtcatcctcgaggcacgcgcagccttcatcatcgtcctcctcctcatcctatccagcaacatcatccgagaaaggtggaatatctcataccgggaagaagctgggcgagttcttcatgcaccagattgccaatgacacgtcgacggcctatggtgacgggttcagaactgcgtacgctgccgtcaacaagtatggccttcgccaaacactgagccatatacgcctaacaggaggcttccctgtataataagagtgacaaaaaagacacaaaatgtccatgcatgatcatatcgatatcaaaaggttatatacatattgggatgaagttcgctatggaagcatagtgattcagtttcggtgaccttgagttttcaaagaggtcatgtgtaagaacactgatttaggggtggaggtatgccgcttccggcatatgatttcctctc

SEQ ID NO: 20061 - protein, 263 aa, Zea mays subsp. mays
  peptide (1)..(263): Ceres Seq. ID no. 12387681
  misc_feature (1)..(256): Homolog of NCBI NO: 15240017 NR Description: putative protein; protein id: At5g66610.1
  misc_feature (1)..(255): Homolog of NCBI NO: 15240018 NR Description: putative protein; protein id: At5g66620.1
  misc_feature (152)..(263): Homolog of NCBI NO: 15225574 NR Description: hypothetical protein; protein id: At2g39830.1
  misc_feature (1)..(98): Homolog of NCBI NO: 15225574 NR Description: hypothetical protein; protein id: At2g39830.1
  misc_feature (1)..(262): Homolog of NCBI NO: 25407769 NR Description: hypothetical protein AT4g36860 [imported] -
  misc_feature (1)..(262): Homolog of NCBI NO: 22329212 NR Description: putative protein
  misc_feature (1)..(258): Homolog of NCBI NO: 25518496 NR Description: hypothetical protein T29M8.14 - Arabidopsis
  misc_feature (1)..(263): Homolog of NCBI NO: 15221983 NR Description: unknown protein; protein id: At1g19270.1
  misc_feature (1)..(262): Homolog of NCBI NO: 17065046 NR Description: Unknown protein [Arabidopsis thaliana]
  misc_feature (1)..(263): Homolog of NCBI NO: 29893641 NR Description: hypothetical protein [Oryza sativa (japonica
MEVQPRNTKYMSLGDGRGLCMECLGSAVMDTSECQPLYHSIRYYYEGMDMRLDQQIPVLLVERQALNEAMEGESKGPHHMPETRGLCLSEERTVSSILRRPRIGGNRLLGMRTRPQKLTRRCEVTAILVLYGLPRLLTGSILAHELMHGWLRLKGYRNLNAEVEEGICQVMSYLWLESEILPSSSRHAQPSSSSSSSSYPATSSEKGGISHTGKKLGEFFMHQIANDTSTAYGDGFRTAYAAVNKYGLRQTLSHIRLTGGFPV

SEQ ID NO: 20062 - protein, 253 aa, Zea mays subsp. mays
  peptide (1)..(253): Ceres Seq. ID no. 12387682
  misc_feature (1)..(246): Homolog of NCBI NO: 15240017 NR Description: putative protein; protein id: At5g66610.1
  misc_feature (1)..(245): Homolog of NCBI NO: 15240018 NR Description: putative protein; protein id: At5g66620.1
  misc_feature (142)..(253): Homolog of NCBI NO: 15225574 NR Description: hypothetical protein; protein id: At2g39830.1
  misc_feature (1)..(88): Homolog of NCBI NO: 15225574 NR Description: hypothetical protein; protein id: At2g39830.1
  misc_feature (1)..(252): Homolog of NCBI NO: 25407769 NR Description: hypothetical protein AT4g36860 [imported] -
  misc_feature (1)..(252): Homolog of NCBI NO: 22329212 NR Description: putative protein
  misc_feature (1)..(248): Homolog of NCBI NO: 25518496 NR Description: hypothetical protein T29M8.14 - Arabidopsis
  misc_feature (1)..(253): Homolog of NCBI NO: 15221983 NR Description: unknown protein; protein id: At1g19270.1
  misc_feature (1)..(252): Homolog of NCBI NO: 17065046 NR Description: Unknown protein [Arabidopsis thaliana]
  misc_feature (1)..(253): Homolog of NCBI NO: 29893641 NR Description: hypothetical protein [Oryza sativa (japonica
MSLGDGRGLCMECLGSAVMDTSECQPLYHSIRYYYEGMDMRLDQQIPVLLVERQALNEAMEGESKGPHHMPETRGLCLSEERTVSSILRRPRIGGNRLLGMRTRPQKLTRRCEVTAILVLYGLPRLLTGSILAHELMHGWLRLKGYRNLNAEVEEGICQVMSYLWLESEILPSSSRHAQPSSSSSSSSYPATSSEKGGISHTGKKLGEFFMHQIANDTSTAYGDGFRTAYAAVNKYGLRQTLSHIRLTGGFPV

SEQ ID NO: 20063 - protein, 243 aa, Zea mays subsp. mays
  peptide (1)..(243): Ceres Seq. ID no. 12387683
  misc_feature (132)..(243): Homolog of NCBI NO: 15225574 NR Description: hypothetical protein; protein id: At2g39830.1
  misc_feature (1)..(78): Homolog of NCBI NO: 15225574 NR Description: hypothetical protein; protein id: At2g39830.1
  misc_feature (1)..(242): Homolog of NCBI NO: 25407769 NR Description: hypothetical protein AT4g36860 [imported] -
  misc_feature (1)..(242): Homolog of NCBI NO: 22329212 NR Description: putative protein
  misc_feature (1)..(238): Homolog of NCBI NO: 25518496 NR Description: hypothetical protein T29M8.14 - Arabidopsis
  misc_feature (1)..(243): Homolog of NCBI NO: 15221983 NR Description: unknown protein; protein id: At1g19270.1
  misc_feature (1)..(242): Homolog of NCBI NO: 17065046 NR Description: Unknown protein [Arabidopsis thaliana]
  misc_feature (1)..(243): Homolog of NCBI NO: 29893641 NR Description: hypothetical protein [Oryza sativa (japonica
  misc_feature (1)..(236): Homolog of NCBI NO: 15240017 NR Description: putative protein; protein id: At5g66610.1
  misc_feature (1)..(235): Homolog of NCBI NO: 15240018 NR Description: putative protein; protein id: At5g66620.1
MECLGSAVMDTSECQPLYHSIRYYYEGMDMRLDQQIPVLLVERQALNEAMEGESKGPHHMPETRGLCLSEERTVSSILRRPRIGGNRLLGMRTRPQKLTRRCEVTAILVLYGLPRLLTGSILAHELMHGWLRLKGYRNLNAEVEEGICQVMSYLWLESEILPSSSRHAQPSSSSSSSSYPATSSEKGGISHTGKKLGEFFMHQIANDTSTAYGDGFRTAYAAVNKYGLRQTLSHIRLTGGFPV

SEQ ID NO: 20064 - DNA, 1863 bp, Zea mays subsp. mays
  misc_feature (1)..(1863): Ceres Seq. ID no. 12383411
  misc_feature: MA Experiment ID: 108504 Result: Up-regulated in Transcription
  misc_feature: MA Experiment 108504 PARAMETER Experiment Name: Zm_Drought_P Parameter: Age (day) Value: 8
  misc_feature: MA Experiment 108504 PARAMETER Experiment Name: Zm_Drought_P Parameter: Organism Value: Zea mays
  misc_feature: MA Experiment 108504 PARAMETER Experiment Name: Zm_Drought_P Parameter: Plant Line Value: 35A19
  misc_feature: MA Experiment 108504 PARAMETER Experiment Name: Zm_Drought_P Parameter: Timepoint (hr) Value: 12
  misc_feature: MA Experiment 108504 PARAMETER Experiment Name: Zm_Drought_P Parameter: Tissue Value: Aerial
  misc_feature: MA Experiment 108504 PARAMETER Experiment Name: Zm_Drought_P Parameter: Treatment Value: Drought vs. No Drought
  misc_feature: MA Experiment ID: 108523 Result: Up-regulated in Transcription
  misc_feature: MA Experiment 108523 PARAMETER Experiment Name: Zm_42deg_Heat_P Parameter: Age (day) Value: 8
  misc_feature: MA Experiment 108523 PARAMETER Experiment Name: Zm_42deg_Heat_P Parameter: Organism Value: Zea mays
  misc_feature: MA Experiment 108523 PARAMETER Experiment Name: Zm_42deg_Heat_P Parameter: Plant Line Value: 35A19
  misc_feature: MA Experiment 108523 PARAMETER Experiment Name: Zm_42deg_Heat_P Parameter: Temperature (deg C) Value: 42 vs. 22
  misc_feature: MA Experiment 108523 PARAMETER Experiment Name: Zm_42deg_Heat_P Parameter: Timepoint (hr) Value: 6
  misc_feature: MA Experiment 108523 PARAMETER Experiment Name: Zm_42deg_Heat_P Parameter: Tissue Value: Aerial
  misc_feature: MA Experiment ID: 108527 Result: Up-regulated in Transcription
  misc_feature: MA Experiment 108527 PARAMETER Experiment Name: Zm_5mM_NO_P Parameter: Age (day) Value: 8
  misc_feature: MA Experiment 108527 PARAMETER Experiment Name: Zm_5mM_NO_P Parameter: Organism Value: Zea mays
  misc_feature: MA Experiment 108527 PARAMETER Experiment Name: Zm_5mM_NO_P Parameter: Plant Line Value: 35A19
  misc_feature: MA Experiment 108527 PARAMETER Experiment Name: Zm_5mM_NO_P Parameter: Timepoint (hr) Value: 6
  misc_feature: MA Experiment 108527 PARAMETER Experiment Name: Zm_5mM_NO_P Parameter: Tissue Value: Aerial
  misc_feature: MA Experiment 108527 PARAMETER Experiment Name: Zm_5mM_NO_P Parameter: Treatment Value: 5mM NO vs. No Treatment
  misc_feature: MA Experiment ID: 108534 Result: Down-regulated in Transcription
  misc_feature: MA Experiment 108534 PARAMETER Experiment Name: Zm_4deg_Cold_P Parameter: Age (hr) Value: 8
  misc_feature: MA Experiment 108534 PARAMETER Experiment Name: Zm_4deg_Cold_P Parameter: Organism Value: Zea mays
  misc_feature: MA Experiment 108534 PARAMETER Experiment Name: Zm_4deg_Cold_P Parameter: Plant Line Value: 35A19
  misc_feature: MA Experiment 108534 PARAMETER Experiment Name: Zm_4deg_Cold_P Parameter: Temperature (deg C) Value: 4 vs. 22
  misc_feature: MA Experiment 108534 PARAMETER Experiment Name: Zm_4deg_Cold_P Parameter: Timepoint (hr) Value: 6
  misc_feature: MA Experiment 108534 PARAMETER Experiment Name: Zm_4deg_Cold_P Parameter: Tissue Value: Aerial
  misc_feature: MA Experiment ID: 108540 Result: Up-regulated in Transcription
  misc_feature: MA Experiment 108540 PARAMETER Experiment Name: Zm_20percent_PEG_P Parameter: Age (day) Value: 8
  misc_feature: MA Experiment 108540 PARAMETER Experiment Name: Zm_20percent_PEG_P Parameter: Organism Value: Zea mays
  misc_feature: MA Experiment 108540 PARAMETER Experiment Name: Zm_20percent_PEG_P Parameter: Plant Line Value: 35A19
  misc_feature: MA Experiment 108540 PARAMETER Experiment Name: Zm_20percent_PEG_P Parameter: Timepoint (hr) Value: 6
  misc_feature: MA Experiment 108540 PARAMETER Experiment Name: Zm_20percent_PEG_P Parameter: Tissue Value: Aerial
  misc_feature: MA Experiment 108540 PARAMETER Experiment Name: Zm_20percent_PEG_P Parameter: Treatment Value: 20percent PEG vs. No Treatment
  misc_feature: MA Experiment ID: 108548 Result: Up-regulated in Transcription
  misc_feature: MA Experiment 108548 PARAMETER Experiment Name: Zm_20uM_KNO3_H-to-L_P Parameter: Age (day) Value: 11
  misc_feature: MA Experiment 108548 PARAMETER Experiment Name: Zm_20uM_KNO3_H-to-L_P Parameter: Organism Value: Zea mays
  misc_feature: MA Experiment 108548 PARAMETER Experiment Name: Zm_20uM_KNO3_H-to-L_P Parameter: Plant Line Value: 35A19
  misc_feature: MA Experiment 108548 PARAMETER Experiment Name: Zm_20uM_KNO3_H-to-L_P Parameter: Timepoint (hr) Value: 4
  misc_feature: MA Experiment 108548 PARAMETER Experiment Name: Zm_20uM_KNO3_H-to-L_P Parameter: Tissue Value: Roots
  misc_feature: MA Experiment 108548 PARAMETER Experiment Name: Zm_20uM_KNO3_H-to-L_P Parameter: Treatment Value: 20uM KNO3 vs. 60mM KNO3
  misc_feature: MA Experiment ID: 108556 Result: Up-regulated in Transcription
  misc_feature: MA Experiment 108556 PARAMETER Experiment Name: Zm_Drought_P Parameter: Age (day) Value: 9
  misc_feature: MA Experiment 108556 PARAMETER Experiment Name: Zm_Drought_P Parameter: Organism Value: Zea mays
  misc_feature: MA Experiment 108556 PARAMETER Experiment Name: Zm_Drought_P Parameter: Plant Line Value: 35A19
  misc_feature: MA Experiment 108556 PARAMETER Experiment Name: Zm_Drought_P Parameter: Timepoint (hr) Value: 24
  misc_feature: MA Experiment 108556 PARAMETER Experiment Name: Zm_Drought_P Parameter: Tissue Value: Aerial
  misc_feature: MA Experiment 108556 PARAMETER Experiment Name: Zm_Drought_P Parameter: Treatment Value: Drought vs. No Drought
  misc_feature: MA Experiment ID: 108559 Result: Up-regulated in Transcription
  misc_feature: MA Experiment 108559 PARAMETER Experiment Name: Zm_5mM_NO_P Parameter: Age (day) Value: 8
  misc_feature: MA Experiment 108559 PARAMETER Experiment Name: Zm_5mM_NO_P Parameter: Organism Value: Zea mays
  misc_feature: MA Experiment 108559 PARAMETER Experiment Name: Zm_5mM_NO_P Parameter: Plant Line Value: 35A19
  misc_feature: MA Experiment 108559 PARAMETER Experiment Name: Zm_5mM_NO_P Parameter: Timepoint (hr) Value: 12
  misc_feature: MA Experiment 108559 PARAMETER Experiment Name: Zm_5mM_NO_P Parameter: Tissue Value: Aerial
  misc_feature: MA Experiment 108559 PARAMETER Experiment Name: Zm_5mM_NO_P Parameter: Treatment Value: 5mM NO vs. No Treatment
  misc_feature: MA Experiment ID: 108597 Result: Up-regulated in Transcription
  misc_feature: MA Experiment 108597 PARAMETER Experiment Name: Zm_100uM_ABA_P Parameter: Age (day) Value: 9
  misc_feature: MA Experiment 108597 PARAMETER Experiment Name: Zm_100uM_ABA_P Parameter: Organism Value: Zea mays
  misc_feature: MA Experiment 108597 PARAMETER Experiment Name: Zm_100uM_ABA_P Parameter: Plant Line Value: 35A19
  misc_feature: MA Experiment 108597 PARAMETER Experiment Name: Zm_100uM_ABA_P Parameter: Timepoint (hr) Value: 24
  misc_feature: MA Experiment 108597 PARAMETER Experiment Name: Zm_100uM_ABA_P Parameter: Tissue Value: Aerial
  misc_feature: MA Experiment 108597 PARAMETER Experiment Name: Zm_100uM_ABA_P Parameter: Treatment Value: 100uM ABA vs. No Treatment
  misc_feature: MA Experiment ID: 108599 Result: Up-regulated in Transcription
  misc_feature: MA Experiment 108599 PARAMETER Experiment Name: Zm_RT1_P Parameter: Age (day) Value: 11
  misc_feature: MA Experiment 108599 PARAMETER Experiment Name: Zm_RT1_P Parameter: Organism Value: Zea mays
  misc_feature: MA Experiment 108599 PARAMETER Experiment Name: Zm_RT1_P Parameter: Plant Line Value: rt1 mut vs. rt1 wt
  misc_feature: MA Experiment 108599 PARAMETER Experiment Name: Zm_RT1_P Parameter: Tissue Value: Roots
  misc_feature: MA Experiment ID: 108689 Result: Up-regulated in Transcription
  misc_feature: MA Experiment 108689 PARAMETER Experiment Name: Zm_Drought_Roots_P Parameter: Age (day) Value: 9
  misc_feature: MA Experiment 108689 PARAMETER Experiment Name: Zm_Drought_Roots_P Parameter: Organism Value: Zea mays
  misc_feature: MA Experiment 108689 PARAMETER Experiment Name: Zm_Drought_Roots_P Parameter: Plant Line Value: 35A19
  misc_feature: MA Experiment 108689 PARAMETER Experiment Name: Zm_Drought_Roots_P Parameter: Timepoint (hr) Value: 24
  misc_feature: MA Experiment 108689 PARAMETER Experiment Name: Zm_Drought_Roots_P Parameter: Tissue Value: Roots
  misc_feature: MA Experiment 108689 PARAMETER Experiment Name: Zm_Drought_Roots_P Parameter: Treatment Value: Drought vs. No Drought
  misc_feature: MA Experiment ID: 20000477 Result: Up-regulated in Transcription
  misc_feature: MA Experiment 20000477 PARAMETER Experiment Name: Zm_5mM_SA_P Parameter: Age (day) Value: 10
  misc_feature: MA Experiment 20000477 PARAMETER Experiment Name: Zm_5mM_SA_P Parameter: Organism Value: Zea mays
  misc_feature: MA Experiment 20000477 PARAMETER Experiment Name: Zm_5mM_SA_P Parameter: Plant Line Value: 35A19
  misc_feature: MA Experiment 20000477 PARAMETER Experiment Name: Zm_5mM_SA_P Parameter: Timepoint (hr) Value: 48
  misc_feature: MA Experiment 20000477 PARAMETER Experiment Name: Zm_5mM_SA_P Parameter: Tissue Value: Aerial
  misc_feature: MA Experiment 20000477 PARAMETER Experiment Name: Zm_5mM_SA_P Parameter: Treatment Value: 5mM SA vs. No Treatment
  misc_feature: MA Experiment ID: 20000478 Result: Up-regulated in Transcription
  misc_feature: MA Experiment 20000478 PARAMETER Experiment Name: Zm_5mM_SA_P Parameter: Age (day) Value: 11
  misc_feature: MA Experiment 20000478 PARAMETER Experiment Name: Zm_5mM_SA_P Parameter: Organism Value: Zea mays
  misc_feature: MA Experiment 20000478 PARAMETER Experiment Name: Zm_5mM_SA_P Parameter: Plant Line Value: 35A19
  misc_feature: MA Experiment 20000478 PARAMETER Experiment Name: Zm_5mM_SA_P Parameter: Timepoint (hr) Value: 72
  misc_feature: MA Experiment 20000478 PARAMETER Experiment Name: Zm_5mM_SA_P Parameter: Tissue Value: Aerial
  misc_feature: MA Experiment 20000478 PARAMETER Experiment Name: Zm_5mM_SA_P Parameter: Treatment Value: 5mM SA vs. No Treatment
  misc_feature: MA Experiment ID: 20000479 Result: Up-regulated in Transcription
  misc_feature: MA Experiment 20000479 PARAMETER Experiment Name: Zm_Drought_P Parameter: Age (day) Value: 10
  misc_feature: MA Experiment 20000479 PARAMETER Experiment Name: Zm_Drought_P Parameter: Organism Value: Zea mays
  misc_feature: MA Experiment 20000479 PARAMETER Experiment Name: Zm_Drought_P Parameter: Plant Line Value: 35A19
  misc_feature: MA Experiment 20000479 PARAMETER Experiment Name: Zm_Drought_P Parameter: Timepoint (hr) Value: 48
  misc_feature: MA Experiment 20000479 PARAMETER Experiment Name: Zm_Drought_P Parameter: Tissue Value: Aerial
  misc_feature: MA Experiment 20000479 PARAMETER Experiment Name: Zm_Drought_P Parameter: Treatment Value: Drought vs. No Drought
  misc_feature: MA Experiment ID: 20000480 Result: Up-regulated in Transcription
  misc_feature: MA Experiment 20000480 PARAMETER Experiment Name: Zm_Drought_P Parameter: Age (day) Value: 11
  misc_feature: MA Experiment 20000480 PARAMETER Experiment Name: Zm_Drought_P Parameter: Organism Value: Zea mays
  misc_feature: MA Experiment 20000480 PARAMETER Experiment Name: Zm_Drought_P Parameter: Plant Line Value: 35A19
  misc_feature: MA Experiment 20000480 PARAMETER Experiment Name: Zm_Drought_P Parameter: Timepoint (hr) Value: 72
  misc_feature: MA Experiment 20000480 PARAMETER Experiment Name: Zm_Drought_P Parameter: Tissue Value: Aerial
  misc_feature: MA Experiment 20000480 PARAMETER Experiment Name: Zm_Drought_P Parameter: Treatment Value: Drought vs. No Drought
  misc_feature: MA Experiment ID: 20000487 Result: Up-regulated in Transcription
  misc_feature: MA Experiment 20000487 PARAMETER Experiment Name: Zm_50mM_NH4NO3_L_to_H_P Parameter: Organism Value: Zea mays
  misc_feature: MA Experiment 20000487 PARAMETER Experiment Name: Zm_50mM_NH4NO3_L_to_H_P Parameter: Timepoint (hr) Value: 4
  misc_feature: MA Experiment 20000487 PARAMETER Experiment Name: Zm_50mM_NH4NO3_L_to_H_P Parameter: Tissue Value: Leaves
  misc_feature: MA Experiment 20000487 PARAMETER Experiment Name: Zm_50mM_NH4NO3_L_to_H_P Parameter: Treatment Value: 50mM NH4NO3 vs. 100mM Mannitol
  misc_feature: MA Experiment ID: 20000488 Result: Up-regulated in Transcription
  misc_feature: MA Experiment 20000488 PARAMETER Experiment Name: Zm_50mM_NH4NO3_L_to_H_P Parameter: Organism Value: Zea mays
  misc_feature: MA Experiment 20000488 PARAMETER Experiment Name: Zm_50mM_NH4NO3_L_to_H_P Parameter: Timepoint (hr) Value: 8
  misc_feature: MA Experiment 20000488 PARAMETER Experiment Name: Zm_50mM_NH4NO3_L_to_H_P Parameter: Tissue Value: Leaves
  misc_feature: MA Experiment 20000488 PARAMETER Experiment Name: Zm_50mM_NH4NO3_L_to_H_P Parameter: Treatment Value: 50mM NH4NO3 vs. 100mM Mannitol
  misc_feature: MA Experiment ID: 20000533 Result: Up-regulated in Transcription
  misc_feature: MA Experiment 20000533 PARAMETER Experiment Name: Zm_0.001percent_MeJA_P Parameter: Age (day) Value: 11
  misc_feature: MA Experiment 20000533 PARAMETER Experiment Name: Zm_0.001percent_MeJA_P Parameter: Organism Value: Zea mays
  misc_feature: MA Experiment 20000533 PARAMETER Experiment Name: Zm_0.001percent_MeJA_P Parameter: Plant Line Value: 35A19
  misc_feature: MA Experiment 20000533 PARAMETER Experiment Name: Zm_0.001percent_MeJA_P Parameter: Timepoint (hr) Value: 72
  misc_feature: MA Experiment 20000533 PARAMETER Experiment Name: Zm_0.001percent_MeJA_P Parameter: Tissue Value: Aerial
  misc_feature: MA Experiment 20000533 PARAMETER Experiment Name: Zm_0.001percent_MeJA_P Parameter: Treatment Value: 0.001percent MeJA vs. No Treatment
  misc_feature: MA Experiment ID: 20000626 Result: Up-regulated in Transcription
  misc_feature: MA Experiment 20000626 PARAMETER Experiment Name: Zm_Herbicide-Treatments_P Parameter: Timepoint (hr) Value: 12
  misc_feature: MA Experiment 20000626 PARAMETER Experiment Name: Zm_Herbicide-Treatments_P Parameter: Tissue Value: Aerial
  misc_feature: MA Experiment 20000626 PARAMETER Experiment Name: Zm_Herbicide-Treatments_P Parameter: Treatment Value: Roundup vs. No Treatment
  misc_feature: MA Experiment ID: 20000630 Result: Up-regulated in Transcription
  misc_feature: MA Experiment 20000630 PARAMETER Experiment Name: Zm_Herbicide-Treatments_P Parameter: Timepoint (hr) Value: 4
  misc_feature: MA Experiment 20000630 PARAMETER Experiment Name: Zm_Herbicide-Treatments_P Parameter: Tissue Value: Aerial
  misc_feature: MA Experiment 20000630 PARAMETER Experiment Name: Zm_Herbicide-Treatments_P Parameter: Treatment Value: Roundup vs. No Treatment
  misc_feature: MA Experiment ID: 20001613 Result: Up-regulated in Transcription
  misc_feature: MA Experiment 20001613 PARAMETER Experiment Name: Zm_50ppm_KNO3_L-to-H_P Parameter: Age (day) Value: 20
  misc_feature: MA Experiment 20001613 PARAMETER Experiment Name: Zm_50ppm_KNO3_L-to-H_P Parameter: Organism Value: Zea mays
  misc_feature: MA Experiment 20001613 PARAMETER Experiment Name: Zm_50ppm_KNO3_L-to-H_P Parameter: Plant Line Value: 35A19
  misc_feature: MA Experiment 20001613 PARAMETER Experiment Name: Zm_50ppm_KNO3_L-to-H_P Parameter: Timepoint (hr) Value: 24
  misc_feature: MA Experiment 20001613 PARAMETER Experiment Name: Zm_50ppm_KNO3_L-to-H_P Parameter: Tissue Value: Roots
  misc_feature: MA Experiment 20001613 PARAMETER Experiment Name: Zm_50ppm_KNO3_L-to-H_P Parameter: Treatment Value: 50ppm KNO3 vs. 50ppm KCl
gcacgagaccattacctagaacatcctaatcgaaaagcatcgccgcatctttccaccttccctcccctccactcccgcaatctcgtctccgccgtccgccgccgcgccgtagcaaggtaacagagatcacaacaagttaaagcctcaaggaatgctgaaagatgtgctttcctagaagatatttctgttgcgacatcaaggaccttgctgctccccgagggctgctgatctgctcaactcttgatgacctgatctgcatcgattctacaacgttcagactgcgccacgaccaagccataagagtactgttcaccgtcatggatcatgacatgggggaggaaggctaactctttgcccagtcccacctgattggcgccagcagtgtgatttatactttttgcagagagagaagatatggagtcgacaggaaagattttgatggagcggtatgaggtggggaggctactggggaaaggcacatttggcaaggtgcactacgcaaagaatcttgagtccaacgagagtgttgccattaagatgatggacaaggacaaagtgctcaaggccgggctttcggagcagataaggcgggagatcacaacgatgcggttggtggctcataagaacattgttgagcttcatgaggtcatggcgacgcggaacaacatctactttgtcatggagtatgtgaaaggcggagagctctttgacaagattggcaagagtggcaagctcacagaggccgctgcacacaagtacttccagcagctcattggtgcggtggattactgccacagccgaggtgtgtatcaccgggacttgaagcctgagaaccttctgttggatgagaatgagaacctcaaggtctcagattttggactgagtgcactttcagaatcccaagggggcaagatggcttactccacaccacctgtgggactccagcatatgtagctccagaggtgatcagcaagacaggctatgatggggcaaagtcagacatctggtcctgtggtgttgttctatttgtactagttgctggttatcttcctttccgggccccaaacatgatggagatgtatcgcaagatacagaatggtgatttcaggtgccctagttggttttcacacaaactcaagaagctcttgtacaagatcctcgaccccagcccagacacaagaatttcagtgcagaagataaaagagtctacctggtttcgaaaaggccctgtggagacccgtacagtaaaggagaaaattctgagtgagaatgacaccacaaatgctgctccagccgttgctatgaggcgcaagaagaatgttcatgaagacgtgaagcccccgactgtcacaagcttaaacgcctttgaaattatatctttctccacaggattggacctctctggcctatttatcagaaaggagtgtaagaaggagacgcggttcacttctgataagggtgccgtgtccatcatctcgaagcttgaagatgttgcaaaagcactgaatctcagggtaaggaagaaggacaatggtgttgtcaagattcaggggaggaaggtggggaggaagggtgtcctggagttcgacactgaaatatttgagatcacggcatcctaccacctcatcgagatgaaacaaacgggcggtgattcacttgagtacaagaaactgttggaagaggacatccggccagcactgaaggacatagtctgggcctggcatggagatgaccagcaacaaaagtagtagctttggatctctcttttttgttccataaaattgttagatctttcacttcagattgattttgttcgacatgtgcgtgttcttcttactagttacattctttctgtttctgtgg

SEQ ID NO: 20065 - protein, 226 aa, Zea mays subsp. mays
  peptide (1)..(226): Ceres Seq. ID no. 12383412
  misc_feature (1)..(222): Homolog of NCBI NO: 18420882 NR Description: serine/threonine protein kinase-like protein
  misc_feature (1)..(222): Homolog of NCBI NO: 15242509 NR Description: serine threonine protein kinase
  misc_feature (1)..(224): Homolog of NCBI NO: 18424099 NR Description: serine/threonine protein kinase
  misc_feature (1)..(224): Homolog of NCBI NO: 8777339 NR Description: serine/threonine protein kinase [Arabidopsis
  misc_feature (1)..(226): Homolog of NCBI NO: 7446373 NR Description: probable serine/threonine protein kinase (EC
  misc_feature (1)..(226): Homolog of NCBI NO: 9280636 NR Description: CBL-interacting protein kinase 2 [Arabidopsis
  misc_feature (1)..(226): Homolog of NCBI NO: 15240687 NR Description: serine threonine protein kinase-like protein
  misc_feature (1)..(222): Homolog of NCBI NO: 34907870 NR Description: putative serine/threonine protein kinase
  misc_feature (1)..(226): Homolog of NCBI NO: 23428550 NR Description: Serine/threonine Kinase [Persea americana]
  misc_feature (1)..(222): Homolog of NCBI NO: 7446440 NR Description: protein kinase homolog - rice
MMEMYRKIQNGDFRCPSWFSHKLKKLLYKILDPSPDTRISVQKIKESTWFRKGPVETRTVKEKILSENDTTNAAPAVAMRRKKNVHEDVKPPTVTSLNAFEIISFSTGLDLSGLFIRKECKKETRFTSDKGAVSIISKLEDVAKALNLRVRKKDNGVVKIQGRKVGRKGVLEFDTEIFEITASYHLIEMKQTGGDSLEYKKLLEEDIRPALKDIVWAWHGDDQQQK

SEQ ID NO: 20066 - protein, 225 aa, Zea mays subsp. mays
  peptide (1)..(225): Ceres Seq. ID no. 12383413
  misc_feature (1)..(221): Homolog of NCBI NO: 18420882 NR Description: serine/threonine protein kinase-like protein
  misc_feature (1)..(221): Homolog of NCBI NO: 15242509 NR Description: serine threonine protein kinase
  misc_feature (1)..(223): Homolog of NCBI NO: 18424099 NR Description: serine/threonine protein kinase
  misc_feature (1)..(223): Homolog of NCBI NO: 8777339 NR Description: serine/threonine protein kinase [Arabidopsis
  misc_feature (1)..(225): Homolog of NCBI NO: 7446373 NR Description: probable serine/threonine protein kinase (EC
  misc_feature (1)..(225): Homolog of NCBI NO: 9280636 NR Description: CBL-interacting protein kinase 2 [Arabidopsis
  misc_feature (1)..(225): Homolog of NCBI NO: 15240687 NR Description: serine threonine protein kinase-like protein
  misc_feature (1)..(221): Homolog of NCBI NO: 34907870 NR Description: putative serine/threonine protein kinase
  misc_feature (1)..(225): Homolog of NCBI NO: 23428550 NR Description: Serine/threonine Kinase [Persea americana]
  misc_feature (1)..(221): Homolog of NCBI NO: 7446440 NR Description: protein kinase homolog - rice
MEMYRKIQNGDFRCPSWFSHKLKKLLYKILDPSPDTRISVQKIKESTWFRKGPVETRTVKEKILSENDTTNAAPAVAMRRKKNVHEDVKPPTVTSLNAFEIISFSTGLDLSGLFIRKECKKETRFTSDKGAVSIISKLEDVAKALNLRVRKKDNGVVKIQGRKVGRKGVLEFDTEIFEITASYHLIEMKQTGGDSLEYKKLLEEDIRPALKDIVWAWHGDDQQQK

SEQ ID NO: 20067 - protein, 223 aa, Zea mays subsp. mays
  peptide (1)..(223): Ceres Seq. ID no. 12383414
  misc_feature (1)..(219): Homolog of NCBI NO: 18420882 NR Description: serine/threonine protein kinase-like protein
  misc_feature (1)..(219): Homolog of NCBI NO: 15242509 NR Description: serine threonine protein kinase
  misc_feature (1)..(221): Homolog of NCBI NO: 18424099 NR Description: serine/threonine protein kinase
  misc_feature (1)..(221): Homolog of NCBI NO: 8777339 NR Description: serine/threonine protein kinase [Arabidopsis
  misc_feature (1)..(223): Homolog of NCBI NO: 7446373 NR Description: probable serine/threonine protein kinase (EC
  misc_feature (1)..(223): Homolog of NCBI NO: 9280636 NR Description: CBL-interacting protein kinase 2 [Arabidopsis
  misc_feature (1)..(223): Homolog of NCBI NO: 15240687 NR Description: serine threonine protein kinase-like protein
  misc_feature (1)..(219): Homolog of NCBI NO: 34907870 NR Description: putative serine/threonine protein kinase
  misc_feature (1)..(223): Homolog of NCBI NO: 23428550 NR Description: Serine/threonine Kinase [Persea americana]
  misc_feature (1)..(219): Homolog of NCBI NO: 7446440 NR Description: protein kinase homolog - rice
MYRKIQNGDFRCPSWFSHKLKKLLYKILDPSPDTRISVQKIKESTWFRKGPVETRTVKEKILSENDTTNAAPAVAMRRKKNVHEDVKPPTVTSLNAFEIISFSTGLDLSGLFIRKECKKETRFTSDKGAVSIISKLEDVAKALNLRVRKKDNGVVKIQGRKVGRKGVLEFDTEIFEITASYHLIEMKQTGGDSLEYKKLLEEDIRPALKDIVWAWHGDDQQQK

SEQ ID NO: 20068 - DNA, 1240 bp, Zea mays subsp. mays
  misc_feature (1)..(1240): Ceres Seq. ID no. 12418860
  misc_feature: MA Experiment ID: 20000535 Result: Up-regulated in Transcription
  misc_feature: MA Experiment 20000535 PARAMETER Experiment Name: Zm_Hybrid_Seed_Dev_P Parameter: DAP Value: 30 vs. 12
  misc_feature: MA Experiment 20000535 PARAMETER Experiment Name: Zm_Hybrid_Seed_Dev_P Parameter: Organism Value: Zea mays
  misc_feature: MA Experiment 20000535 PARAMETER Experiment Name: Zm_Hybrid_Seed_Dev_P Parameter: Plant Line Value: 35A19
  misc_feature: MA Experiment 20000535 PARAMETER Experiment Name: Zm_Hybrid_Seed_Dev_P Parameter: Tissue Value: Embryo vs. Unfert Floret
gcacgagaccattacctagaacatcctaatcaaaaactcttaccgccagccccacatcacggagcatcccccttaataacagcaaactaccacacccatgtccacctccgtctccgccgccgccgttgccgctctcgtcccacccctcaccggccgccggtcgccgccggcatctcgcgtaccgcagatttgccgcagaagaatcagatccaaaccccgtatcttctcttcttccccctccttccccattgtccccgccgctgccatggccaccggcggcgccgcccccaccgcctccgatgccgggtccaagaagaagttgctcatcttcgactccgaggaggatctcgcggtttctcttgcgaagtacactgcggagctgtcggagaagttcgcggccgagaggggtgccttcaccgccgtgctctctggcggatccctcatcgaggcactcaggaagctgacggagccgccgtacctggattcagtggactggagcaagtggcacgtcttctgggtggatgagagggtcgtgcccaaggaccatgtggatagcaactacaagctcgcctatgatgggtttctctccaaggtgccgattcctcctggacaagtttatgctataaacgatgcgttgtcagctgaaggagcggcagacgactacgaagcgtgcctgaagcagcttgtcaagaacggtgtgatttctatgtcagcggcgactggatttcccaggtttgatctccagcttctgggaatgggacctgatggccacattgcgtctctcttccctggccaccctcttgttaacgagaaagagaggtgggtcacatacattaaggattctccaaagccacctccagagagaattacattcacgtttccagtaatcaactcatccgcatacgttgcgatggtggtgactggagctggaaaggcggcagcggtgcagaaggcgctctcagacaagcaaacctcgtcagacctgctgcctgttgagatggctgtgctacaagatggagagttcacctggttcactgataaggcagcggtgtccttgctgcagaacaagtagagtctccatggtaaccttggctcggctcgaagccattttagctcataaaataaaagatccatgggcctgcgtgcatagctgcattcgtcctccaggatttcgtgtaacggagactcgatccttttatgtgtattgttcggagtaatgttcaaaaactctattgtctcc

SEQ ID NO: 20069 - protein, 324 aa, Zea mays subsp. mays
  peptide (1)..(324): Ceres Seq. ID no. 12418861
  misc_feature (88)..(319): Pfam Name: Glucosamine-6-phosphate Pfam Description: Glucosamine-6-phosphate
  misc_feature (73)..(321): Homolog of NCBI NO: 14009294 NR Description: putative 6-phosphogluconolactonase [Brassica
  misc_feature (71)..(319): Homolog of NCBI NO: 15238523 NR Description: 6-phosphogluconolactonase-like protein; protein
  misc_feature (71)..(321): Homolog of NCBI NO: 15238526 NR Description: 6-phosphogluconolactonase-like protein
  misc_feature (74)..(321): Homolog of NCBI NO: 21536675 NR Description: 6-phosphogluconolactonase-like protein
  misc_feature (71)..(321): Homolog of NCBI NO: 21537412 NR Description: 6-phosphogluconolactonase-like protein
  misc_feature (74)..(321): Homolog of NCBI NO: 15229127 NR Description: 6-phosphogluconolactonase - like protein
  misc_feature (72)..(321): Homolog of NCBI NO: 18420789 NR Description: 6-phosphogluconolactonase-like protein
  misc_feature (72)..(321): Homolog of NCBI NO: 10177901 NR Description: 6-phosphogluconolactonase-like protein
  misc_feature (72)..(321): Homolog of NCBI NO: 21554291 NR Description: 6-phosphogluconolactonase-like protein
  misc_feature (55)..(324): Homolog of NCBI NO: 28140256 NR Description: putative 6-phosphogluconolactonase [Elaeis
MSTSVSAAAVAALVPPLTGRRSPPASRVPQICRRRIRSKPRIFSSSPSFPIVPAAAMATGGAAPTASDAGSKKKLLIFDSEEDLAVSLAKYTAELSEKFAAERGAFTAVLSGGSLIEALRKLTEPPYLDSVDWSKWHVFWVDERVVPKDHVDSNYKLAYDGFLSKVPIPPGQVYAINDALSAEGAADDYEACLKQLVKNGVISMSAATGFPRFDLQLLGMGPDGHIASLFPGHPLVNEKERWVTYIKDSPKPPPERITFTFPVINSSAYVAMVVTGAGKAAAVQKALSDKQTSSDLLPVEMAVLQDGEFTWFTDKAAVSLLQNK

SEQ ID NO: 20070 - protein, 268 aa, Zea mays subsp. mays
  peptide (1)..(268): Ceres Seq. ID no. 12418862
  misc_feature (32)..(263): Pfam Name: Glucosamine-6-phosphate Pfam Description: Glucosamine-6-phosphate
  misc_feature (17)..(265): Homolog of NCBI NO: 14009294 NR Description: putative 6-phosphogluconolactonase [Brassica
  misc_feature (15)..(263): Homolog of NCBI NO: 15238523 NR Description: 6-phosphogluconolactonase-like protein; protein
  misc_feature (15)..(265): Homolog of NCBI NO: 15238526 NR Description: 6-phosphogluconolactonase-like protein
  misc_feature (18)..(265): Homolog of NCBI NO: 21536675 NR Description: 6-phosphogluconolactonase-like protein
  misc_feature (15)..(265): Homolog of NCBI NO: 21537412 NR Description: 6-phosphogluconolactonase-like protein
  misc_feature (18)..(265): Homolog of NCBI NO: 15229127 NR Description: 6-phosphogluconolactonase - like protein
  misc_feature (16)..(265): Homolog of NCBI NO: 18420789 NR Description: 6-phosphogluconolactonase-like protein
  misc_feature (16)..(265): Homolog of NCBI NO: 10177901 NR Description: 6-phosphogluconolactonase-like protein
  misc_feature (16)..(265): Homolog of NCBI NO: 21554291 NR Description: 6-phosphogluconolactonase-like protein
  misc_feature (1)..(268): Homolog of NCBI NO: 28140256 NR Description: putative 6-phosphogluconolactonase [Elaeis
MATGGAAPTASDAGSKKKLLIFDSEEDLAVSLAKYTAELSEKFAAERGAFTAVLSGGSLIEALRKLTEPPYLDSVDWSKWHVFWVDERVVPKDHVDSNYKLAYDGFLSKVPIPPGQVYAINDALSAEGAADDYEACLKQLVKNGVISMSAATGFPRFDLQLLGMGPDGHIASLFPGHPLVNEKERWVTYIKDSPKPPPERITFTFPVINSSAYVAMVVTGAGKAAAVQKALSDKQTSSDLLPVEMAVLQDGEFTWFTDKAAVSLLQNK

SEQ ID NO: 20071 - protein, 174 aa, Zea mays subsp. mays
  peptide (1)..(174): Ceres Seq. ID no. 12418863
ARDHYLEHPNQKLLPPAPHHGASPLITANYHTHVHLRLRRRRCRSRPTPHRPPVAAGISRTADLPQKNQIQTPYLLFFPLLPHCPRRCHGHRRRRPHRLRCRVQEEVAHLRLRGGSRGFSCEVHCGAVGEVRGREGCLHRRALWRIPHRGTQEADGAAVPGFSGLEQVARLLGG

SEQ ID NO: 20072 - DNA, 481 bp, Zea mays subsp. mays
  misc_feature (1)..(481): Ceres Seq. ID no. 2790117
  misc_feature: MA Experiment ID: 108689 Result: Up-regulated in Transcription
  misc_feature: MA Experiment 108689 PARAMETER Experiment Name: Zm_Drought_Roots_P Parameter: Age (day) Value: 9
  misc_feature: MA Experiment 108689 PARAMETER Experiment Name: Zm_Drought_Roots_P Parameter: Organism Value: Zea mays
  misc_feature: MA Experiment 108689 PARAMETER Experiment Name: Zm_Drought_Roots_P Parameter: Plant Line Value: 35A19
  misc_feature: MA Experiment 108689 PARAMETER Experiment Name: Zm_Drought_Roots_P Parameter: Timepoint (hr) Value: 24
  misc_feature: MA Experiment 108689 PARAMETER Experiment Name: Zm_Drought_Roots_P Parameter: Tissue Value: Roots
  misc_feature: MA Experiment 108689 PARAMETER Experiment Name: Zm_Drought_Roots_P Parameter: Treatment Value: Drought vs. No Drought
  misc_feature: MA Experiment ID: 20000534 Result: Up-regulated in Transcription
  misc_feature: MA Experiment 20000534 PARAMETER Experiment Name: Zm_Hybrid_Pollen_P Parameter: Age (day) Value: 8
  misc_feature: MA Experiment 20000534 PARAMETER Experiment Name: Zm_Hybrid_Pollen_P Parameter: Organism Value: Zea mays
  misc_feature: MA Experiment 20000534 PARAMETER Experiment Name: Zm_Hybrid_Pollen_P Parameter: Plant Line Value: 35A19
  misc_feature: MA Experiment 20000534 PARAMETER Experiment Name: Zm_Hybrid_Pollen_P Parameter: Tissue Value: Pollen vs. Aerial
aaggagcgtggggaggaagacttggctagccactagcactaggtgtgagagtttgagtcgtggtggtgtataaagcagtcgtcaagcacaagctcctcctctccctcgtctcgcctgagcagccaagcccatccatcgttccacccacctccgcgatacgatggccgtccctcctgcccgcctcgccgcgtcctcgctcccgctgctcctcgtctggctccagctccagctgctcctcgcgtccgcctgcgaccgctgcgtgcgccactccaaggccgcctactacacctccgcgctcaccctcgcgggcggctcctgtgggtacggcaccgacgccgcctccttgagcgccgggttcctcgccgccgccgccagccccgcgctgtaccgcgccggcgtcggctgcggcgcctgcttccaggtgcggtgcaaggacaagaagctgtgcgccgcggcgggcgccagggtggtggtcacggac

SEQ ID NO: 20073 - protein, 107 aa, Zea mays subsp. mays
  peptide (1)..(107): Ceres Seq. ID no. 2790118
  misc_feature (27)..(106): Homolog of NCBI NO: 33111959 NR Description: expansin-like protein [Quercus robur]
  misc_feature (1)..(106): Homolog of NCBI NO: 34901594 NR Description: P0571D04.11 [Oryza sativa (japonica
  misc_feature (28)..(106): Homolog of NCBI NO: 30038051 NR Description: beta expansin EXPB2.1 [Mirabilis jalapa]
  misc_feature (16)..(106): Homolog of NCBI NO: 20138389 NR Description: Expansin-like 3 precursor (At-EXPL3)
  misc_feature (27)..(106): Homolog of NCBI NO: 15233841 NR Description: putative pollen allergen
  misc_feature (16)..(106): Homolog of NCBI NO: 21555265 NR Description: Expansin-like 1 precursor (At-EXPL1)
  misc_feature (12)..(106): Homolog of NCBI NO: 15231303 NR Description: putative protein
  misc_feature (8)..(106): Homolog of NCBI NO: 37536544 NR Description: putative pollen allergen [Oryza sativa (japonica
  misc_feature (15)..(106): Homolog of NCBI NO: 21654743 NR Description: expansin-like protein 1 [Oryza sativa]
  misc_feature (15)..(106): Homolog of NCBI NO: 20502989 NR Description: Putative pollen allergen [Oryza sativa (japonica
MAVPPARLAASSLPLLLVWLQLQLLLASACDRCVRHSKAAYYTSALTLAGGSCGYGTDAASLSAGFLAAAASPALYRAGVGCGACFQVRCKDKKLCAAAGARVVVTD

SEQ ID NO: 20074 - DNA, 1342 bp, Zea mays subsp. mays
  misc_feature (1)..(1342): Ceres Seq. ID no. 15180493
  misc_feature: MA Experiment ID: 108527 Result: Down-regulated in Transcription
  misc_feature: MA Experiment 108527 PARAMETER Experiment Name: Zm_5mM_NO_P Parameter: Age (day) Value: 8
  misc_feature: MA Experiment 108527 PARAMETER Experiment Name: Zm_5mM_NO_P Parameter: Organism Value: Zea mays
  misc_feature: MA Experiment 108527 PARAMETER Experiment Name: Zm_5mM_NO_P Parameter: Plant Line Value: 35A19
  misc_feature: MA Experiment 108527 PARAMETER Experiment Name: Zm_5mM_NO_P Parameter: Timepoint (hr) Value: 6
  misc_feature: MA Experiment 108527 PARAMETER Experiment Name: Zm_5mM_NO_P Parameter: Tissue Value: Aerial
  misc_feature: MA Experiment 108527 PARAMETER Experiment Name: Zm_5mM_NO_P Parameter: Treatment Value: 5mM NO vs. No Treatment
  misc_feature: MA Experiment ID: 108528 Result: Up-regulated in Transcription
  misc_feature: MA Experiment 108528 PARAMETER Experiment Name: Zm_Imbibed_Seeds_P Parameter: Age (day) Value: 5 vs. 2
  misc_feature: MA Experiment 108528 PARAMETER Experiment Name: Zm_Imbibed_Seeds_P Parameter: Organism Value: Zea mays
  misc_feature: MA Experiment 108528 PARAMETER Experiment Name: Zm_Imbibed_Seeds_P Parameter: Plant Line Value: 35A19
  misc_feature: MA Experiment 108528 PARAMETER Experiment Name: Zm_Imbibed_Seeds_P Parameter: Tissue Value: Aerial vs. Embryo
  misc_feature: MA Experiment ID: 108530 Result: Up-regulated in Transcription
  misc_feature: MA Experiment 108530 PARAMETER Experiment Name: Zm_Imbibed_Seeds_P Parameter: Age (day) Value: 6 vs. 2
  misc_feature: MA Experiment 108530 PARAMETER Experiment Name: Zm_Imbibed_Seeds_P Parameter: Organism Value: Zea mays
  misc_feature: MA Experiment 108530 PARAMETER Experiment Name: Zm_Imbibed_Seeds_P Parameter: Plant Line Value: 35A19
  misc_feature: MA Experiment 108530 PARAMETER Experiment Name: Zm_Imbibed_Seeds_P Parameter: Tissue Value: Aerial vs. Embryo
  misc_feature: MA Experiment ID: 108536 Result: Down-regulated in Transcription
  misc_feature: MA Experiment 108536 PARAMETER Experiment Name: Zm_Meristem_P Parameter: Age (day) Value: 8
  misc_feature: MA Experiment 108536 PARAMETER Experiment Name: Zm_Meristem_P Parameter: Organism Value: Zea mays
  misc_feature: MA Experiment 108536 PARAMETER Experiment Name: Zm_Meristem_P Parameter: Plant Line Value: 35A19
  misc_feature: MA Experiment 108536 PARAMETER Experiment Name: Zm_Meristem_P Parameter: Tissue Value: Shoot Meristem vs. Above Shoot Meristem
  misc_feature: MA Experiment ID: 108545 Result: Up-regulated in Transcription
  misc_feature: MA Experiment 108545 PARAMETER Experiment Name: Zm_Imbibed_Seeds_P Parameter: Age (day) Value: 3 vs. 2
  misc_feature: MA Experiment 108545 PARAMETER Experiment Name: Zm_Imbibed_Seeds_P Parameter: Organism Value: Zea mays
  misc_feature: MA Experiment 108545 PARAMETER Experiment Name: Zm_Imbibed_Seeds_P Parameter: Plant Line Value: 35A19
  misc_feature: MA Experiment 108545 PARAMETER Experiment Name: Zm_Imbibed_Seeds_P Parameter: Tissue Value: Aerial vs. Embryo
  misc_feature: MA Experiment ID: 108547 Result: Up-regulated in Transcription
  misc_feature: MA Experiment 108547 PARAMETER Experiment Name: Zm_Imbibed_Seeds_P Parameter: Age (day) Value: 4 vs. 2
  misc_feature: MA Experiment 108547 PARAMETER Experiment Name: Zm_Imbibed_Seeds_P Parameter: Organism Value: Zea mays
  misc_feature: MA Experiment 108547 PARAMETER Experiment Name: Zm_Imbibed_Seeds_P Parameter: Plant Line Value: 35A19
  misc_feature: MA Experiment 108547 PARAMETER Experiment Name: Zm_Imbibed_Seeds_P Parameter: Tissue Value: Aerial vs. Embryo
  misc_feature: MA Experiment ID: 20000487 Result: Up-regulated in Transcription
  misc_feature: MA Experiment 20000487 PARAMETER Experiment Name: Zm_50mM_NH4NO3_L_to_H_P Parameter: Organism Value: Zea mays
  misc_feature: MA Experiment 20000487 PARAMETER Experiment Name: Zm_50mM_NH4NO3_L_to_H_P Parameter: Timepoint (hr) Value: 4
  misc_feature: MA Experiment 20000487 PARAMETER Experiment Name: Zm_50mM_NH4NO3_L_to_H_P Parameter: Tissue Value: Leaves
  misc_feature: MA Experiment 20000487 PARAMETER Experiment Name: Zm_50mM_NH4NO3_L_to_H_P Parameter: Treatment Value: 50mM NH4NO3 vs. 100mM Mannitol
  misc_feature: MA Experiment ID: 20000534 Result: Down-regulated in Transcription
  misc_feature: MA Experiment 20000534 PARAMETER Experiment Name: Zm_Hybrid_Pollen_P Parameter: Age (day) Value: 8
  misc_feature: MA Experiment 20000534 PARAMETER Experiment Name: Zm_Hybrid_Pollen_P Parameter: Organism Value: Zea mays
  misc_feature: MA Experiment 20000534 PARAMETER Experiment Name: Zm_Hybrid_Pollen_P Parameter: Plant Line Value: 35A19
  misc_feature: MA Experiment 20000534 PARAMETER Experiment Name: Zm_Hybrid_Pollen_P Parameter: Tissue Value: Pollen vs. Aerial
  misc_feature: MA Experiment ID: 20000535 Result: Up-regulated in Transcription
  misc_feature: MA Experiment 20000535 PARAMETER Experiment Name: Zm_Hybrid_Seed_Dev_P Parameter: DAP Value: 30 vs. 12
  misc_feature: MA Experiment 20000535 PARAMETER Experiment Name: Zm_Hybrid_Seed_Dev_P Parameter: Organism Value: Zea mays
  misc_feature: MA Experiment 20000535 PARAMETER Experiment Name: Zm_Hybrid_Seed_Dev_P Parameter: Plant Line Value: 35A19
  misc_feature: MA Experiment 20000535 PARAMETER Experiment Name: Zm_Hybrid_Seed_Dev_P Parameter: Tissue Value: Embryo vs. Unfert Floret
  misc_feature: MA Experiment ID: 20000626 Result: Down-regulated in Transcription
  misc_feature: MA Experiment 20000626 PARAMETER Experiment Name: Zm_Herbicide-Treatments_P Parameter: Timepoint (hr) Value: 12
  misc_feature: MA Experiment 20000626 PARAMETER Experiment Name: Zm_Herbicide-Treatments_P Parameter: Tissue Value: Aerial
  misc_feature: MA Experiment 20000626 PARAMETER Experiment Name: Zm_Herbicide-Treatments_P Parameter: Treatment Value: Roundup vs. No Treatment
gtccttgccatggccatccccaccgcccccgccctcctcttcccctccgttctccctaactcattcccccgccggacaccctggcgacacctcgtccggcggaaaccgcgtcacctccgcgcgggccgcccacgcctgcaggcgccggcgccggctcctcccccggtggcggaggtcgcggcggagcgggacgacacgcctccgctcaggctgctcgagccgccgcaggaggacgaccccttcccgcccgagatggagcccgcggaccctgatttctaccggataggatatgcgcggatgatgcgcgcctatgggatcgagttcctcgaaggccccgacgggatgggcgtctacgcttcccgggacgtggagccacttcgcagagctagagtgattatggagattccgttggagctgatgctgactataactcaaaagaaaccttggatgtttttccctgacattattccactaggccatcctatatttgatgttatcgagtcaacagatccagagacagattgggatctaagattagcatgtcttcttctatatgcatttgatatagaagacaacttttggcagttatattctgattttttgccaagtgctgatgaatgcactagtttgctgctggcaccaaaggaagatctaatggaactagaagatgaagatcttgcttcacaaatgttaaaacaccaggaacgagcaattgacttttggcaaaagcattgggacaaaccaattcctctaaagctgaaacgccttgcacgtgaccatgagagatttctctgggcactgagtatagtacagtctcgttctgtcaacttgaagttgagaatgggagccttcatccaagatgcaaatgtgctagctccttatgctgatatgttgaaccactcacccaatgctaattgcttcctgcattggcgttttaaagatcgtatgcttgaagttatgattaaggctggacaagctatcaagaaaggagacgagatgacgatagattatatgagtggcgtcaacagcaaatttgtggaaagatatgggttctcatcaccaacgaatccttgggagctcataaatttctcgagtcctgcaacaattcacatggattccttcttatcggtcttcaatatcgctggcttgcatgatgagctgtaccacaattctgcattgacctcagtagtagaaaccgactttgtggacggagcagtcgtagcagcagccagagcattgccgacatggtcagatggtgatgttcctgcaattcctagtgtggagagaaaatctgctcaggcactgcaagaggagtgccgccaaatgttggattcattcccaa

SEQ ID NO: 20075 - protein, 447 aa, Zea mays subsp. mays
  peptide (1)..(447): Ceres Seq. ID no. 15180494
  misc_feature (297)..(340): Pfam Name: SET domain Pfam Description: SET domain
  misc_feature (163)..(300): Homolog of NCBI NO: 7485732 NR Description: hypothetical protein F18F4.220 - Arabidopsis
  misc_feature (297)..(446): Homolog of NCBI NO: 30685001 NR Description: expressed protein [Arabidopsis thaliana]
  misc_feature (297)..(446): Homolog of NCBI NO: 7485733 NR Description: hypothetical protein F18F4.230 - Arabidopsis
  misc_feature (41)..(245): Homolog of NCBI NO: 7485732 NR Description: hypothetical protein F18F4.220 - Arabidopsis
  misc_feature (41)..(300): Homolog of NCBI NO: 30684996 NR Description: expressed protein [Arabidopsis thaliana]
  misc_feature (41)..(446): Homolog of NCBI NO: 28393566 NR Description: unknown protein [Arabidopsis thaliana]
VLAMAIPTAPALLFPSVLPNSFPRRTPWRHLVRRKPRHLRAGRPRLQAPAPAPPPVAEVAAERDDTPPLRLLEPPQEDDPFPPEMEPADPDFYRIGYARMMRAYGIEFLEGPDGMGVYASRDVEPLRRARVIMEIPLELMLTITQKKPWMFFPDIIPLGHPIFDVIESTDPETDWDLRLACLLLYAFDIEDNFWQLYSDFLPSADECTSLLLAPKEDLMELEDEDLASQMLKHQERAIDFWQKHWDKPIPLKLKRLARDHERFLWALSIVQSRSVNLKLRMGAFIQDANVLAPYADMLNHSPNANCFLHWRFKDRMLEVMIKAGQAIKKGDEMTIDYMSGVNSKFVERYGFSSPTNPWELINFSSPATIHMDSFLSVFNIAGLHDELYHNSALTSVVETDFVDGAVVAAARALPTWSDGDVPAIPSVERKSAQALQEECRQMLDSFP

SEQ ID NO: 20076 - protein, 444 aa, Zea mays subsp. mays
  peptide (1)..(444): Ceres Seq. ID no. 15180495
  misc_feature (294)..(337): Pfam Name: SET domain Pfam Description: SET domain
  misc_feature (160)..(297): Homolog of NCBI NO: 7485732 NR Description: hypothetical protein F18F4.220 - Arabidopsis
  misc_feature (294)..(443): Homolog of NCBI NO: 30685001 NR Description: expressed protein [Arabidopsis thaliana]
  misc_feature (294)..(443): Homolog of NCBI NO: 7485733 NR Description: hypothetical protein F18F4.230 - Arabidopsis
  misc_feature (38)..(242): Homolog of NCBI NO: 7485732 NR Description: hypothetical protein F18F4.220 - Arabidopsis
  misc_feature (38)..(297): Homolog of NCBI NO: 30684996 NR Description: expressed protein [Arabidopsis thaliana]
  misc_feature (38)..(443): Homolog of NCBI NO: 28393566 NR Description: unknown protein [Arabidopsis thaliana]
MAIPTAPALLFPSVLPNSFPRRTPWRHLVRRKPRHLRAGRPRLQAPAPAPPPVAEVAAERDDTPPLRLLEPPQEDDPFPPEMEPADPDFYRIGYARMMRAYGIEFLEGPDGMGVYASRDVEPLRRARVIMEIPLELMLTITQKKPWMFFPDIIPLGHPIFDVIESTDPETDWDLRLACLLLYAFDIEDNFWQLYSDFLPSADECTSLLLAPKEDLMELEDEDLASQMLKHQERAIDFWQKHWDKPIPLKLKRLARDHERFLWALSIVQSRSVNLKLRMGAFIQDANVLAPYADMLNHSPNANCFLHWRFKDRMLEVMIKAGQAIKKGDEMTIDYMSGVNSKFVERYGFSSPTNPWELINFSSPATIHMDSFLSVFNIAGLHDELYHNSALTSVVETDFVDGAVVAAARALPTWSDGDVPAIPSVERKSAQALQEECRQMLDSFP

SEQ ID NO: 20077 - protein, 363 aa, Zea mays subsp. mays
  peptide (1)..(363): Ceres Seq. ID no. 15180496
  misc_feature (213)..(256): Pfam Name: SET domain Pfam Description: SET domain
  misc_feature (79)..(216): Homolog of NCBI NO: 7485732 NR Description: hypothetical protein F18F4.220 - Arabidopsis
  misc_feature (213)..(362): Homolog of NCBI NO: 30685001 NR Description: expressed protein [Arabidopsis thaliana]
  misc_feature (213)..(362): Homolog of NCBI NO: 7485733 NR Description: hypothetical protein F18F4.230 - Arabidopsis
  misc_feature (1)..(161): Homolog of NCBI NO: 7485732 NR Description: hypothetical protein F18F4.220 - Arabidopsis
  misc_feature (1)..(216): Homolog of NCBI NO: 30684996 NR Description: expressed protein [Arabidopsis thaliana]
  misc_feature (1)..(362): Homolog of NCBI NO: 28393566 NR Description: unknown protein [Arabidopsis thaliana]
MEPADPDFYRIGYARMMRAYGIEFLEGPDGMGVYASRDVEPLRRARVIMEIPLELMLTITQKKPWMFFPDIIPLGHPIFDVIESTDPETDWDLRLACLLLYAFDIEDNFWQLYSDFLPSADECTSLLLAPKEDLMELEDEDLASQMLKHQERAIDFWQKHWDKPIPLKLKRLARDHERFLWALSIVQSRSVNLKLRMGAFIQDANVLAPYADMLNHSPNANCFLHWRFKDRMLEVMIKAGQAIKKGDEMTIDYMSGVNSKFVERYGFSSPTNPWELINFSSPATIHMDSFLSVFNIAGLHDELYHNSALTSVVETDFVDGAVVAAARALPTWSDGDVPAIPSVERKSAQALQEECRQMLDSFP

SEQ ID NO: 20078 - DNA, 1431 bp, Zea mays subsp. mays
  misc_feature (1)..(1431): Ceres Seq. ID no. 12419006
  misc_feature: MA Experiment ID: 108528 Result: Down-regulated in Transcription
  misc_feature: MA Experiment 108528 PARAMETER Experiment Name: Zm_Imbibed_Seeds_P Parameter: Age (day) Value: 5 vs. 2
  misc_feature: MA Experiment 108528 PARAMETER Experiment Name: Zm_Imbibed_Seeds_P Parameter: Organism Value: Zea mays
  misc_feature: MA Experiment 108528 PARAMETER Experiment Name: Zm_Imbibed_Seeds_P Parameter: Plant Line Value: 35A19
  misc_feature: MA Experiment 108528 PARAMETER Experiment Name: Zm_Imbibed_Seeds_P Parameter: Tissue Value: Aerial vs. Embryo
  misc_feature: MA Experiment ID: 108530 Result: Down-regulated in Transcription
  misc_feature: MA Experiment 108530 PARAMETER Experiment Name: Zm_Imbibed_Seeds_P Parameter: Age (day) Value: 6 vs. 2
  misc_feature: MA Experiment 108530 PARAMETER Experiment Name: Zm_Imbibed_Seeds_P Parameter: Organism Value: Zea mays
  misc_feature: MA Experiment 108530 PARAMETER Experiment Name: Zm_Imbibed_Seeds_P Parameter: Plant Line Value: 35A19
  misc_feature: MA Experiment 108530 PARAMETER Experiment Name: Zm_Imbibed_Seeds_P Parameter: Tissue Value: Aerial vs. Embryo
  misc_feature: MA Experiment ID: 108535 Result: Up-regulated in Transcription
  misc_feature: MA Experiment 108535 PARAMETER Experiment Name: Zm_Meristem_P Parameter: Age (day) Value: 8
  misc_feature: MA Experiment 108535 PARAMETER Experiment Name: Zm_Meristem_P Parameter: Organism Value: Zea mays
  misc_feature: MA Experiment 108535 PARAMETER Experiment Name: Zm_Meristem_P Parameter: Plant Line Value: 35A19
  misc_feature: MA Experiment 108535 PARAMETER Experiment Name: Zm_Meristem_P Parameter: Tissue Value: Root Meristem vs. Above Root Meristem
  misc_feature: MA Experiment ID: 108544 Result: Down-regulated in Transcription
  misc_feature: MA Experiment ID: 108545 Result: Down-regulated in Transcription
  misc_feature: MA Experiment 108545 PARAMETER Experiment Name: Zm_Imbibed_Seeds_P Parameter: Age (day) Value: 3 vs. 2
  misc_feature: MA Experiment 108545 PARAMETER Experiment Name: Zm_Imbibed_Seeds_P Parameter: Organism Value: Zea mays
  misc_feature: MA Experiment 108545 PARAMETER Experiment Name: Zm_Imbibed_Seeds_P Parameter: Plant Line Value: 35A19
  misc_feature: MA Experiment 108545 PARAMETER Experiment Name: Zm_Imbibed_Seeds_P Parameter: Tissue Value: Aerial vs. Embryo
  misc_feature: MA Experiment ID: 108547 Result: Down-regulated in Transcription
  misc_feature: MA Experiment 108547 PARAMETER Experiment Name: Zm_Imbibed_Seeds_P Parameter: Age (day) Value: 4 vs. 2
  misc_feature: MA Experiment 108547 PARAMETER Experiment Name: Zm_Imbibed_Seeds_P Parameter: Organism Value: Zea mays
  misc_feature: MA Experiment 108547 PARAMETER Experiment Name: Zm_Imbibed_Seeds_P Parameter: Plant Line Value: 35A19
  misc_feature: MA Experiment 108547 PARAMETER Experiment Name: Zm_Imbibed_Seeds_P Parameter: Tissue Value: Aerial vs. Embryo
  misc_feature: MA Experiment ID: 20000108 Result: Up-regulated in Transcription
  misc_feature: MA Experiment 20000108 PARAMETER Experiment Name: Zm_Root-Tips_P Parameter: Age (day) Value: 12
  misc_feature: MA Experiment 20000108 PARAMETER Experiment Name: Zm_Root-Tips_P Parameter: Organism Value: Zea mays
  misc_feature: MA Experiment 20000108 PARAMETER Experiment Name: Zm_Root-Tips_P Parameter: Tissue Value: Root tips vs. Root mid region    35
  misc_feature: MA Experiment 20000108 PARAMETER Experiment Name: Zm_Root-Tips_P Parameter: Tissue Value: Root tips vs. Root mid region   Sequence Listing-Misc Features (4)
  misc_feature: MA Experiment ID: 20001614 Result: Up-regulated in Transcription
  misc_feature: MA Experiment 20001614 PARAMETER Experiment Name: Zm_50ppm_KNO3_L-to-H_P Parameter: Age (day) Value: 21
  misc_feature: MA Experiment 20001614 PARAMETER Experiment Name: Zm_50ppm_KNO3_L-to-H_P Parameter: Organism Value: Zea mays
  misc_feature: MA Experiment 20001614 PARAMETER Experiment Name: Zm_50ppm_KNO3_L-to-H_P Parameter: Plant Line Value: 35A19
  misc_feature: MA Experiment 20001614 PARAMETER Experiment Name: Zm_50ppm_KNO3_L-to-H_P Parameter: Timepoint (hr) Value: 48
  misc_feature: MA Experiment 20001614 PARAMETER Experiment Name: Zm_50ppm_KNO3_L-to-H_P Parameter: Tissue Value: Roots
  misc_feature: MA Experiment 20001614 PARAMETER Experiment Name: Zm_50ppm_KNO3_L-to-H_P Parameter: Treatment Value: 50ppm KNO3 vs. 50ppm KCl
aatgaaggacacaaagaagcccacgcgggcgtcgtctcgcttaggcgggagggtcgtcggcgtggcatccatgcttctcttcgtctcgttggggttcgttctcggcgtgacctcctccaacgccatgttcatccgatactacctccctttcatgccaccgttacgctctagtgctgcgccgtcgtcttcgcctccgccgctgacgacaccactgacaccgtcgcaaacgccgccgccgccgccgccgccgccgctgccacaaaacccgcagctgcggtcggcgggcttcctttccccgagcggcgtcatgcacaacatgaccgacgaggaactgtactggcgagcgtccatggcgccgatggtccgccgcacgccggacagccgcgtgcccaaggtggctttcttgttcctggtcagggggaagctgcctctccggcctctgtgggagaagttcttcgcgggccacgaaggccggtactccatttacgtgcacgcccacccgtcctacaccggctcgccgccgacggactccccgttctacggccgctacatcccgagccagataacgaaatggggcgacgcgagcctggtggaggcggagcggcggctcctggcaaacgcgctcctggacctgggcaacgagcggttcgcgctcttctccgaggcgtgcatcccggtgtacgacttccccaccgtgcacgccttcctgacaggctccgacaccagcttcgtggactgctacgagaacggcggcagccggtcgcgctaccggcccttcttcgccacccgcaacatcacgctggcgcggtggcgcaagggcgcgcagtggttcgagatggaccgcgcgctggcgctggagtccgtcgcggacggctcctgcttcccggcgttccgcgacttctgcgtggggcggagggagtgcctcatcgacgagcactacctgccgacgctggtgagcctgctggggtggggccgccgcaacgccaaccgcacgctcacgtacgcggactggaagcggcccgtcaaccggcacccgcacacccacggcccggacgaggtgacggaggagcggatcagggagatcagggaggaaggcggcaggcggtgcttctacaacggagccaggagaggcatctgcaacctgttcgcgcgcaagttctcgccggacacgctcgagccgctgctccggctggcgcccaaggtcatggggttcgggtgacctgaccagacgatcgaccgaccggagcaggaggcagtgtaccatagcattctactattctttgcgccgtggatgatcgacccaggttgagctgggaatcacaggcagagagtcgactcgagtccaccatcaggctatcaggactcaggaggagaataagctctttcttttgcgaaccatatacacagtgtatcatgaacatcccgtttgtc

SEQ ID NO: 20079 - protein, 405 aa, Zea mays subsp. mays
  peptide (1)..(405): Ceres Seq. ID no. 12419007
  misc_feature (168)..(277): Pfam Name: Arabidopsis protein of unknown function, DUF266 Pfam Description: Arabidopsis protein of unknown function, DUF266
  misc_feature (99)..(404): Homolog of NCBI NO: 21554566 NR Description: unknown [Arabidopsis thaliana]
  misc_feature (99)..(404): Homolog of NCBI NO: 18402952 NR Description: expressed protein
  misc_feature (99)..(405): Homolog of NCBI NO: 15218028 NR Description: hypothetical protein; protein id: At1g51770.1
  misc_feature (62)..(404): Homolog of NCBI NO: 15221384 NR Description: hypothetical protein; protein id: At1g68380.1
  misc_feature (89)..(404): Homolog of NCBI NO: 15239155 NR Description: putative protein
  misc_feature (96)..(402): Homolog of NCBI NO: 34907318 NR Description: contains ESTs
  misc_feature (67)..(404): Homolog of NCBI NO: 15221386 NR Description: hypothetical protein; protein id: At1g68390.1
  misc_feature (96)..(405): Homolog of NCBI NO: 34895606 NR Description: OSJNBa0083M16.15 [Oryza sativa (japonica
  misc_feature (95)..(405): Homolog of NCBI NO: 34895612 NR Description: OSJNBa0083M16.18 [Oryza sativa (japonica
  misc_feature (2)..(405): Homolog of NCBI NO: 37531372 NR Description: hypothetical protein [Oryza sativa (japonica
MKDTKKPTRASSRLGGRVVGVASMLLFVSLGFVLGVTSSNAMFIRYYLPFMPPLRSSAAPSSSPPPLTTPLTPSQTPPPPPPPPLPQNPQLRSAGFLSPSGVMHNMTDEELYWRASMAPMVRRTPDSRVPKVAFLFLVRGKLPLRPLWEKFFAGHEGRYSIYVHAHPSYTGSPPTDSPFYGRYIPSQITKWGDASLVEAERRLLANALLDLGNERFALFSEACIPVYDFPTVHAFLTGSDTSFVDCYENGGSRSRYRPFFATRNITLARWRKGAQWFEMDRALALESVADGSCFPAFRDFCVGRRECLIDEHYLPTLVSLLGWGRRNANRTLTYADWKRPVNRHPHTHGPDEVTEERIREIREEGGRRCFYNGARRGICNLFARKFSPDTLEPLLRLAPKVMGFG

SEQ ID NO: 20080 - protein, 382 aa, Zea mays subsp. mays
  peptide (1)..(382): Ceres Seq. ID no. 12419008
  misc_feature (145)..(254): Pfam Name: Arabidopsis protein of unknown function, DUF266 Pfam Description: Arabidopsis protein of unknown function, DUF266
  misc_feature (76)..(381): Homolog of NCBI NO: 21554566 NR Description: unknown [Arabidopsis thaliana]
  misc_feature (76)..(381): Homolog of NCBI NO: 18402952 NR Description: expressed protein
  misc_feature (76)..(382): Homolog of NCBI NO: 15218028 NR Description: hypothetical protein; protein id: At1g51770.1
  misc_feature (39)..(381): Homolog of NCBI NO: 15221384 NR Description: hypothetical protein; protein id: At1g68380.1
  misc_feature (66)..(381): Homolog of NCBI NO: 15239155 NR Description: putative protein
  misc_feature (73)..(379): Homolog of NCBI NO: 34907318 NR Description: contains ESTs
  misc_feature (44)..(381): Homolog of NCBI NO: 15221386 NR Description: hypothetical protein; protein id: At1g68390.1
  misc_feature (73)..(382): Homolog of NCBI NO: 34895606 NR Description: OSJNBa0083M16.15 [Oryza sativa (japonica
  misc_feature (72)..(382): Homolog of NCBI NO: 34895612 NR Description: OSJNBa0083M16.18 [Oryza sativa (japonica
  misc_feature (1)..(382): Homolog of NCBI NO: 37531372 NR Description: hypothetical protein [Oryza sativa (japonica
MLLFVSLGFVLGVTSSNAMFIRYYLPFMPPLRSSAAPSSSPPPLTTPLTPSQTPPPPPPPPLPQNPQLRSAGFLSPSGVMHNMTDEELYWRASMAPMVRRTPDSRVPKVAFLFLVRGKLPLRPLWEKFFAGHEGRYSIYVHAHPSYTGSPPTDSPFYGRYIPSQITKWGDASLVEAERRLLANALLDLGNERFALFSEACIPVYDFPTVHAFLTGSDTSFVDCYENGGSRSRYRPFFATRNITLARWRKGAQWFEMDRALALESVADGSCFPAFRDFCVGRRECLIDEHYLPTLVSLLGWGRRNANRTLTYADWKRPVNRHPHTHGPDEVTEERIREIREEGGRRCFYNGARRGICNLFARKFSPDTLEPLLRLAPKVMGFG

SEQ ID NO: 20081 - protein, 364 aa, Zea mays subsp. mays
  peptide (1)..(364): Ceres Seq. ID no. 12419009
  misc_feature (127)..(236): Pfam Name: Arabidopsis protein of unknown function, DUF266 Pfam Description: Arabidopsis protein of unknown function, DUF266
  misc_feature (58)..(363): Homolog of NCBI NO: 21554566 NR Description: unknown [Arabidopsis thaliana]
  misc_feature (58)..(363): Homolog of NCBI NO: 18402952 NR Description: expressed protein
  misc_feature (58)..(364): Homolog of NCBI NO: 15218028 NR Description: hypothetical protein; protein id: At1g51770.1
  misc_feature (21)..(363): Homolog of NCBI NO: 15221384 NR Description: hypothetical protein; protein id: At1g68380.1
  misc_feature (48)..(363): Homolog of NCBI NO: 15239155 NR Description: putative protein
  misc_feature (55)..(361): Homolog of NCBI NO: 34907318 NR Description: contains ESTs
  misc_feature (26)..(363): Homolog of NCBI NO: 15221386 NR Description: hypothetical protein; protein id: At1g68390.1
  misc_feature (55)..(364): Homolog of NCBI NO: 34895606 NR Description: OSJNBa0083M16.15 [Oryza sativa (japonica
  misc_feature (54)..(364): Homolog of NCBI NO: 34895612 NR Description: OSJNBa0083M16.18 [Oryza sativa (japonica
  misc_feature (1)..(364): Homolog of NCBI NO: 37531372 NR Description: hypothetical protein [Oryza sativa (japonica
MFIRYYLPFMPPLRSSAAPSSSPPPLTTPLTPSQTPPPPPPPPLPQNPQLRSAGFLSPSGVMHNMTDEELYWRASMAPMVRRTPDSRVPKVAFLFLVRGKLPLRPLWEKFFAGHEGRYSIYVHAHPSYTGSPPTDSPFYGRYIPSQITKWGDASLVEAERRLLANALLDLGNERFALFSEACIPVYDFPTVHAFLTGSDTSFVDCYENGGSRSRYRPFFATRNITLARWRKGAQWFEMDRALALESVADGSCFPAFRDFCVGRRECLIDEHYLPTLVSLLGWGRRNANRTLTYADWKRPVNRHPHTHGPDEVTEERIREIREEGGRRCFYNGARRGICNLFARKFSPDTLEPLLRLAPKVMGFG

SEQ ID NO: 20082 - DNA, 1567 bp, Zea mays subsp. mays
  misc_feature (1)..(1567): Ceres Seq. ID no. 12369608
  misc_feature: MA Experiment ID: 108544 Result: Down-regulated in Transcription
  misc_feature: MA Experiment ID: 20000108 Result: Up-regulated in Transcription
  misc_feature: MA Experiment 20000108 PARAMETER Experiment Name: Zm_Root-Tips_P Parameter: Age (day) Value: 12
  misc_feature: MA Experiment 20000108 PARAMETER Experiment Name: Zm_Root-Tips_P Parameter: Organism Value: Zea mays
  misc_feature: MA Experiment 20000108 PARAMETER Experiment Name: Zm_Root-Tips_P Parameter: Tissue Value: Root tips vs. Root mid region    35
  misc_feature: MA Experiment 20000108 PARAMETER Experiment Name: Zm_Root-Tips_P Parameter: Tissue Value: Root tips vs. Root mid region   Sequence Listing-Misc Features (4)
  misc_feature: MA Experiment ID: 20000480 Result: Down-regulated in Transcription
  misc_feature: MA Experiment 20000480 PARAMETER Experiment Name: Zm_Drought_P Parameter: Age (day) Value: 11
  misc_feature: MA Experiment 20000480 PARAMETER Experiment Name: Zm_Drought_P Parameter: Organism Value: Zea mays
  misc_feature: MA Experiment 20000480 PARAMETER Experiment Name: Zm_Drought_P Parameter: Plant Line Value: 35A19
  misc_feature: MA Experiment 20000480 PARAMETER Experiment Name: Zm_Drought_P Parameter: Timepoint (hr) Value: 72
  misc_feature: MA Experiment 20000480 PARAMETER Experiment Name: Zm_Drought_P Parameter: Tissue Value: Aerial
  misc_feature: MA Experiment 20000480 PARAMETER Experiment Name: Zm_Drought_P Parameter: Treatment Value: Drought vs. No Drought
gcacgagaccattacctagaacatcctaatcgaaaatctttataagcaagaacaagttctgcgaaaacgttactataatacaattgaagatatgaaaggaaaaataagagttttttgtcgcttgcgccctctaagcgacaaggaactttcttttgaggagaaaaatatagtttgcagtcctgatgaatttacaattgcacatccatggaaagatgagaagtcgaagcaacatatatatgatcgtgtttttgatgcaaacacaagtcaagaagaaatatttgaggatactaagtacctggtacaatcagctgttgatggatataacgtttgcatatttgcatatggtcaaactggttctggaaagactttcactatttatggttcagataacaatcctggtcttactccaagggccacatctgaactttttagggtgataaagcgcgatgggaacaaatattcattttcattgaagacatatatggtggagctttatcaagataatcttgtggacctattgttgcccagaaatgtgaagccgctaaagttagagataaaaaaagattccaagggtgttgttactgttgaaaatgcgacagttgtgagcatttcgagtattgaggaactgagggctataatttcaagaggctctgagaggaggcacactgccggaactaatatgaatgatgagagttcaaggtctcatttaattctttcagtcattattgaaagtacaaatcttcaaacccaatcatatgcaagaggcaagctaagttttgtggaccttgctggttctgagagggtgaaaaaatctggttccgcaggaaagcaactgaaagaagcacaaagtataaacaaatctctttctgctttggctgatgttattggtgctttatcttctgatggacaacatataccttaccggaaccataagttaacaatgcttatgagtgattctctgggagggaatgcgaagaccttgatgtttgtgaatgtttcaccagcagagtctaacttggaggagacttacaactcgctgatgtatgcttcacgcgttcgatgcattgttaatgatacgagcaagcatgttgctccaaaagaaatcatgagattgaagaagttgatcgcctactggaaggagcaagcaggcaagcggagtgatgaggacgagctagaggaggtaaaggaagagaggatctcaaaagagagagcagacaatcgcctgactggctgacaacttgacacaaccactgaatgctcctggttccgttcttccattacctggagaagaggtgattgatgctgatgagcatttgcaactgccacgagttctgcgatcgctctctaacagaatgttccgatatcatctgacctgtacatacagtagctacgtattatatactatggcagcgatgcccgtttgtacaaagaggaatgtagcacacattgatagaaagggaaaaggttgtgtgactgggaggcttgatgcgccctaagcctataacagctggatcatgtctttttccccccttggagcaggtatttaaagcataatgtgagcgtcctt

SEQ ID NO: 20083 - protein, 380 aa, Zea mays subsp. mays
  peptide (1)..(380): Ceres Seq. ID no. 12369609
  misc_feature (1)..(376): Homolog of NCBI NO: 1237102 NR Description: calmodulin-binding protein
  misc_feature (1)..(377): Homolog of NCBI NO: 7489245 NR Description: kinesin heavy chain-like protein (clone PKCBP) -
  misc_feature (1)..(376): Homolog of NCBI NO: 17380674 NR Description: putative kinesin calmodulin-binding protein
  misc_feature (1)..(376): Homolog of NCBI NO: 2586157 NR Description: kinesin-like calmodulin-binding protein
  misc_feature (1)..(376): Homolog of NCBI NO: 30698170 NR Description: kinesin-like calmodulin-binding protein
  misc_feature (1)..(376): Homolog of NCBI NO: 30698168 NR Description: kinesin-like calmodulin-binding protein
  misc_feature (1)..(377): Homolog of NCBI NO: 7489162 NR Description: kinesin-related protein tck1 - common tobacco
  misc_feature (1)..(377): Homolog of NCBI NO: 30983603 NR Description: kinesin-like calmodulin binding protein
  misc_feature (1)..(379): Homolog of NCBI NO: 29367597 NR Description: kinesin-like calmodulin-binding protein-like
  misc_feature (1)..(379): Homolog of NCBI NO: 10130006 NR Description: kinesin-like calmodulin binding protein [Zea mays]
MKGKIRVFCRLRPLSDKELSFEEKNIVCSPDEFTIAHPWKDEKSKQHIYDRVFDANTSQEEIFEDTKYLVQSAVDGYNVCIFAYGQTGSGKTFTIYGSDNNPGLTPRATSELFRVIKRDGNKYSFSLKTYMVELYQDNLVDLLLPRNVKPLKLEIKKDSKGVVTVENATVVSISSIEELRAIISRGSERRHTAGTNMNDESSRSHLILSVIIESTNLQTQSYARGKLSFVDLAGSERVKKSGSAGKQLKEAQSINKSLSALADVIGALSSDGQHIPYRNHKLTMLMSDSLGGNAKTLMFVNVSPAESNLEETYNSLMYASRVRCIVNDTSKHVAPKEIMRLKKLIAYWKEQAGKRSDEDELEEVKEERISKERADNRLTG

SEQ ID NO: 20084 - protein, 250 aa, Zea mays subsp. mays
  peptide (1)..(250): Ceres Seq. ID no. 12369610
  misc_feature (1)..(246): Homolog of NCBI NO: 1237102 NR Description: calmodulin-binding protein
  misc_feature (1)..(247): Homolog of NCBI NO: 7489245 NR Description: kinesin heavy chain-like protein (clone PKCBP) -
  misc_feature (1)..(246): Homolog of NCBI NO: 17380674 NR Description: putative kinesin calmodulin-binding protein
  misc_feature (1)..(246): Homolog of NCBI NO: 2586157 NR Description: kinesin-like calmodulin-binding protein
  misc_feature (1)..(246): Homolog of NCBI NO: 30698170 NR Description: kinesin-like calmodulin-binding protein
  misc_feature (1)..(246): Homolog of NCBI NO: 30698168 NR Description: kinesin-like calmodulin-binding protein
  misc_feature (1)..(247): Homolog of NCBI NO: 7489162 NR Description: kinesin-related protein tck1 - common tobacco
  misc_feature (1)..(247): Homolog of NCBI NO: 30983603 NR Description: kinesin-like calmodulin binding protein
  misc_feature (1)..(249): Homolog of NCBI NO: 29367597 NR Description: kinesin-like calmodulin-binding protein-like
  misc_feature (1)..(249): Homolog of NCBI NO: 10130006 NR Description: kinesin-like calmodulin binding protein [Zea mays]
MVELYQDNLVDLLLPRNVKPLKLEIKKDSKGVVTVENATVVSISSIEELRAIISRGSERRHTAGTNMNDESSRSHLILSVIIESTNLQTQSYARGKLSFVDLAGSERVKKSGSAGKQLKEAQSINKSLSALADVIGALSSDGQHIPYRNHKLTMLMSDSLGGNAKTLMFVNVSPAESNLEETYNSLMYASRVRCIVNDTSKHVAPKEIMRLKKLIAYWKEQAGKRSDEDELEEVKEERISKERADNRLTG

SEQ ID NO: 20085 - DNA, 466 bp, Zea mays subsp. mays
  misc_feature (1)..(466): Ceres Seq. ID no. 11028222
  misc_feature: MA Experiment ID: 108530 Result: Up-regulated in Transcription
  misc_feature: MA Experiment 108530 PARAMETER Experiment Name: Zm_Imbibed_Seeds_P Parameter: Age (day) Value: 6 vs. 2
  misc_feature: MA Experiment 108530 PARAMETER Experiment Name: Zm_Imbibed_Seeds_P Parameter: Organism Value: Zea mays
  misc_feature: MA Experiment 108530 PARAMETER Experiment Name: Zm_Imbibed_Seeds_P Parameter: Plant Line Value: 35A19
  misc_feature: MA Experiment 108530 PARAMETER Experiment Name: Zm_Imbibed_Seeds_P Parameter: Tissue Value: Aerial vs. Embryo
  misc_feature: MA Experiment ID: 108535 Result: Down-regulated in Transcription
  misc_feature: MA Experiment 108535 PARAMETER Experiment Name: Zm_Meristem_P Parameter: Age (day) Value: 8
  misc_feature: MA Experiment 108535 PARAMETER Experiment Name: Zm_Meristem_P Parameter: Organism Value: Zea mays
  misc_feature: MA Experiment 108535 PARAMETER Experiment Name: Zm_Meristem_P Parameter: Plant Line Value: 35A19
  misc_feature: MA Experiment 108535 PARAMETER Experiment Name: Zm_Meristem_P Parameter: Tissue Value: Root Meristem vs. Above Root Meristem
  misc_feature: MA Experiment ID: 108536 Result: Up-regulated in Transcription
  misc_feature: MA Experiment 108536 PARAMETER Experiment Name: Zm_Meristem_P Parameter: Age (day) Value: 8
  misc_feature: MA Experiment 108536 PARAMETER Experiment Name: Zm_Meristem_P Parameter: Organism Value: Zea mays
  misc_feature: MA Experiment 108536 PARAMETER Experiment Name: Zm_Meristem_P Parameter: Plant Line Value: 35A19
  misc_feature: MA Experiment 108536 PARAMETER Experiment Name: Zm_Meristem_P Parameter: Tissue Value: Shoot Meristem vs. Above Shoot Meristem
  misc_feature: MA Experiment ID: 108687 Result: Down-regulated in Transcription
  misc_feature: MA Experiment 108687 PARAMETER Experiment Name: Zm_Embryos-Flowers__P Parameter: Tissue Value: Embryo vs. Aerial+
  misc_feature: MA Experiment ID: 20000478 Result: Up-regulated in Transcription
  misc_feature: MA Experiment 20000478 PARAMETER Experiment Name: Zm_5mM_SA_P Parameter: Age (day) Value: 11
  misc_feature: MA Experiment 20000478 PARAMETER Experiment Name: Zm_5mM_SA_P Parameter: Organism Value: Zea mays
  misc_feature: MA Experiment 20000478 PARAMETER Experiment Name: Zm_5mM_SA_P Parameter: Plant Line Value: 35A19
  misc_feature: MA Experiment 20000478 PARAMETER Experiment Name: Zm_5mM_SA_P Parameter: Timepoint (hr) Value: 72
  misc_feature: MA Experiment 20000478 PARAMETER Experiment Name: Zm_5mM_SA_P Parameter: Tissue Value: Aerial
  misc_feature: MA Experiment 20000478 PARAMETER Experiment Name: Zm_5mM_SA_P Parameter: Treatment Value: 5mM SA vs. No Treatment
  misc_feature: MA Experiment ID: 20001610 Result: Down-regulated in Transcription
  misc_feature: MA Experiment 20001610 PARAMETER Experiment Name: Zm_50ppm_KNO3_L-to-H_P Parameter: Age (day) Value: 19
  misc_feature: MA Experiment 20001610 PARAMETER Experiment Name: Zm_50ppm_KNO3_L-to-H_P Parameter: Organism Value: Zea mays
  misc_feature: MA Experiment 20001610 PARAMETER Experiment Name: Zm_50ppm_KNO3_L-to-H_P Parameter: Plant Line Value: 35A19
  misc_feature: MA Experiment 20001610 PARAMETER Experiment Name: Zm_50ppm_KNO3_L-to-H_P Parameter: Timepoint (hr) Value: 2
  misc_feature: MA Experiment 20001610 PARAMETER Experiment Name: Zm_50ppm_KNO3_L-to-H_P Parameter: Tissue Value: Roots
  misc_feature: MA Experiment 20001610 PARAMETER Experiment Name: Zm_50ppm_KNO3_L-to-H_P Parameter: Treatment Value: 50ppm KNO3 vs. 50ppm KCl
aaatgctaatggattgcttaaactggagagtacagaatgagattgacatcgtgttagctaaacccattctgccatctgatatatatagagttattcgggacacgttacttgttggattgacagggtactccaagcagggacaacctgtttatgcatttggtgtgggtcttagtacttttgacaaggcctcggtgaattactatgtgcaatcacacatacagatgaatgaatatcgagatcgtgttgtcctgccggctgcatcaaagaagtttgggagacagattaatacctgcttgaaggttatggatatgactggcctcaagctgtctgcactgagccaaataaagatgttgacgatgattactactgttgatgaccttaattatcctgagaaaacggaaacttattacattgtaaatgctccatatgttttttcagcgtgttggaaggttgtgaagccactctt

SEQ ID NO: 20086 - protein, 154 aa, Zea mays subsp. mays
  peptide (1)..(154): Ceres Seq. ID no. 11028223
  misc_feature (80)..(153): Pfam Name: CRAL/TRIO domain Pfam Description: CRAL/TRIO domain
MLMDCLNWRVQNEIDIVLAKPILPSDIYRVIRDTLLVGLTGYSKQGQPVYAFGVGLSTFDKASVNYYVQSHIQMNEYRDRVVLPAASKKFGRQINTCLKVMDMTGLKLSALSQIKMLTMITTVDDLNYPEKTETYYIVNAPYVFSACWKVVKPL

SEQ ID NO: 20087 - protein, 152 aa, Zea mays subsp. mays
  peptide (1)..(152): Ceres Seq. ID no. 11028224
  misc_feature (78)..(151): Pfam Name: CRAL/TRIO domain Pfam Description: CRAL/TRIO domain
MDCLNWRVQNEIDIVLAKPILPSDIYRVIRDTLLVGLTGYSKQGQPVYAFGVGLSTFDKASVNYYVQSHIQMNEYRDRVVLPAASKKFGRQINTCLKVMDMTGLKLSALSQIKMLTMITTVDDLNYPEKTETYYIVNAPYVFSACWKVVKPL

SEQ ID NO: 20088 - protein, 81 aa, Zea mays subsp. mays
  peptide (1)..(81): Ceres Seq. ID no. 11028225
  misc_feature (7)..(80): Pfam Name: CRAL/TRIO domain Pfam Description: CRAL/TRIO domain
MNEYRDRVVLPAASKKFGRQINTCLKVMDMTGLKLSALSQIKMLTMITTVDDLNYPEKTETYYIVNAPYVFSACWKVVKPL

SEQ ID NO: 20089 - DNA, 1596 bp, Zea mays subsp. mays
  misc_feature (1)..(1596): Ceres Seq. ID no. 12381657
  misc_feature: MA Experiment ID: 108534 Result: Down-regulated in Transcription
  misc_feature: MA Experiment 108534 PARAMETER Experiment Name: Zm_4deg_Cold_P Parameter: Age (hr) Value: 8
  misc_feature: MA Experiment 108534 PARAMETER Experiment Name: Zm_4deg_Cold_P Parameter: Organism Value: Zea mays
  misc_feature: MA Experiment 108534 PARAMETER Experiment Name: Zm_4deg_Cold_P Parameter: Plant Line Value: 35A19
  misc_feature: MA Experiment 108534 PARAMETER Experiment Name: Zm_4deg_Cold_P Parameter: Temperature (deg C) Value: 4 vs. 22
  misc_feature: MA Experiment 108534 PARAMETER Experiment Name: Zm_4deg_Cold_P Parameter: Timepoint (hr) Value: 6
  misc_feature: MA Experiment 108534 PARAMETER Experiment Name: Zm_4deg_Cold_P Parameter: Tissue Value: Aerial
  misc_feature: MA Experiment ID: 108543 Result: Down-regulated in Transcription
  misc_feature: MA Experiment ID: 20000108 Result: Down-regulated in Transcription
  misc_feature: MA Experiment 20000108 PARAMETER Experiment Name: Zm_Root-Tips_P Parameter: Age (day) Value: 12
  misc_feature: MA Experiment 20000108 PARAMETER Experiment Name: Zm_Root-Tips_P Parameter: Organism Value: Zea mays
  misc_feature: MA Experiment 20000108 PARAMETER Experiment Name: Zm_Root-Tips_P Parameter: Tissue Value: Root tips vs. Root mid region    35
  misc_feature: MA Experiment 20000108 PARAMETER Experiment Name: Zm_Root-Tips_P Parameter: Tissue Value: Root tips vs. Root mid region   Sequence Listing-Misc Features (4)
  misc_feature: MA Experiment ID: 20000492 Result: Down-regulated in Transcription
  misc_feature: MA Experiment 20000492 PARAMETER Experiment Name: Zm_Hybrid_Seed_Dev_P Parameter: DAP Value: 12
  misc_feature: MA Experiment 20000492 PARAMETER Experiment Name: Zm_Hybrid_Seed_Dev_P Parameter: Organism Value: Zea mays
  misc_feature: MA Experiment 20000492 PARAMETER Experiment Name: Zm_Hybrid_Seed_Dev_P Parameter: Plant Line Value: 35A19
  misc_feature: MA Experiment 20000492 PARAMETER Experiment Name: Zm_Hybrid_Seed_Dev_P Parameter: Tissue Value: Fert Kernel vs. Unfert Floret
  misc_feature: MA Experiment ID: 20000626 Result: Up-regulated in Transcription
  misc_feature: MA Experiment 20000626 PARAMETER Experiment Name: Zm_Herbicide-Treatments_P Parameter: Timepoint (hr) Value: 12
  misc_feature: MA Experiment 20000626 PARAMETER Experiment Name: Zm_Herbicide-Treatments_P Parameter: Tissue Value: Aerial
  misc_feature: MA Experiment 20000626 PARAMETER Experiment Name: Zm_Herbicide-Treatments_P Parameter: Treatment Value: Roundup vs. No Treatment
gcacgagaccattacctagaacatcctaatcgaaaagatgagagagatctttgatgcactgaagttgttaaggatcgtggttgacatcccgttctggaaaaagaatctctgtagagaagtgtagcttcagccgctttgatgactagttcaagaaggatgtcacggggtttcacaatgcaagcggcagccgcaagtggcctactggagcttgtgtgcttcggactggcttgaggaattccgaatcaaaggggccccggcgacggctagcgtgctgcgtgccatgacgagtcgatgaggtcccagttgttgattggccttggatgacgacgttgggcaactggcacggtgatggatgcgtccatgactgcaatgagcactgaatggaggtgataacatctatggtgctgattcaactgatgcagccaagtctatggatgcagcaattgctccagccattgacatgaaactgccttgggctgctgtgatcgggaaccatgaccaagagggtacgctatcgcgtgagggtgtgatgcgtcaccttgtgggcatgaaaaacacccttgcaagcttcaatccggaaggaattgaaattgatggttacggaaattacaatttggaagtttccggggttgaagggacatccatggatgaaaaatcagtgctcaacctgtatttcctggacagcggtgactattccactgtgccgtcaatcaatggttatggttggatcaaggcttcacagcaagtctggttccaacaaacatcttcaagtctacaggcaaagtatatgaataagaacccgaaacagaaggaaccagcacctggccttgtgttcttccacattccactaccagagttcagcagttttacggcatccaatttcacaggagtaaagcaggagggtatcagctcagcatcaattaactctgggttctttgcctccatggtggaggctggagatgtgagagctgcctttgtgggacatgatcacattaatgacttctgtgggaagctcagtggtattcagctctgctatgctggtggatttggttaccatgcctatgggaaagctgggtggtcaagaagagcgagggtactgtctgtgcaacttgagaaaacagacagcggtgaatggcgaggtgtcaagtccatcaagacatggaagaggcttgatgataaacatctgagcacaattgactctgaggttctctggaacagaggctctaatgggaggcgcaggaaaaatcctgatggtagttaacttttgatgcagacaggaatggtgctccataagggatctctacatcggtgtgtattgttggatggccagtttactatagaatcagaaatgcagaagtgtgtacatgggggagaaggtctatacagacacatacacgcaggtttctgctgttgcatttttccatgttattagaaaataagtaatcaaaattcagtgccgttgtcaattattgcaggtggtctcatagactagtatatagtgtggtcaaaggaaaacgagaatgcaatgtcattgtagtccatctctcgtgtattgttaaactcggtcggaaagggaaaaactgttctcccggtatt

SEQ ID NO: 20090 - protein, 276 aa, Zea mays subsp. mays
  peptide (1)..(276): Ceres Seq. ID no. 12381658
  misc_feature (1)..(189): Pfam Name: Calcineurin-like phosphoesterase Pfam Description: Calcineurin-like phosphoesterase
  misc_feature (1)..(265): Homolog of NCBI NO: 6323393 NR Description: Dose-Dependent Cell cycle Regulator; Dcr2p
  misc_feature (1)..(223): Homolog of NCBI NO: 15896061 NR Description: Predicted phosphohydrolase, Icc family
  misc_feature (1)..(249): Homolog of NCBI NO: 40740622 NR Description: hypothetical protein AN3604.2 [Aspergillus
  misc_feature (1)..(207): Homolog of NCBI NO: 30267809 NR Description: hypothetical protein [Arabidopsis thaliana]
  misc_feature (1)..(261): Homolog of NCBI NO: 15242042 NR Description: putative protein; protein id: At5g57140.1
  misc_feature (1)..(265): Homolog of NCBI NO: 30267807 NR Description: hypothetical protein [Arabidopsis thaliana]
  misc_feature (1)..(265): Homolog of NCBI NO: 15226455 NR Description: hypothetical protein; protein id: At2g46880.1
  misc_feature (1)..(266): Homolog of NCBI NO: 25763519 NR Description: probable phosphoesterase (EC 3.1.-.-) At2g46880 -
  misc_feature (1)..(266): Homolog of NCBI NO: 15242654 NR Description: putative protein; protein id: At5g63140.1
  misc_feature (1)..(275): Homolog of NCBI NO: 7208777 NR Description: putative PTS protein [Cicer arietinum]
MDAAIAPAIDMKLPWAAVIGNHDQEGTLSREGVMRHLVGMKNTLASFNPEGIEIDGYGNYNLEVSGVEGTSMDEKSVLNLYFLDSGDYSTVPSINGYGWIKASQQVWFQQTSSSLQAKYMNKNPKQKEPAPGLVFFHIPLPEFSSFTASNFTGVKQEGISSASINSGFFASMVEAGDVRAAFVGHDHINDFCGKLSGIQLCYAGGFGYHAYGKAGWSRRARVLSVQLEKTDSGEWRGVKSIKTWKRLDDKHLSTIDSEVLWNRGSNGRRRKNPDGS

SEQ ID NO: 20091 - protein, 266 aa, Zea mays subsp. mays
  peptide (1)..(266): Ceres Seq. ID no. 12381659
  misc_feature (1)..(179): Pfam Name: Calcineurin-like phosphoesterase Pfam Description: Calcineurin-like phosphoesterase
  misc_feature (1)..(255): Homolog of NCBI NO: 6323393 NR Description: Dose-Dependent Cell cycle Regulator; Dcr2p
  misc_feature (1)..(213): Homolog of NCBI NO: 15896061 NR Description: Predicted phosphohydrolase, Icc family
  misc_feature (1)..(239): Homolog of NCBI NO: 40740622 NR Description: hypothetical protein AN3604.2 [Aspergillus
  misc_feature (1)..(197): Homolog of NCBI NO: 30267809 NR Description: hypothetical protein [Arabidopsis thaliana]
  misc_feature (1)..(251): Homolog of NCBI NO: 15242042 NR Description: putative protein; protein id: At5g57140.1
  misc_feature (1)..(255): Homolog of NCBI NO: 30267807 NR Description: hypothetical protein [Arabidopsis thaliana]
  misc_feature (1)..(255): Homolog of NCBI NO: 15226455 NR Description: hypothetical protein; protein id: At2g46880.1
  misc_feature (1)..(256): Homolog of NCBI NO: 25763519 NR Description: probable phosphoesterase (EC 3.1.-.-) At2g46880 -
  misc_feature (1)..(256): Homolog of NCBI NO: 15242654 NR Description: putative protein; protein id: At5g63140.1
  misc_feature (1)..(265): Homolog of NCBI NO: 7208777 NR Description: putative PTS protein [Cicer arietinum]
MKLPWAAVIGNHDQEGTLSREGVMRHLVGMKNTLASFNPEGIEIDGYGNYNLEVSGVEGTSMDEKSVLNLYFLDSGDYSTVPSINGYGWIKASQQVWFQQTSSSLQAKYMNKNPKQKEPAPGLVFFHIPLPEFSSFTASNFTGVKQEGISSASINSGFFASMVEAGDVRAAFVGHDHINDFCGKLSGIQLCYAGGFGYHAYGKAGWSRRARVLSVQLEKTDSGEWRGVKSIKTWKRLDDKHLSTIDSEVLWNRGSNGRRRKNPDGS

SEQ ID NO: 20092 - protein, 243 aa, Zea mays subsp. mays
  peptide (1)..(243): Ceres Seq. ID no. 12381660
  misc_feature (1)..(156): Pfam Name: Calcineurin-like phosphoesterase Pfam Description: Calcineurin-like phosphoesterase
  misc_feature (1)..(190): Homolog of NCBI NO: 15896061 NR Description: Predicted phosphohydrolase, Icc family
  misc_feature (1)..(216): Homolog of NCBI NO: 40740622 NR Description: hypothetical protein AN3604.2 [Aspergillus
  misc_feature (1)..(174): Homolog of NCBI NO: 30267809 NR Description: hypothetical protein [Arabidopsis thaliana]
  misc_feature (1)..(228): Homolog of NCBI NO: 15242042 NR Description: putative protein; protein id: At5g57140.1
  misc_feature (1)..(232): Homolog of NCBI NO: 30267807 NR Description: hypothetical protein [Arabidopsis thaliana]
  misc_feature (1)..(232): Homolog of NCBI NO: 6323393 NR Description: Dose-Dependent Cell cycle Regulator; Dcr2p
  misc_feature (1)..(232): Homolog of NCBI NO: 15226455 NR Description: hypothetical protein; protein id: At2g46880.1
  misc_feature (1)..(233): Homolog of NCBI NO: 25763519 NR Description: probable phosphoesterase (EC 3.1.-.-) At2g46880 -
  misc_feature (1)..(233): Homolog of NCBI NO: 15242654 NR Description: putative protein; protein id: At5g63140.1
  misc_feature (1)..(242): Homolog of NCBI NO: 7208777 NR Description: putative PTS protein [Cicer arietinum]
MRHLVGMKNTLASFNPEGIEIDGYGNYNLEVSGVEGTSMDEKSVLNLYFLDSGDYSTVPSINGYGWIKASQQVWFQQTSSSLQAKYMNKNPKQKEPAPGLVFFHIPLPEFSSFTASNFTGVKQEGISSASINSGFFASMVEAGDVRAAFVGHDHINDFCGKLSGIQLCYAGGFGYHAYGKAGWSRRARVLSVQLEKTDSGEWRGVKSIKTWKRLDDKHLSTIDSEVLWNRGSNGRRRKNPDGS

SEQ ID NO: 20093 - DNA, 1213 bp, Zea mays subsp. mays
  misc_feature (1)..(1213): Ceres Seq. ID no. 12418105
  misc_feature: MA Experiment ID: 108529 Result: Up-regulated in Transcription
  misc_feature: MA Experiment 108529 PARAMETER Experiment Name: Zm_Imbibed_Seeds_P Parameter: Age (day) Value: 5 vs. 2
  misc_feature: MA Experiment 108529 PARAMETER Experiment Name: Zm_Imbibed_Seeds_P Parameter: Organism Value: Zea mays
  misc_feature: MA Experiment 108529 PARAMETER Experiment Name: Zm_Imbibed_Seeds_P Parameter: Plant Line Value: 35A19
  misc_feature: MA Experiment 108529 PARAMETER Experiment Name: Zm_Imbibed_Seeds_P Parameter: Tissue Value: Roots vs. Embryo
  misc_feature: MA Experiment ID: 108535 Result: Down-regulated in Transcription
  misc_feature: MA Experiment 108535 PARAMETER Experiment Name: Zm_Meristem_P Parameter: Age (day) Value: 8
  misc_feature: MA Experiment 108535 PARAMETER Experiment Name: Zm_Meristem_P Parameter: Organism Value: Zea mays
  misc_feature: MA Experiment 108535 PARAMETER Experiment Name: Zm_Meristem_P Parameter: Plant Line Value: 35A19
  misc_feature: MA Experiment 108535 PARAMETER Experiment Name: Zm_Meristem_P Parameter: Tissue Value: Root Meristem vs. Above Root Meristem
  misc_feature: MA Experiment ID: 108546 Result: Up-regulated in Transcription
  misc_feature: MA Experiment 108546 PARAMETER Experiment Name: Zm_Imbibed_Seeds_P Parameter: Age (day) Value: 3 vs. 2
  misc_feature: MA Experiment 108546 PARAMETER Experiment Name: Zm_Imbibed_Seeds_P Parameter: Organism Value: Zea mays
  misc_feature: MA Experiment 108546 PARAMETER Experiment Name: Zm_Imbibed_Seeds_P Parameter: Plant Line Value: 35A19
  misc_feature: MA Experiment 108546 PARAMETER Experiment Name: Zm_Imbibed_Seeds_P Parameter: Tissue Value: Roots vs. Embryo
gacagcctccgcgcgccgcgtcgtcgtcactgtgcagagctagctgctgcaggtttgaaagcgatggccgcgctctacgccctcgtcgcggtctcgctgctgcccgttctcgtcacggcggagtgcgactgctcggacgacgacgccacgggccgcgacaaggcgggagcgctgcggctaaagatcatcgccatcttctgcatcctggcggggggcgcggccggcgcggcggtgccggcgctggggcgcaggctccccgcgctgcgcccgggcgcgggcccgttcctcgccgtcagggccttcgcgggcggcgtcatcctcgccacggggctggtgcacatcctgcccgcggccttcgacgcgctgggctcgccgtgcctcgcggcggccggcgggccgtgggccaggttcccgttcgccgggacggtcgccatcctcgccgcggtcgccacgctcgtggtggacacggtcgccacngggtacctgcgccggaagnccgcggcggtcggcgacgagccaccgcagctcggnggggacgaccccnaggaggcctccggcggcgggcgccacggccacgcgcacggtgtcgacgacgacgacgacctcgtacgccaccgngtcgtctctcaggtgctggagctgggcgtggtggtgcactcgctgatcatcggcatgtcccctgggcgcctcgggatttccccagcacggtgcgcccgctcgtcccggcgttgacgttccaccagctcttcgagggcatcggcctcggcgggtgcatcgtncaggccaaatttcgcctcaggtcaatggtggcgatggcagtcttcttctccctgacgaccccgatcggcgtggccatcggcatcgggatatcgtcggcgtacgacgagacgagccagacggcgctggtcgtgcagggcctgttcgaggccgcggccgcggggatcctggtgtacatggcgctcgtcgacatcctccgcgaggacttcatgagcgcccgggtgcagggcagcgcgcccctgcaggccgcgctgagcgcctcgctgctgctgggagctggcttgatgtccatgctcgccatctgggcatgagtgaccagaacgtgagctggcttgatgcgcagggagtgaattgtagtagtttcgttaggttcgtgttacagtgggtcagccgcttgcccgcttttgagtgtatagaagaggaggggtttgttttg

SEQ ID NO: 20094 - protein, 361 aa, Zea mays subsp. mays
  peptide (1)..(361): Ceres Seq. ID no. 12418106
  misc_feature (233)..(358): Pfam Name: ZIP Zinc transporter Pfam Description: ZIP Zinc transporter
  misc_feature (233)..(361): Homolog of NCBI NO: 40888860 NR Description: TPA: putative ZIP-like protein
  misc_feature (233)..(361): Homolog of NCBI NO: 34900456 NR Description: putative zinc transporter protein ZIP1
  misc_feature (233)..(361): Homolog of NCBI NO: 32966053 NR Description: iron transporter Fe2 [Oryza sativa (japonica
  misc_feature (233)..(361): Homolog of NCBI NO: 40888854 NR Description: TPA: putative ZIP-like protein
  misc_feature (233)..(361): Homolog of NCBI NO: 32816615 NR Description: putative zinc transporter [Oryza sativa (japonica
  misc_feature (231)..(361): Homolog of NCBI NO: 30841912 NR Description: putative zinc transporter OsZIP2 [Oryza sativa]
  misc_feature (159)..(159): Xaa is any aa, unknown or other
  misc_feature (165)..(165): Xaa is any aa, unknown or other
  misc_feature (177)..(177): Xaa is any aa, unknown or other
  misc_feature (181)..(181): Xaa is any aa, unknown or other
  misc_feature (206)..(206): Xaa is any aa, unknown or other
  misc_feature (259)..(259): Xaa is any aa, unknown or other
QPPRAASSSLCRASCCRFESDGRALRPRRGLAAARSRHGGVRLLGRRRHGPRQGGSAAAKDHRHLLHPGGGRGRRGGAGAGAQAPRAAPGRGPVPRRQGLRGRRHPRHGAGAHPARGLRRAGLAVPRGGRRAVGQVPVRRDGRHPRRGRHARGGHGRHXVPAPEXRGGRRRATAARXGRPXGGLRRRAPRPRARCRRRRRPRTPPXRLSGAGAGRGGALADHRHVPWAPRDFPSTVRPLVPALTFHQLFEGIGLGGCIXQAKFRLRSMVAMAVFFSLTTPIGVAIGIGISSAYDETSQTALVVQGLFEAAAAGILVYMALVDILREDFMSARVQGSAPLQAALSASLLLGAGLMSMLAIWA

SEQ ID NO: 20095 - protein, 243 aa, Zea mays subsp. mays
  peptide (1)..(243): Ceres Seq. ID no. 12418107
  misc_feature (60)..(228): Pfam Name: ZIP Zinc transporter Pfam Description: ZIP Zinc transporter
  misc_feature (185)..(228): Homolog of NCBI NO: 40888860 NR Description: TPA: putative ZIP-like protein
  misc_feature (20)..(194): Homolog of NCBI NO: 40888860 NR Description: TPA: putative ZIP-like protein
  misc_feature (44)..(228): Homolog of NCBI NO: 34900456 NR Description: putative zinc transporter protein ZIP1
  misc_feature (44)..(228): Homolog of NCBI NO: 32966053 NR Description: iron transporter Fe2 [Oryza sativa (japonica
  misc_feature (190)..(228): Homolog of NCBI NO: 40888854 NR Description: TPA: putative ZIP-like protein
  misc_feature (44)..(194): Homolog of NCBI NO: 40888854 NR Description: TPA: putative ZIP-like protein
  misc_feature (190)..(228): Homolog of NCBI NO: 32816615 NR Description: putative zinc transporter [Oryza sativa (japonica
  misc_feature (44)..(194): Homolog of NCBI NO: 32816615 NR Description: putative zinc transporter [Oryza sativa (japonica
  misc_feature (14)..(228): Homolog of NCBI NO: 30841912 NR Description: putative zinc transporter OsZIP2 [Oryza sativa]
  misc_feature (159)..(159): Xaa is any aa, unknown or other
  misc_feature (166)..(166): Xaa is any aa, unknown or other
  misc_feature (177)..(177): Xaa is any aa, unknown or other
  misc_feature (182)..(182): Xaa is any aa, unknown or other
  misc_feature (206)..(206): Xaa is any aa, unknown or other
DSLRAPRRRHCAELAAAGLKAMAALYALVAVSLLPVLVTAECDCSDDDATGRDKAGALRLKIIAIFCILAGGAAGAAVPALGRRLPALRPGAGPFLAVRAFAGGVILATGLVHILPAAFDALGSPCLAAAGGPWARFPFAGTVAILAAVATLVVDTVAXGYLRRKXAAVGDEPPQLXGDDPXEASGGGRHGHAHGVDDDDDLVRHXVVSQVLELGVVVHSLIIGMSPGRLGISPARCARSSRR

SEQ ID NO: 20096 - protein, 222 aa, Zea mays subsp. mays
  peptide (1)..(222): Ceres Seq. ID no. 12418108
  misc_feature (39)..(207): Pfam Name: ZIP Zinc transporter Pfam Description: ZIP Zinc transporter
  misc_feature (164)..(207): Homolog of NCBI NO: 40888860 NR Description: TPA: putative ZIP-like protein
  misc_feature (1)..(173): Homolog of NCBI NO: 40888860 NR Description: TPA: putative ZIP-like protein
  misc_feature (23)..(207): Homolog of NCBI NO: 34900456 NR Description: putative zinc transporter protein ZIP1
  misc_feature (23)..(207): Homolog of NCBI NO: 32966053 NR Description: iron transporter Fe2 [Oryza sativa (japonica
  misc_feature (169)..(207): Homolog of NCBI NO: 40888854 NR Description: TPA: putative ZIP-like protein
  misc_feature (23)..(173): Homolog of NCBI NO: 40888854 NR Description: TPA: putative ZIP-like protein
  misc_feature (169)..(207): Homolog of NCBI NO: 32816615 NR Description: putative zinc transporter [Oryza sativa (japonica
  misc_feature (23)..(173): Homolog of NCBI NO: 32816615 NR Description: putative zinc transporter [Oryza sativa (japonica
  misc_feature (1)..(207): Homolog of NCBI NO: 30841912 NR Description: putative zinc transporter OsZIP2 [Oryza sativa]
  misc_feature (138)..(138): Xaa is any aa, unknown or other
  misc_feature (145)..(145): Xaa is any aa, unknown or other
  misc_feature (156)..(156): Xaa is any aa, unknown or other
  misc_feature (161)..(161): Xaa is any aa, unknown or other
  misc_feature (185)..(185): Xaa is any aa, unknown or other
MAALYALVAVSLLPVLVTAECDCSDDDATGRDKAGALRLKIIAIFCILAGGAAGAAVPALGRRLPALRPGAGPFLAVRAFAGGVILATGLVHILPAAFDALGSPCLAAAGGPWARFPFAGTVAILAAVATLVVDTVAXGYLRRKXAAVGDEPPQLXGDDPXEASGGGRHGHAHGVDDDDDLVRHXVVSQVLELGVVVHSLIIGMSPGRLGISPARCARSSRR

SEQ ID NO: 20097 - DNA, 1404 bp, Zea mays subsp. mays
  misc_feature (1)..(1404): Ceres Seq. ID no. 12418555
  misc_feature: MA Experiment ID: 108523 Result: Up-regulated in Transcription
  misc_feature: MA Experiment 108523 PARAMETER Experiment Name: Zm_42deg_Heat_P Parameter: Age (day) Value: 8
  misc_feature: MA Experiment 108523 PARAMETER Experiment Name: Zm_42deg_Heat_P Parameter: Organism Value: Zea mays
  misc_feature: MA Experiment 108523 PARAMETER Experiment Name: Zm_42deg_Heat_P Parameter: Plant Line Value: 35A19
  misc_feature: MA Experiment 108523 PARAMETER Experiment Name: Zm_42deg_Heat_P Parameter: Temperature (deg C) Value: 42 vs. 22
  misc_feature: MA Experiment 108523 PARAMETER Experiment Name: Zm_42deg_Heat_P Parameter: Timepoint (hr) Value: 6
  misc_feature: MA Experiment 108523 PARAMETER Experiment Name: Zm_42deg_Heat_P Parameter: Tissue Value: Aerial
gcacgagaccattacctagaacatcctaatcgaaaaacgcttttgcagctcgctcacccaagtcccaagcgcaggaggccgcggtagcgtcgacttcctgaacgatctggcggcggccgcggctcccaagttcacgaagcgggaggcgcaagcgaagcggctacctctcgccggagatgccgctggggacctctccagcggtggcggaggccgaggcatggacgtgggagaacgcagcggctggagctgccgccgggttcgccacggttgcggccctccacccgctcgacgtcgtccgcacccgcttccaagtgagcggcgggagggggtggtctgaggtgcctccgtacaggaacaccgcgcacgctgtgtacaccatcacacgatctgagggcctgagaggactttatgcaggattttatcccgcagttcttggatcaactgtttcctggggcctatatttctttttctataacagagctaaacaaaggtacttacagaggaagaatgaccagcttcatccagtccatcatctcatctcagctgcagaagcaggtgctttggtttccttgtttacaaatcccatatggctggtgaaaacaagactgcaactacaaacagctaaacaccatacttctcagtattctggtttttctgatctttgaaaactattctaagagaggagggatttcttgcactttataggggaattggacctgggcttttgctggtcacccatggtgcaatacagttcacggcctatgaggaacttcgcaaagctatgatattctttaaaagtgcacaatcaagggcagacgacacaggaggcggggagtcattgctgaattccgtcgattttgcggcacttggggctggttcaaaagtagctgctattctacttacttatccttaccaggtcatcagagcccgcttgcagcaacggcctggcactgatggtactccaaagtactcaaatagctggcatgtagtgaaggaaactgcaaagtatgaaggcgtccgtggattttacaggggcatcacgtccaatctactgaaaaaccttccagctgcgtccctcacgttcgtggtgtatgaaaatgttatcaaactattcaaagcaaccaaggagaagacgtagctactcattaaatccaggagtactgtgcatggtctgacatttctgagttcaaacgatgcctataatttccattccacgtcaagcccatattttatccatttaacatcgtatatgacaaatatgtaacagtacaggttgtgaccaacctgggtcgtggaaattttttgtacttgcattttgtagagagaaaatacacattttgtttcttcccaaagaaatatgtctttgttatataatccagccgggacgctggcgttgtagatctt

SEQ ID NO: 20098 - protein, 162 aa, Zea mays subsp. mays
  peptide (1)..(162): Ceres Seq. ID no. 12418556
  misc_feature (17)..(162): Homolog of NCBI NO: 28856134 NR Description: Similar to RIKEN cDNA 2610043O12 gene [Danio
  misc_feature (17)..(162): Homolog of NCBI NO: 34222684 NR Description: Mitochondrial folate transporter/carrier
  misc_feature (17)..(162): Homolog of NCBI NO: 21314739 NR Description: mitochondrial folate transporter/carrier [Homo
  misc_feature (17)..(162): Homolog of NCBI NO: 34866087 NR Description: similar to mitochondrial folate
  misc_feature (17)..(162): Homolog of NCBI NO: 14042724 NR Description: unnamed protein product [Homo sapiens]
  misc_feature (4)..(162): Homolog of NCBI NO: 34222668 NR Description: Mitochondrial folate transporter/carrier
  misc_feature (4)..(162): Homolog of NCBI NO: 27369517 NR Description: RIKEN cDNA 2610043O12 [Mus musculus]
  misc_feature (12)..(147): Homolog of NCBI NO: 10177519 NR Description: contains similarity to peroxisomal membrane
  misc_feature (12)..(161): Homolog of NCBI NO: 18425065 NR Description: mitochondrial carrier protein family
  misc_feature (12)..(161): Homolog of NCBI NO: 21537040 NR Description: contains similarity to peroxisomal membrane
MPLGTSPAVAEAEAWTWENAAAGAAAGFATVAALHPLDVVRTRFQVSGGRGWSEVPPYRNTAHAVYTITRSEGLRGLYAGFYPAVLGSTVSWGLYFFFYNRAKQRYLQRKNDQLHPVHHLISAAEAGALVSLFTNPIWLVKTRLQLQTAKHHTSQYSGFSDL

SEQ ID NO: 20099 - protein, 118 aa, Zea mays subsp. mays
  peptide (1)..(118): Ceres Seq. ID no. 12418557
  misc_feature (1)..(110): Homolog of NCBI NO: 28856134 NR Description: Similar to RIKEN cDNA 2610043O12 gene [Danio
  misc_feature (1)..(117): Homolog of NCBI NO: 34222684 NR Description: Mitochondrial folate transporter/carrier
  misc_feature (1)..(117): Homolog of NCBI NO: 21314739 NR Description: mitochondrial folate transporter/carrier [Homo
  misc_feature (1)..(117): Homolog of NCBI NO: 34866087 NR Description: similar to mitochondrial folate
  misc_feature (1)..(117): Homolog of NCBI NO: 14042724 NR Description: unnamed protein product [Homo sapiens]
  misc_feature (1)..(117): Homolog of NCBI NO: 34222668 NR Description: Mitochondrial folate transporter/carrier
  misc_feature (1)..(117): Homolog of NCBI NO: 27369517 NR Description: RIKEN cDNA 2610043O12 [Mus musculus]
  misc_feature (1)..(112): Homolog of NCBI NO: 10177519 NR Description: contains similarity to peroxisomal membrane
  misc_feature (1)..(112): Homolog of NCBI NO: 18425065 NR Description: mitochondrial carrier protein family
  misc_feature (1)..(112): Homolog of NCBI NO: 21537040 NR Description: contains similarity to peroxisomal membrane
MIFFKSAQSRADDTGGGESLLNSVDFAALGAGSKVAAILLTYPYQVIRARLQQRPGTDGTPKYSNSWHVVKETAKYEGVRGFYRGITSNLLKNLPAASLTFVVYENVIKLFKATKEKT

SEQ ID NO: 20100 - DNA, 453 bp, Zea mays subsp. mays
  misc_feature (1)..(453): Ceres Seq. ID no. 2733380
  misc_feature: MA Experiment ID: 108522 Result: Up-regulated in Transcription
  misc_feature: MA Experiment 108522 PARAMETER Experiment Name: Zm_42deg_Heat_P Parameter: Age (day) Value: 8
  misc_feature: MA Experiment 108522 PARAMETER Experiment Name: Zm_42deg_Heat_P Parameter: Organism Value: Zea mays
  misc_feature: MA Experiment 108522 PARAMETER Experiment Name: Zm_42deg_Heat_P Parameter: Plant Line Value: 35A19
  misc_feature: MA Experiment 108522 PARAMETER Experiment Name: Zm_42deg_Heat_P Parameter: Temperature (deg C) Value: 42 vs. 22
  misc_feature: MA Experiment 108522 PARAMETER Experiment Name: Zm_42deg_Heat_P Parameter: Timepoint (hr) Value: 1
  misc_feature: MA Experiment 108522 PARAMETER Experiment Name: Zm_42deg_Heat_P Parameter: Tissue Value: Aerial
  misc_feature: MA Experiment ID: 108523 Result: Up-regulated in Transcription
  misc_feature: MA Experiment 108523 PARAMETER Experiment Name: Zm_42deg_Heat_P Parameter: Age (day) Value: 8
  misc_feature: MA Experiment 108523 PARAMETER Experiment Name: Zm_42deg_Heat_P Parameter: Organism Value: Zea mays
  misc_feature: MA Experiment 108523 PARAMETER Experiment Name: Zm_42deg_Heat_P Parameter: Plant Line Value: 35A19
  misc_feature: MA Experiment 108523 PARAMETER Experiment Name: Zm_42deg_Heat_P Parameter: Temperature (deg C) Value: 42 vs. 22
  misc_feature: MA Experiment 108523 PARAMETER Experiment Name: Zm_42deg_Heat_P Parameter: Timepoint (hr) Value: 6
  misc_feature: MA Experiment 108523 PARAMETER Experiment Name: Zm_42deg_Heat_P Parameter: Tissue Value: Aerial
atcgaacgatttgggggaggaggtgttctattacacaaaagaggcaaaaaacaaaagccgatcgcggcactcgccgccgttgaggaggaggtttccggcgctgcttccagcgccttgccgtcagcaccatgaggaagaagctggacacgcgtttccccgctcctcggattaaaaagatcatgcaaacagatgaagacgtcggcaagattgctcaagctgtacctgttctagtgtccaaagcattggagctatttctgcaagatttatgtgataggacatatgatattacaattcggaagggggtcaagactgtgggttcttcccatttgaaacaatgcatacaaacgtacaacgtctatgacttcttgagggaagtagtcagcaaagttccagacattggtccttctgatgttattgctgatgataagcttggcaaaaggaggaaagccgaag

SEQ ID NO: 20101 - protein, 108 aa, Zea mays subsp. mays
  peptide (1)..(108): Ceres Seq. ID no. 2733381
  misc_feature (7)..(71): Pfam Name: Histone-like transcription factor (CBF/NF-Y) and Pfam Description: Histone-like transcription factor (CBF/NF-Y)
  misc_feature (2)..(101): Homolog of NCBI NO: 10242351 NR Description: NC2alpha [Drosophila melanogaster]
  misc_feature (30)..(106): Homolog of NCBI NO: 15239766 NR Description: putative protein; protein id: At5g19490.1
  misc_feature (2)..(105): Homolog of NCBI NO: 27661225 NR Description: similar to RIKEN cDNA 2310074H19
  misc_feature (2)..(105): Homolog of NCBI NO: 18426973 NR Description: DR1-associated protein 1
  misc_feature (2)..(105): Homolog of NCBI NO: 21313424 NR Description: RIKEN cDNA 2310074H19 [Mus musculus]
  misc_feature (2)..(106): Homolog of NCBI NO: 28279647 NR Description: Similar to Dr1 associated protein 1 (negative
  misc_feature (1)..(106): Homolog of NCBI NO: 12321975 NR Description: unknown protein; 69004-67516 [Arabidopsis
  misc_feature (1)..(107): Homolog of NCBI NO: 18481626 NR Description: repressor protein [Zea mays]
  misc_feature (1)..(107): Homolog of NCBI NO: 18481624 NR Description: repressor protein [Oryza sativa]
  misc_feature (1)..(106): Homolog of NCBI NO: 30682195 NR Description: transcription factor Hap5a, putative [Arabidopsis
MRKKLDTRFPAPRIKKIMQTDEDVGKIAQAVPVLVSKALELFLQDLCDRTYDITIRKGVKTVGSSHLKQCIQTYNVYDFLREVVSKVPDIGPSDVIADDKLGKRRKAE

SEQ ID NO: 20102 - protein, 91 aa, Zea mays subsp. mays
  peptide (1)..(91): Ceres Seq. ID no. 2733382
  misc_feature (1)..(54): Pfam Name: Histone-like transcription factor (CBF/NF-Y) and Pfam Description: Histone-like transcription factor (CBF/NF-Y)
  misc_feature (1)..(84): Homolog of NCBI NO: 10242351 NR Description: NC2alpha [Drosophila melanogaster]
  misc_feature (13)..(89): Homolog of NCBI NO: 15239766 NR Description: putative protein; protein id: At5g19490.1
  misc_feature (1)..(88): Homolog of NCBI NO: 27661225 NR Description: similar to RIKEN cDNA 2310074H19
  misc_feature (1)..(88): Homolog of NCBI NO: 18426973 NR Description: DR1-associated protein 1
  misc_feature (1)..(88): Homolog of NCBI NO: 21313424 NR Description: RIKEN cDNA 2310074H19 [Mus musculus]
  misc_feature (1)..(89): Homolog of NCBI NO: 28279647 NR Description: Similar to Dr1 associated protein 1 (negative
  misc_feature (1)..(89): Homolog of NCBI NO: 12321975 NR Description: unknown protein; 69004-67516 [Arabidopsis
  misc_feature (1)..(90): Homolog of NCBI NO: 18481626 NR Description: repressor protein [Zea mays]
  misc_feature (1)..(90): Homolog of NCBI NO: 18481624 NR Description: repressor protein [Oryza sativa]
  misc_feature (1)..(89): Homolog of NCBI NO: 30682195 NR Description: transcription factor Hap5a, putative [Arabidopsis
MQTDEDVGKIAQAVPVLVSKALELFLQDLCDRTYDITIRKGVKTVGSSHLKQCIQTYNVYDFLREVVSKVPDIGPSDVIADDKLGKRRKAE

SEQ ID NO: 20103 - protein, 56 aa, Zea mays subsp. mays
  peptide (1)..(56): Ceres Seq. ID no. 2733383
SNDLGEEVFYYTKEAKNKSRSRHSPPLRRRFPALLPAPCRQHHEEEAGHAFPRSSD

SEQ ID NO: 20104 - DNA, 481 bp, Zea mays subsp. mays
  misc_feature (1)..(481): Ceres Seq. ID no. 2733452
  misc_feature: MA Experiment ID: 108504 Result: Up-regulated in Transcription
  misc_feature: MA Experiment 108504 PARAMETER Experiment Name: Zm_Drought_P Parameter: Age (day) Value: 8
  misc_feature: MA Experiment 108504 PARAMETER Experiment Name: Zm_Drought_P Parameter: Organism Value: Zea mays
  misc_feature: MA Experiment 108504 PARAMETER Experiment Name: Zm_Drought_P Parameter: Plant Line Value: 35A19
  misc_feature: MA Experiment 108504 PARAMETER Experiment Name: Zm_Drought_P Parameter: Timepoint (hr) Value: 12
  misc_feature: MA Experiment 108504 PARAMETER Experiment Name: Zm_Drought_P Parameter: Tissue Value: Aerial
  misc_feature: MA Experiment 108504 PARAMETER Experiment Name: Zm_Drought_P Parameter: Treatment Value: Drought vs. No Drought
  misc_feature: MA Experiment ID: 108522 Result: Up-regulated in Transcription
  misc_feature: MA Experiment 108522 PARAMETER Experiment Name: Zm_42deg_Heat_P Parameter: Age (day) Value: 8
  misc_feature: MA Experiment 108522 PARAMETER Experiment Name: Zm_42deg_Heat_P Parameter: Organism Value: Zea mays
  misc_feature: MA Experiment 108522 PARAMETER Experiment Name: Zm_42deg_Heat_P Parameter: Plant Line Value: 35A19
  misc_feature: MA Experiment 108522 PARAMETER Experiment Name: Zm_42deg_Heat_P Parameter: Temperature (deg C) Value: 42 vs. 22
  misc_feature: MA Experiment 108522 PARAMETER Experiment Name: Zm_42deg_Heat_P Parameter: Timepoint (hr) Value: 1
  misc_feature: MA Experiment 108522 PARAMETER Experiment Name: Zm_42deg_Heat_P Parameter: Tissue Value: Aerial
  misc_feature: MA Experiment ID: 108533 Result: Down-regulated in Transcription
  misc_feature: MA Experiment 108533 PARAMETER Experiment Name: Zm_4deg_Cold_P Parameter: Age (hr) Value: 8
  misc_feature: MA Experiment 108533 PARAMETER Experiment Name: Zm_4deg_Cold_P Parameter: Organism Value: Zea mays
  misc_feature: MA Experiment 108533 PARAMETER Experiment Name: Zm_4deg_Cold_P Parameter: Plant Line Value: 35A19
  misc_feature: MA Experiment 108533 PARAMETER Experiment Name: Zm_4deg_Cold_P Parameter: Temperature (deg C) Value: 4 vs. 22
  misc_feature: MA Experiment 108533 PARAMETER Experiment Name: Zm_4deg_Cold_P Parameter: Timepoint (hr) Value: 1
  misc_feature: MA Experiment 108533 PARAMETER Experiment Name: Zm_4deg_Cold_P Parameter: Tissue Value: Aerial
  misc_feature: MA Experiment ID: 108539 Result: Up-regulated in Transcription
  misc_feature: MA Experiment 108539 PARAMETER Experiment Name: Zm_20percent_PEG_P Parameter: Age (day) Value: 8
  misc_feature: MA Experiment 108539 PARAMETER Experiment Name: Zm_20percent_PEG_P Parameter: Organism Value: Zea mays
  misc_feature: MA Experiment 108539 PARAMETER Experiment Name: Zm_20percent_PEG_P Parameter: Plant Line Value: 35A19
  misc_feature: MA Experiment 108539 PARAMETER Experiment Name: Zm_20percent_PEG_P Parameter: Timepoint (hr) Value: 1
  misc_feature: MA Experiment 108539 PARAMETER Experiment Name: Zm_20percent_PEG_P Parameter: Tissue Value: Aerial
  misc_feature: MA Experiment 108539 PARAMETER Experiment Name: Zm_20percent_PEG_P Parameter: Treatment Value: 20percent PEG vs. No Treatment
  misc_feature: MA Experiment ID: 108540 Result: Up-regulated in Transcription
  misc_feature: MA Experiment 108540 PARAMETER Experiment Name: Zm_20percent_PEG_P Parameter: Age (day) Value: 8
  misc_feature: MA Experiment 108540 PARAMETER Experiment Name: Zm_20percent_PEG_P Parameter: Organism Value: Zea mays
  misc_feature: MA Experiment 108540 PARAMETER Experiment Name: Zm_20percent_PEG_P Parameter: Plant Line Value: 35A19
  misc_feature: MA Experiment 108540 PARAMETER Experiment Name: Zm_20percent_PEG_P Parameter: Timepoint (hr) Value: 6
  misc_feature: MA Experiment 108540 PARAMETER Experiment Name: Zm_20percent_PEG_P Parameter: Tissue Value: Aerial
  misc_feature: MA Experiment 108540 PARAMETER Experiment Name: Zm_20percent_PEG_P Parameter: Treatment Value: 20percent PEG vs. No Treatment
  misc_feature: MA Experiment ID: 108556 Result: Up-regulated in Transcription
  misc_feature: MA Experiment 108556 PARAMETER Experiment Name: Zm_Drought_P Parameter: Age (day) Value: 9
  misc_feature: MA Experiment 108556 PARAMETER Experiment Name: Zm_Drought_P Parameter: Organism Value: Zea mays
  misc_feature: MA Experiment 108556 PARAMETER Experiment Name: Zm_Drought_P Parameter: Plant Line Value: 35A19
  misc_feature: MA Experiment 108556 PARAMETER Experiment Name: Zm_Drought_P Parameter: Timepoint (hr) Value: 24
  misc_feature: MA Experiment 108556 PARAMETER Experiment Name: Zm_Drought_P Parameter: Tissue Value: Aerial
  misc_feature: MA Experiment 108556 PARAMETER Experiment Name: Zm_Drought_P Parameter: Treatment Value: Drought vs. No Drought
  misc_feature: MA Experiment ID: 108689 Result: Up-regulated in Transcription
  misc_feature: MA Experiment 108689 PARAMETER Experiment Name: Zm_Drought_Roots_P Parameter: Age (day) Value: 9
  misc_feature: MA Experiment 108689 PARAMETER Experiment Name: Zm_Drought_Roots_P Parameter: Organism Value: Zea mays
  misc_feature: MA Experiment 108689 PARAMETER Experiment Name: Zm_Drought_Roots_P Parameter: Plant Line Value: 35A19
  misc_feature: MA Experiment 108689 PARAMETER Experiment Name: Zm_Drought_Roots_P Parameter: Timepoint (hr) Value: 24
  misc_feature: MA Experiment 108689 PARAMETER Experiment Name: Zm_Drought_Roots_P Parameter: Tissue Value: Roots
  misc_feature: MA Experiment 108689 PARAMETER Experiment Name: Zm_Drought_Roots_P Parameter: Treatment Value: Drought vs. No Drought
  misc_feature: MA Experiment ID: 20000479 Result: Up-regulated in Transcription
  misc_feature: MA Experiment 20000479 PARAMETER Experiment Name: Zm_Drought_P Parameter: Age (day) Value: 10
  misc_feature: MA Experiment 20000479 PARAMETER Experiment Name: Zm_Drought_P Parameter: Organism Value: Zea mays
  misc_feature: MA Experiment 20000479 PARAMETER Experiment Name: Zm_Drought_P Parameter: Plant Line Value: 35A19
  misc_feature: MA Experiment 20000479 PARAMETER Experiment Name: Zm_Drought_P Parameter: Timepoint (hr) Value: 48
  misc_feature: MA Experiment 20000479 PARAMETER Experiment Name: Zm_Drought_P Parameter: Tissue Value: Aerial
  misc_feature: MA Experiment 20000479 PARAMETER Experiment Name: Zm_Drought_P Parameter: Treatment Value: Drought vs. No Drought
  misc_feature: MA Experiment ID: 20000480 Result: Up-regulated in Transcription
  misc_feature: MA Experiment 20000480 PARAMETER Experiment Name: Zm_Drought_P Parameter: Age (day) Value: 11
  misc_feature: MA Experiment 20000480 PARAMETER Experiment Name: Zm_Drought_P Parameter: Organism Value: Zea mays
  misc_feature: MA Experiment 20000480 PARAMETER Experiment Name: Zm_Drought_P Parameter: Plant Line Value: 35A19
  misc_feature: MA Experiment 20000480 PARAMETER Experiment Name: Zm_Drought_P Parameter: Timepoint (hr) Value: 72
  misc_feature: MA Experiment 20000480 PARAMETER Experiment Name: Zm_Drought_P Parameter: Tissue Value: Aerial
  misc_feature: MA Experiment 20000480 PARAMETER Experiment Name: Zm_Drought_P Parameter: Treatment Value: Drought vs. No Drought
  misc_feature: MA Experiment ID: 20000532 Result: Up-regulated in Transcription
  misc_feature: MA Experiment 20000532 PARAMETER Experiment Name: Zm_0.001percent_MeJA_P Parameter: Age (day) Value: 10
  misc_feature: MA Experiment 20000532 PARAMETER Experiment Name: Zm_0.001percent_MeJA_P Parameter: Organism Value: Zea mays
  misc_feature: MA Experiment 20000532 PARAMETER Experiment Name: Zm_0.001percent_MeJA_P Parameter: Plant Line Value: 35A19
  misc_feature: MA Experiment 20000532 PARAMETER Experiment Name: Zm_0.001percent_MeJA_P Parameter: Timepoint (hr) Value: 48
  misc_feature: MA Experiment 20000532 PARAMETER Experiment Name: Zm_0.001percent_MeJA_P Parameter: Tissue Value: Aerial
  misc_feature: MA Experiment 20000532 PARAMETER Experiment Name: Zm_0.001percent_MeJA_P Parameter: Treatment Value: 0.001percent MeJA vs. No Treatment
ataaataagtaaatacaccatggaatgcgtcgtcgtgccggcctcgcctcgttatgctctgccgcctcctctgcctctgcctctgcccagatccacaggttgaccttcgcgacaggcacgcgttggtggacatcttctcgtcgcacaggttcgaggctgtcattcactttgctgggctcaaggctgttggggagagcgtgcacaagcccctgctttactacgacaacaacctggtcggcaccatcaccctcctggaggtgatggctgcgaatggctgcaagaagctggtgttctcgtcatctgcaactgtctatgggtggcccaaggaagtaccatgcaccgaagaattcccgctctgcgccaccaatccctatgggcggacaaagcttgtgattgaagacatctgccgcgacgtccaccgctccgacccggactggaagatcatactgctcaggtacttcaaccccgttggcgctcatcc

SEQ ID NO: 20105 - protein, 142 aa, Zea mays subsp. mays
  peptide (1)..(142): Ceres Seq. ID no. 2733453
  misc_feature (15)..(141): Pfam Name: NAD dependent epimerase/dehydratase family Pfam Description: NAD dependent epimerase/dehydratase family
  misc_feature (16)..(141): Homolog of NCBI NO: 6633809 NR Description: F1N19.2 [Arabidopsis thaliana]
  misc_feature (15)..(141): Homolog of NCBI NO: 15217653 NR Description: UDP-galactose 4-epimerase, putative; protein id:
  misc_feature (15)..(141): Homolog of NCBI NO: 11386775 NR Description: UDP-glucose 4-epimerase GEPI48 (Galactowaldenase)
  misc_feature (15)..(141): Homolog of NCBI NO: 15236988 NR Description: UDP-galactose 4-epimerase - like protein
  misc_feature (15)..(141): Homolog of NCBI NO: 21553659 NR Description: UDP-galactose 4-epimerase-like protein
  misc_feature (15)..(141): Homolog of NCBI NO: 12643850 NR Description: Probable UDP-glucose 4-epimerase At4g10960
  misc_feature (15)..(141): Homolog of NCBI NO: 15236663 NR Description: UDPglucose 4-epimerase - like protein
  misc_feature (15)..(141): Homolog of NCBI NO: 21536846 NR Description: UDPglucose 4-epimerase-like protein [Arabidopsis
  misc_feature (15)..(141): Homolog of NCBI NO: 21715990 NR Description: UDP-glucose 4-epimerase [Oryza sativa (japonica
  misc_feature (15)..(141): Homolog of NCBI NO: 32130594 NR Description: UDP-glucose-4-epimerase [Zea mays]
MLCRLLCLCLCPDPQVDLRDRHALVDIFSSHRFEAVIHFAGLKAVGESVHKPLLYYDNNLVGTITLLEVMAANGCKKLVFSSSATVYGWPKEVPCTEEFPLCATNPYGRTKLVIEDICRDVHRSDPDWKIILLRYFNPVGAH

SEQ ID NO: 20106 - protein, 78 aa, Zea mays subsp. mays
  peptide (1)..(78): Ceres Seq. ID no. 2733454
MRRRAGLASLCSAASSASASAQIHRLTFATGTRWWTSSRRTGSRLSFTLLGSRLLGRACTSPCFTTTTTWSAPSPSWR

SEQ ID NO: 20107 - protein, 73 aa, Zea mays subsp. mays
  peptide (1)..(73): Ceres Seq. ID no. 2733455
  misc_feature (1)..(72): Pfam Name: NAD dependent epimerase/dehydratase family Pfam Description: NAD dependent epimerase/dehydratase family
  misc_feature (1)..(72): Homolog of NCBI NO: 6633809 NR Description: F1N19.2 [Arabidopsis thaliana]
  misc_feature (1)..(72): Homolog of NCBI NO: 15217653 NR Description: UDP-galactose 4-epimerase, putative; protein id:
  misc_feature (1)..(72): Homolog of NCBI NO: 11386775 NR Description: UDP-glucose 4-epimerase GEPI48 (Galactowaldenase)
  misc_feature (1)..(72): Homolog of NCBI NO: 21553659 NR Description: UDP-galactose 4-epimerase-like protein
  misc_feature (1)..(72): Homolog of NCBI NO: 15236988 NR Description: UDP-galactose 4-epimerase - like protein
  misc_feature (1)..(72): Homolog of NCBI NO: 12643850 NR Description: Probable UDP-glucose 4-epimerase At4g10960
  misc_feature (1)..(72): Homolog of NCBI NO: 15236663 NR Description: UDPglucose 4-epimerase - like protein
  misc_feature (1)..(72): Homolog of NCBI NO: 21536846 NR Description: UDPglucose 4-epimerase-like protein [Arabidopsis
  misc_feature (1)..(72): Homolog of NCBI NO: 21715990 NR Description: UDP-glucose 4-epimerase [Oryza sativa (japonica
  misc_feature (1)..(72): Homolog of NCBI NO: 32130594 NR Description: UDP-glucose-4-epimerase [Zea mays]
MAANGCKKLVFSSSATVYGWPKEVPCTEEFPLCATNPYGRTKLVIEDICRDVHRSDPDWKIILLRYFNPVGAH

SEQ ID NO: 20108 - DNA, 1578 bp, Zea mays subsp. mays
  misc_feature (1)..(1578): Ceres Seq. ID no. 12382623
  misc_feature: MA Experiment ID: 108527 Result: Down-regulated in Transcription
  misc_feature: MA Experiment 108527 PARAMETER Experiment Name: Zm_5mM_NO_P Parameter: Age (day) Value: 8
  misc_feature: MA Experiment 108527 PARAMETER Experiment Name: Zm_5mM_NO_P Parameter: Organism Value: Zea mays
  misc_feature: MA Experiment 108527 PARAMETER Experiment Name: Zm_5mM_NO_P Parameter: Plant Line Value: 35A19
  misc_feature: MA Experiment 108527 PARAMETER Experiment Name: Zm_5mM_NO_P Parameter: Timepoint (hr) Value: 6
  misc_feature: MA Experiment 108527 PARAMETER Experiment Name: Zm_5mM_NO_P Parameter: Tissue Value: Aerial
  misc_feature: MA Experiment 108527 PARAMETER Experiment Name: Zm_5mM_NO_P Parameter: Treatment Value: 5mM NO vs. No Treatment
  misc_feature: MA Experiment ID: 108528 Result: Up-regulated in Transcription
  misc_feature: MA Experiment 108528 PARAMETER Experiment Name: Zm_Imbibed_Seeds_P Parameter: Age (day) Value: 5 vs. 2
  misc_feature: MA Experiment 108528 PARAMETER Experiment Name: Zm_Imbibed_Seeds_P Parameter: Organism Value: Zea mays
  misc_feature: MA Experiment 108528 PARAMETER Experiment Name: Zm_Imbibed_Seeds_P Parameter: Plant Line Value: 35A19
  misc_feature: MA Experiment 108528 PARAMETER Experiment Name: Zm_Imbibed_Seeds_P Parameter: Tissue Value: Aerial vs. Embryo
  misc_feature: MA Experiment ID: 108530 Result: Up-regulated in Transcription
  misc_feature: MA Experiment 108530 PARAMETER Experiment Name: Zm_Imbibed_Seeds_P Parameter: Age (day) Value: 6 vs. 2
  misc_feature: MA Experiment 108530 PARAMETER Experiment Name: Zm_Imbibed_Seeds_P Parameter: Organism Value: Zea mays
  misc_feature: MA Experiment 108530 PARAMETER Experiment Name: Zm_Imbibed_Seeds_P Parameter: Plant Line Value: 35A19
  misc_feature: MA Experiment 108530 PARAMETER Experiment Name: Zm_Imbibed_Seeds_P Parameter: Tissue Value: Aerial vs. Embryo
  misc_feature: MA Experiment ID: 108535 Result: Down-regulated in Transcription
  misc_feature: MA Experiment 108535 PARAMETER Experiment Name: Zm_Meristem_P Parameter: Age (day) Value: 8
  misc_feature: MA Experiment 108535 PARAMETER Experiment Name: Zm_Meristem_P Parameter: Organism Value: Zea mays
  misc_feature: MA Experiment 108535 PARAMETER Experiment Name: Zm_Meristem_P Parameter: Plant Line Value: 35A19
  misc_feature: MA Experiment 108535 PARAMETER Experiment Name: Zm_Meristem_P Parameter: Tissue Value: Root Meristem vs. Above Root Meristem
  misc_feature: MA Experiment ID: 108559 Result: Down-regulated in Transcription
  misc_feature: MA Experiment 108559 PARAMETER Experiment Name: Zm_5mM_NO_P Parameter: Age (day) Value: 8
  misc_feature: MA Experiment 108559 PARAMETER Experiment Name: Zm_5mM_NO_P Parameter: Organism Value: Zea mays
  misc_feature: MA Experiment 108559 PARAMETER Experiment Name: Zm_5mM_NO_P Parameter: Plant Line Value: 35A19
  misc_feature: MA Experiment 108559 PARAMETER Experiment Name: Zm_5mM_NO_P Parameter: Timepoint (hr) Value: 12
  misc_feature: MA Experiment 108559 PARAMETER Experiment Name: Zm_5mM_NO_P Parameter: Tissue Value: Aerial
  misc_feature: MA Experiment 108559 PARAMETER Experiment Name: Zm_5mM_NO_P Parameter: Treatment Value: 5mM NO vs. No Treatment
caaaaatggtgccatgcatggatctgctgtccggagttgttacagcatccttgatatagtacacaggctatggactccaattgatggggagtttgatgactacattatcaatccttagggtagcggttaccaatcactacacacagcagttcaggcatctgatagctcaccgctggaggtccagattagaacccagcgaatgcatgagtatgcagaacatggccttgctgctcattggctgtataaggagagcaaagttgagtacagaagtagcatgagtaagagaataagacaaagtacatcatattcatctagttcttcagaagatgaaagttctatacaggatgatatcccatcaaagtacagttcaatgaaagtggggcatccagtgctaagaattgaaggtagtcacttactagcagctgtcgtagtcagtatagataaaggaggaaaggaattgattgttgctgtaagttttagtcttgaagcttctgaagctgtagctgagctaaggtcatcttttcagttgaagcgttgggaagcctatgctaggcttcataaaaaggtttctgagaagtggtggtgtgcacctggacatggtgactggtcaacaaatctggagaggtacacactatgccaggatgggatatttcataagcaagaccaatttgggagacttttacctacatttattcaaataattgatttggcggaagaggaagaggaagagtattggatggttgtatctgccatattcgagggaaaggaaacttgcagtctaccatctgaatcgagttatgctgataaatcatcatctgaacctccaagttctactccattaagcgaccccatcaacaataaggtgcatttgctcagaaccatgcttcaatgggaggagcaagttcgccgtggcgcatctttggcagagaaaagtctcagtgcaagcacctgcacaaaggcaatcctgcgtgaggtggccataatattctggcctaatggcaagattatgagaatgagcactggtagcacagctgctgacgctgctagaagaatgggcgtcgaagggaagctgctctgggttaatggccaactagtgctgccccaaacagagctaaaggatggggatatagttgaagtgagggtatagatgcaagtaccagattccagtacaccttcctcagggttattgatcatattggttcctcagttcttgccctatcttggcaatgcatcgaacctcaattgtacagtccattggtcgaaatgaatcgaagaaagaaggattaggtcctgtgtacataagaaactgcaagtataaaagctgtctgtccagctgtgcttctccttgcccatagttacagtggtaatgtaaatttccgtaagtaaagatgtagtaatgtttagttagtggtccacatttcagcgtgaagttatgaagtgcagtagcgctgcaagttttttttatatatatgtccaaagtagatgtctcatgctgcctaaaaaaatgtccatgtcccgtaatttggcaagccaagattgccagaaaactcatggaggatatggcaaccattttcaact

SEQ ID NO: 20109 - protein, 315 aa, Zea mays subsp. mays
  peptide (1)..(315): Ceres Seq. ID no. 12382624
  misc_feature (1)..(48): Homolog of NCBI NO: 30264477 NR Description: GTP pyrophosphokinase [Bacillus anthracis str.
  misc_feature (1)..(48): Homolog of NCBI NO: 16803563 NR Description: similar to (p)ppGpp synthetase [Listeria
  misc_feature (1)..(48): Homolog of NCBI NO: 14325225 NR Description: Rel [Listeria monocytogenes]
  misc_feature (1)..(48): Homolog of NCBI NO: 21402450 NR Description: TGS, TGS domain [Bacillus anthracis A2012]
  misc_feature (1)..(49): Homolog of NCBI NO: 24215784 NR Description: GTP pyrophosphokinase
  misc_feature (1)..(53): Homolog of NCBI NO: 27468233 NR Description: GTP pyrophosphokinase [Staphylococcus epidermidis
  misc_feature (1)..(18): Homolog of NCBI NO: 22985317 NR Description: hypothetical protein [Burkholderia fungorum]
  misc_feature (1)..(53): Homolog of NCBI NO: 30143060 NR Description: RelA/SpoT [Staphylococcus aureus subsp. aureus]
  misc_feature (1)..(116): Homolog of NCBI NO: 15231772 NR Description: putative GTP pyrophosphokinase
  misc_feature (1)..(48): Homolog of NCBI NO: 30022482 NR Description: GTP pyrophosphokinase [Bacillus cereus ATCC
MHEYAEHGLAAHWLYKESKVEYRSSMSKRIRQSTSYSSSSSEDESSIQDDIPSKYSSMKVGHPVLRIEGSHLLAAVVVSIDKGGKELIVAVSFSLEASEAVAELRSSFQLKRWEAYARLHKKVSEKWWCAPGHGDWSTNLERYTLCQDGIFHKQDQFGRLLPTFIQIIDLAEEEEEEYWMVVSAIFEGKETCSLPSESSYADKSSSEPPSSTPLSDPINNKVHLLRTMLQWEEQVRRGASLAEKSLSASTCTKAILREVAIIFWPNGKIMRMSTGSTAADAARRMGVEGKLLWVNGQLVLPQTELKDGDIVEVRV

SEQ ID NO: 20110 - protein, 290 aa, Zea mays subsp. mays
  peptide (1)..(290): Ceres Seq. ID no. 12382625
  misc_feature (1)..(23): Homolog of NCBI NO: 16800626 NR Description: similar to (p)ppGpp synthetase [Listeria innocua]
  misc_feature (1)..(23): Homolog of NCBI NO: 16803563 NR Description: similar to (p)ppGpp synthetase [Listeria
  misc_feature (1)..(23): Homolog of NCBI NO: 30022482 NR Description: GTP pyrophosphokinase [Bacillus cereus ATCC
  misc_feature (1)..(23): Homolog of NCBI NO: 30264477 NR Description: GTP pyrophosphokinase [Bacillus anthracis str.
  misc_feature (1)..(23): Homolog of NCBI NO: 14325225 NR Description: Rel [Listeria monocytogenes]
  misc_feature (1)..(23): Homolog of NCBI NO: 21402450 NR Description: TGS, TGS domain [Bacillus anthracis A2012]
  misc_feature (1)..(24): Homolog of NCBI NO: 24215784 NR Description: GTP pyrophosphokinase
  misc_feature (1)..(28): Homolog of NCBI NO: 27468233 NR Description: GTP pyrophosphokinase [Staphylococcus epidermidis
  misc_feature (1)..(28): Homolog of NCBI NO: 30143060 NR Description: RelA/SpoT [Staphylococcus aureus subsp. aureus]
  misc_feature (1)..(91): Homolog of NCBI NO: 15231772 NR Description: putative GTP pyrophosphokinase
MSKRIRQSTSYSSSSSEDESSIQDDIPSKYSSMKVGHPVLRIEGSHLLAAVVVSIDKGGKELIVAVSFSLEASEAVAELRSSFQLKRWEAYARLHKKVSEKWWCAPGHGDWSTNLERYTLCQDGIFHKQDQFGRLLPTFIQIIDLAEEEEEEYWMVVSAIFEGKETCSLPSESSYADKSSSEPPSSTPLSDPINNKVHLLRTMLQWEEQVRRGASLAEKSLSASTCTKAILREVAIIFWPNGKIMRMSTGSTAADAARRMGVEGKLLWVNGQLVLPQTELKDGDIVEVRV

SEQ ID NO: 20111 - protein, 258 aa, Zea mays subsp. mays
  peptide (1)..(258): Ceres Seq. ID no. 12382626
  misc_feature (1)..(59): Homolog of NCBI NO: 7141306 NR Description: RSH2 [Arabidopsis thaliana]
  misc_feature (1)..(59): Homolog of NCBI NO: 15231772 NR Description: putative GTP pyrophosphokinase
MKVGHPVLRIEGSHLLAAVVVSIDKGGKELIVAVSFSLEASEAVAELRSSFQLKRWEAYARLHKKVSEKWWCAPGHGDWSTNLERYTLCQDGIFHKQDQFGRLLPTFIQIIDLAEEEEEEYWMVVSAIFEGKETCSLPSESSYADKSSSEPPSSTPLSDPINNKVHLLRTMLQWEEQVRRGASLAEKSLSASTCTKAILREVAIIFWPNGKIMRMSTGSTAADAARRMGVEGKLLWVNGQLVLPQTELKDGDIVEVRV

SEQ ID NO: 20112 - DNA, 439 bp, Zea mays subsp. mays
  misc_feature (1)..(439): Ceres Seq. ID no. 4377636
  misc_feature: MA Experiment ID: 108544 Result: Down-regulated in Transcription
gagtacgagcggctactcccggcggcggcggcgatgagcgcggtgaacatcaccaacgtggcggtgctggataaccccaccgccttcctcaatcccttccagtttgagatctcctacgagtgcctcgtgcccctcgacgacgatctggagtggaagcttatatatgttggatcagctgaagatgaaaactacgatcaacagcttgagagcgtgcttgttggccctgtcaatgttgggacctaccgttttgtccttcaggctgacccaccggatccctcaaagatccgtgaggaagacataattggtgtgactgtgctgctattgacatgctcttacatgggccaggagttcatgagagtaggcyactacgtgaacaacgattattatgatgaacaattgaragaagaacctccascaaargtgctaattgaccgggtgc

SEQ ID NO: 20113 - protein, 146 aa, Zea mays subsp. mays
  peptide (1)..(146): Ceres Seq. ID no. 4377637
  misc_feature (12)..(145): Pfam Name: Anti-silencing protein, ASF1-like Pfam Description: Anti-silencing protein, ASF1-like
  misc_feature (1)..(140): Homolog of NCBI NO: 34851461 NR Description: similar to ASF1 anti-silencing function 1 homolog
  misc_feature (12)..(140): Homolog of NCBI NO: 33416731 NR Description: Unknown (protein for MGC:69151) [Xenopus laevis]
  misc_feature (12)..(140): Homolog of NCBI NO: 7661592 NR Description: anti-silencing function 1A; DKFZP547E2110 protein
  misc_feature (12)..(140): Homolog of NCBI NO: 6841514 NR Description: HSPC146 [Homo sapiens]
  misc_feature (12)..(145): Homolog of NCBI NO: 31215032 NR Description: ENSANGP00000013594 [Anopheles gambiae]
  misc_feature (36)..(145): Homolog of NCBI NO: 34911252 NR Description: putative anti-silencing factor 1-like protein
  misc_feature (12)..(145): Homolog of NCBI NO: 17737649 NR Description: anti-silencing factor 1 CG9383-PA
  misc_feature (23)..(145): Homolog of NCBI NO: 6069498 NR Description: S-locus protein 7 [Brassica rapa]
  misc_feature (12)..(145): Homolog of NCBI NO: 15240842 NR Description: anti-silencing factor 1-like protein
  misc_feature (12)..(145): Homolog of NCBI NO: 15219729 NR Description: hypothetical protein
  misc_feature (122)..(122): Xaa is any aa, unknown or other
  misc_feature (134)..(134): Xaa is any aa, unknown or other
  misc_feature (139)..(139): Xaa is any aa, unknown or other
  misc_feature (140)..(140): Xaa is any aa, unknown or other
EYERLLPAAAAMSAVNITNVAVLDNPTAFLNPFQFEISYECLVPLDDDLEWKLIYVGSAEDENYDQQLESVLVGPVNVGTYRFVLQADPPDPSKIREEDIIGVTVLLLTCSYMGQEFMRVGXYVNNDYYDEQLXEEPPXXVLIDRV

SEQ ID NO: 20114 - protein, 135 aa, Zea mays subsp. mays
  peptide (1)..(135): Ceres Seq. ID no. 4377638
  misc_feature (1)..(134): Pfam Name: Anti-silencing protein, ASF1-like Pfam Description: Anti-silencing protein, ASF1-like
  misc_feature (1)..(129): Homolog of NCBI NO: 34851461 NR Description: similar to ASF1 anti-silencing function 1 homolog
  misc_feature (1)..(129): Homolog of NCBI NO: 33416731 NR Description: Unknown (protein for MGC:69151) [Xenopus laevis]
  misc_feature (1)..(129): Homolog of NCBI NO: 7661592 NR Description: anti-silencing function 1A; DKFZP547E2110 protein
  misc_feature (1)..(129): Homolog of NCBI NO: 6841514 NR Description: HSPC146 [Homo sapiens]
  misc_feature (1)..(134): Homolog of NCBI NO: 31215032 NR Description: ENSANGP00000013594 [Anopheles gambiae]
  misc_feature (25)..(134): Homolog of NCBI NO: 34911252 NR Description: putative anti-silencing factor 1-like protein
  misc_feature (1)..(134): Homolog of NCBI NO: 17737649 NR Description: anti-silencing factor 1 CG9383-PA
  misc_feature (12)..(134): Homolog of NCBI NO: 6069498 NR Description: S-locus protein 7 [Brassica rapa]
  misc_feature (1)..(134): Homolog of NCBI NO: 15240842 NR Description: anti-silencing factor 1-like protein
  misc_feature (1)..(134): Homolog of NCBI NO: 15219729 NR Description: hypothetical protein
  misc_feature (111)..(111): Xaa is any aa, unknown or other
  misc_feature (123)..(123): Xaa is any aa, unknown or other
  misc_feature (128)..(128): Xaa is any aa, unknown or other
  misc_feature (129)..(129): Xaa is any aa, unknown or other
MSAVNITNVAVLDNPTAFLNPFQFEISYECLVPLDDDLEWKLIYVGSAEDENYDQQLESVLVGPVNVGTYRFVLQADPPDPSKIREEDIIGVTVLLLTCSYMGQEFMRVGXYVNNDYYDEQLXEEPPXXVLIDRV

SEQ ID NO: 20115 - DNA, 2974 bp, Zea mays subsp. mays; identical to SEQ ID NO: 13737
  misc_feature (1)..(2974): Ceres Seq. ID no. 13569654
  misc_feature: MA Experiment ID: 20000492 Result: Down-regulated in Transcription
  misc_feature: MA Experiment 20000492 PARAMETER Experiment Name: Zm_Hybrid_Seed_Dev_P Parameter: DAP Value: 12
  misc_feature: MA Experiment 20000492 PARAMETER Experiment Name: Zm_Hybrid_Seed_Dev_P Parameter: Organism Value: Zea mays
  misc_feature: MA Experiment 20000492 PARAMETER Experiment Name: Zm_Hybrid_Seed_Dev_P Parameter: Plant Line Value: 35A19
  misc_feature: MA Experiment 20000492 PARAMETER Experiment Name: Zm_Hybrid_Seed_Dev_P Parameter: Tissue Value: Fert Kernel vs. Unfert Floret

SEQ ID NO: 20116 - protein, 542 aa, Zea mays subsp. mays; identical to SEQ ID NO: 13738
  peptide (1)..(542): Ceres Seq. ID no. 13569655
  misc_feature (307)..(457): Pfam Name: Protein kinase domain Pfam Description: Protein kinase domain
  misc_feature (227)..(480): Homolog of NCBI NO: 38345839 NR Description: OSJNBa0084K11.3 [Oryza sativa (japonica
  misc_feature (23)..(457): Homolog of NCBI NO: 17027283 NR Description: putative protein kinase [Oryza sativa (japonica
  misc_feature (30)..(491): Homolog of NCBI NO: 33146554 NR Description: putative MAP3K protein kinase(Mitogen-activated
  misc_feature (18)..(505): Homolog of NCBI NO: 15982852 NR Description: AT5g66850/MUD21_11 [Arabidopsis thaliana]
  misc_feature (306)..(505): Homolog of NCBI NO: 25387031 NR Description: mitogen-activated protein kinase MAP3K [imported] Arabidopsis thaliana (fragment) >gi|2315153|emb|CAA74696.1| MAP3K
  misc_feature (306)..(505): Homolog of NCBI NO: 9758135 NR Description: MAP protein kinase [Arabidopsis thaliana]
  misc_feature (18)..(505): Homolog of NCBI NO: 18425121 NR Description: MAP protein kinase [Arabidopsis thaliana] putative MAP protein kinase [Arabidopsis thaliana]
  misc_feature (30)..(491): Homolog of NCBI NO: 34915394 NR Description: putative MAP3K protein kinase(Mitogen-activated
  misc_feature (458)..(491): Homolog of NCBI NO: 17027283 NR Description: putative protein kinase [Oryza sativa (japonica
  misc_feature (174)..(479): Homolog of NCBI NO: 30695537 NR Description: mitogen-activated protein kinase kinase kinase putative (MAP3Ka) [Arabidopsis thaliana] >gi|25405646|pir||G96575

SEQ ID NO: 20117 - protein, 502 aa, Zea mays subsp. mays; identical to SEQ ID NO: 13739
  peptide (1)..(502): Ceres Seq. ID no. 13569656
  misc_feature (267)..(417): Pfam Name: Protein kinase domain Pfam Description: Protein kinase domain
  misc_feature (1)..(417): Homolog of NCBI NO: 17027283 NR Description: putative protein kinase [Oryza sativa (japonica
  misc_feature (418)..(451): Homolog of NCBI NO: 17027283 NR Description: putative protein kinase [Oryza sativa (japonica
  misc_feature (1)..(451): Homolog of NCBI NO: 33146554 NR Description: putative MAP3K protein kinase(Mitogen-activated
  misc_feature (1)..(451): Homolog of NCBI NO: 34915394 NR Description: putative MAP3K protein kinase(Mitogen-activated
  misc_feature (1)..(465): Homolog of NCBI NO: 15982852 NR Description: AT5g66850/MUD21_11 [Arabidopsis thaliana]
  misc_feature (1)..(465): Homolog of NCBI NO: 18425121 NR Description: MAP protein kinase [Arabidopsis thaliana] putative MAP protein kinase [Arabidopsis thaliana]
  misc_feature (266)..(465): Homolog of NCBI NO: 25387031 NR Description: mitogen-activated protein kinase MAP3K [imported] Arabidopsis thaliana (fragment) >gi|2315153|emb|CAA74696.1| MAP3K
  misc_feature (266)..(465): Homolog of NCBI NO: 9758135 NR Description: MAP protein kinase [Arabidopsis thaliana]
  misc_feature (187)..(440): Homolog of NCBI NO: 38345839 NR Description: OSJNBa0084K11.3 [Oryza sativa (japonica
  misc_feature (134)..(439): Homolog of NCBI NO: 30695537 NR Description: mitogen-activated protein kinase kinase kinase putative (MAP3Ka) [Arabidopsis thaliana] >gi|25405646|pir||G96575

SEQ ID NO: 20118 - protein, 460 aa, Zea mays subsp. mays; identical to SEQ ID NO: 13740
  peptide (1)..(460): Ceres Seq. ID no. 13569657
  misc_feature (225)..(375): Pfam Name: Protein kinase domain Pfam Description: Protein kinase domain
  misc_feature (1)..(375): Homolog of NCBI NO: 17027283 NR Description: putative protein kinase [Oryza sativa (japonica
  misc_feature (376)..(409): Homolog of NCBI NO: 17027283 NR Description: putative protein kinase [Oryza sativa (japonica
  misc_feature (1)..(409): Homolog of NCBI NO: 33146554 NR Description: putative MAP3K protein kinase(Mitogen-activated
  misc_feature (1)..(409): Homolog of NCBI NO: 34915394 NR Description: putative MAP3K protein kinase(Mitogen-activated
  misc_feature (1)..(423): Homolog of NCBI NO: 15982852 NR Description: AT5g66850/MUD21_11 [Arabidopsis thaliana]
  misc_feature (1)..(423): Homolog of NCBI NO: 18425121 NR Description: MAP protein kinase [Arabidopsis thaliana] putative MAP protein kinase [Arabidopsis thaliana]
  misc_feature (224)..(423): Homolog of NCBI NO: 25387031 NR Description: mitogen-activated protein kinase MAP3K [imported] Arabidopsis thaliana (fragment) >gi|2315153|emb|CAA74696.1| MAP3K
  misc_feature (224)..(423): Homolog of NCBI NO: 9758135 NR Description: MAP protein kinase [Arabidopsis thaliana]
  misc_feature (145)..(398): Homolog of NCBI NO: 38345839 NR Description: OSJNBa0084K11.3 [Oryza sativa (japonica
  misc_feature (92)..(397): Homolog of NCBI NO: 30695537 NR Description: mitogen-activated protein kinase kinase kinase putative (MAP3Ka) [Arabidopsis thaliana] >gi|25405646|pir||G96575

SEQ ID NO: 20119 - DNA, 2039 bp, Zea mays subsp. mays
  misc_feature (1)..(2039): Ceres Seq. ID no. 13503133
  misc_feature: MA Experiment ID: 108522 Result: Up-regulated in Transcription
  misc_feature: MA Experiment 108522 PARAMETER Experiment Name: Zm_42deg_Heat_P Parameter: Age (day) Value: 8
  misc_feature: MA Experiment 108522 PARAMETER Experiment Name: Zm_42deg_Heat_P Parameter: Organism Value: Zea mays
  misc_feature: MA Experiment 108522 PARAMETER Experiment Name: Zm_42deg_Heat_P Parameter: Plant Line Value: 35A19
  misc_feature: MA Experiment 108522 PARAMETER Experiment Name: Zm_42deg_Heat_P Parameter: Temperature (deg C) Value: 42 vs. 22
  misc_feature: MA Experiment 108522 PARAMETER Experiment Name: Zm_42deg_Heat_P Parameter: Timepoint (hr) Value: 1
  misc_feature: MA Experiment 108522 PARAMETER Experiment Name: Zm_42deg_Heat_P Parameter: Tissue Value: Aerial
  misc_feature: MA Experiment ID: 108527 Result: Up-regulated in Transcription
  misc_feature: MA Experiment 108527 PARAMETER Experiment Name: Zm_5mM_NO_P Parameter: Age (day) Value: 8
  misc_feature: MA Experiment 108527 PARAMETER Experiment Name: Zm_5mM_NO_P Parameter: Organism Value: Zea mays
  misc_feature: MA Experiment 108527 PARAMETER Experiment Name: Zm_5mM_NO_P Parameter: Plant Line Value: 35A19
  misc_feature: MA Experiment 108527 PARAMETER Experiment Name: Zm_5mM_NO_P Parameter: Timepoint (hr) Value: 6
  misc_feature: MA Experiment 108527 PARAMETER Experiment Name: Zm_5mM_NO_P Parameter: Tissue Value: Aerial
  misc_feature: MA Experiment 108527 PARAMETER Experiment Name: Zm_5mM_NO_P Parameter: Treatment Value: 5mM NO vs. No Treatment
gcccacgcagcaatctggtcttctggaaatctccatcaatccgattccgaacggcagaaaattttcccttcccccggccaccaaccaaccaaacccgagcaaccagcctgagccacctcccatgcgccgcgccgcagcctgaggaggaggaggaggacgcggtggtctggagagggatggagggcgcgtcctcgctgccgcccttcctgagcaagacgtacgagatggtggacgacccggccacggacgccgtggtggcgtggacgccgctggggaccagcttcgtcgtcgcgaaccaggccgagttctggagggatctgctccccaagtacttcaagcacaacaacttctccagcttcgtgcggcaactgaacacctacgtaagcccccaccgcacagcacgatcattcattttcttcgccccatctccctctctgtccacctgtggttttgatcaatcggggtgcgtggcggcgtgctactgtcagctatgctgttgcccctttgcaaaaaaactccacaagttggcatttggggggcgaatcttgttagccttgtagtagaacaattgtttagggtatcgtcttcggtcgaatgaactgtttccttgttatagcatagcgtgttgacaacttggtggcgataactttaaattacatgtgtccactatatatctagtatatatgctcaattatcttgttgagatgtttttccttttctaaatccaactagagttagtgtaccttttgacaaatgaagtgctgctaacggtaaacactgttgaattggcatctttgttgacacccaaattaaatccaatagaaaccataatgatttcggatggttacttttgatttatgagccttgatgggtcaaatttctgtgatgttgtgttaatcgttttcctgcttcttcttatgtagggctttaagaaaattgatcctgaacaatgggagtttgcaaatgatgatttcattaggggacaacagcaccgactgaaaaatatacacaggcgtaagcctatattcagccattcatcgcatactcagggttctggaccattaccagataccgaaaggagggattatgaggaggaaatcgaaaggcttaagtgtgacaatgcagctctgacctcagagcttgaaaagaatgcacagaagaaacttgttacagagaaacgaatgcaggatctagaagataagttgatctttttggaggatcggcagaagaatctgatggcgtatgtcagggatattgtacaggcaccaggatctttctctagctttgtgcagcaacctgatcatcacggaaagaaaaggagactaccagtacctatctctctctaccaagattctaatgctaaggggaaccaggttgtgcatgggagcttcatcaccaacccaccagcttgcagggaatcatttgacaagacggaatcttcattgaactcgttggagaatttccttcgggaagcgagtgaagcgttcaatatttcatatgatgatggcctccctggcccttcatctgctgtcgttatcacagagctccattcgtccggagaaagtgatccccatgtgccatcacctgtctcaagaatgcatacatcttcggctggtgcgggagattcgctctcttcccgcgatttaacagagtcaactagctgcgctgagagccctcgcctccctcagatccaaccctgtacagattcacgaactaaggtgtctgagatcgatgtcaatcgggagcctgctgtcacagaaactggtccgacaagggaccaacctgccgaggagcctccccacgtagcagctggggtgaacgatggcttctggcagcagttcctcaccgagcagcccggtcctgatgtacaccaggaggcccaatcagaaaggagagatggcgatgatgataagggcgatcagacgaggataggggaccgagaaaatttttggtgggggaagaagaatgttgagcagatgagagagaagctggggcgtctcacctcggtggagaaaacctgactgtatttcttgtagctg

SEQ ID NO: 20120 - protein, 279 aa, Zea mays subsp. mays
  peptide (1)..(279): Ceres Seq. ID no. 13503134
  misc_feature (175)..(269): Homolog of NCBI NO: 15242478 NR Description: heat shock transcription factor family
  misc_feature (1)..(114): Homolog of NCBI NO: 15242478 NR Description: heat shock transcription factor family
  misc_feature (149)..(279): Homolog of NCBI NO: 15234053 NR Description: heat shock transcription factor 21 [Arabidopsis
  misc_feature (149)..(279): Homolog of NCBI NO: 3399765 NR Description: heat shock transcription factor 21 [Arabidopsis
  misc_feature (1)..(101): Homolog of NCBI NO: 15234053 NR Description: heat shock transcription factor 21 [Arabidopsis
  misc_feature (1)..(101): Homolog of NCBI NO: 3399765 NR Description: heat shock transcription factor 21 [Arabidopsis
  misc_feature (152)..(279): Homolog of NCBI NO: 5821138 NR Description: heat shock factor [Nicotiana tabacum]
  misc_feature (1)..(102): Homolog of NCBI NO: 5821138 NR Description: heat shock factor [Nicotiana tabacum]
  misc_feature (1)..(112): Homolog of NCBI NO: 2130134 NR Description: heat shock transcription factor (clone hsfb) -
  misc_feature (1)..(279): Homolog of NCBI NO: 34909524 NR Description: putative heat shock factor
MQDLEDKLIFLEDRQKNLMAYVRDIVQAPGSFSSFVQQPDHHGKKRRLPVPISLYQDSNAKGNQVVHGSFITNPPACRESFDKTESSLNSLENFLREASEAFNISYDDGLPGPSSAVVITELHSSGESDPHVPSPVSRMHTSSAGAGDSLSSRDLTESTSCAESPRLPQIQPCTDSRTKVSEIDVNREPAVTETGPTRDQPAEEPPHVAAGVNDGFWQQFLTEQPGPDVHQEAQSERRDGDDDKGDQTRIGDRENFWWGKKNVEQMREKLGRLTSVEKT

SEQ ID NO: 20121 - protein, 261 aa, Zea mays subsp. mays
  peptide (1)..(261): Ceres Seq. ID no. 13503135
  misc_feature (157)..(251): Homolog of NCBI NO: 15242478 NR Description: heat shock transcription factor family
  misc_feature (1)..(96): Homolog of NCBI NO: 15242478 NR Description: heat shock transcription factor family
  misc_feature (131)..(261): Homolog of NCBI NO: 15234053 NR Description: heat shock transcription factor 21 [Arabidopsis
  misc_feature (131)..(261): Homolog of NCBI NO: 3399765 NR Description: heat shock transcription factor 21 [Arabidopsis
  misc_feature (1)..(83): Homolog of NCBI NO: 15234053 NR Description: heat shock transcription factor 21 [Arabidopsis
  misc_feature (1)..(83): Homolog of NCBI NO: 3399765 NR Description: heat shock transcription factor 21 [Arabidopsis
  misc_feature (134)..(261): Homolog of NCBI NO: 5821138 NR Description: heat shock factor [Nicotiana tabacum]
  misc_feature (1)..(84): Homolog of NCBI NO: 5821138 NR Description: heat shock factor [Nicotiana tabacum]
  misc_feature (1)..(94): Homolog of NCBI NO: 2130134 NR Description: heat shock transcription factor (clone hsfb) -
  misc_feature (1)..(261): Homolog of NCBI NO: 34909524 NR Description: putative heat shock factor
MAYVRDIVQAPGSFSSFVQQPDHHGKKRRLPVPISLYQDSNAKGNQVVHGSFITNPPACRESFDKTESSLNSLENFLREASEAFNISYDDGLPGPSSAVVITELHSSGESDPHVPSPVSRMHTSSAGAGDSLSSRDLTESTSCAESPRLPQIQPCTDSRTKVSEIDVNREPAVTETGPTRDQPAEEPPHVAAGVNDGFWQQFLTEQPGPDVHQEAQSERRDGDDDKGDQTRIGDRENFWWGKKNVEQMREKLGRLTSVEKT

SEQ ID NO: 20122 - protein, 185 aa, Zea mays subsp. mays
  peptide (1)..(185): Ceres Seq. ID no. 13503136
  misc_feature (66)..(126): Pfam Name: HSF-type DNA-binding Pfam Description: HSF-type DNA-binding
  misc_feature (59)..(126): Homolog of NCBI NO: 2130134 NR Description: heat shock transcription factor (clone hsfb) -
  misc_feature (58)..(126): Homolog of NCBI NO: 18414114 NR Description: heat shock transcription factor family
  misc_feature (58)..(126): Homolog of NCBI NO: 16580743 NR Description: spl7 protein [Oryza sativa]
  misc_feature (61)..(126): Homolog of NCBI NO: 15242478 NR Description: heat shock transcription factor family
  misc_feature (62)..(126): Homolog of NCBI NO: 3399765 NR Description: heat shock transcription factor 21 [Arabidopsis
  misc_feature (63)..(145): Homolog of NCBI NO: 5821138 NR Description: heat shock factor [Nicotiana tabacum]
  misc_feature (62)..(126): Homolog of NCBI NO: 15234053 NR Description: heat shock transcription factor 21 [Arabidopsis
  misc_feature (58)..(126): Homolog of NCBI NO: 16580739 NR Description: heat stress transcription factor Spl7
  misc_feature (62)..(126): Homolog of NCBI NO: 7158882 NR Description: heat shock transcription factor [Medicago sativa]
  misc_feature (58)..(126): Homolog of NCBI NO: 34909524 NR Description: putative heat shock factor
PRSNLVFWKSPSIRFRTAENFPFPRPPTNQTRATSLSHLPCAAPQPEEEEEDAVVWRGMEGASSLPPFLSKTYEMVDDPATDAVVAWTPLGTSFVVANQAEFWRDLLPKYFKHNNFSSFVRQLNTYVSPHRTARSFIFFAPSPSLSTCGFDQSGCVAACYCQLCCCPFAKKLHKLAFGGRILLAL

SEQ ID NO: 20123 - DNA, 1757 bp, Zea mays subsp. mays
  misc_feature (1)..(1757): Ceres Seq. ID no. 12435555
  misc_feature: MA Experiment ID: 108528 Result: Down-regulated in Transcription
  misc_feature: MA Experiment 108528 PARAMETER Experiment Name: Zm_Imbibed_Seeds_P Parameter: Age (day) Value: 5 vs. 2
  misc_feature: MA Experiment 108528 PARAMETER Experiment Name: Zm_Imbibed_Seeds_P Parameter: Organism Value: Zea mays
  misc_feature: MA Experiment 108528 PARAMETER Experiment Name: Zm_Imbibed_Seeds_P Parameter: Plant Line Value: 35A19
  misc_feature: MA Experiment 108528 PARAMETER Experiment Name: Zm_Imbibed_Seeds_P Parameter: Tissue Value: Aerial vs. Embryo
  misc_feature: MA Experiment ID: 108529 Result: Down-regulated in Transcription
  misc_feature: MA Experiment 108529 PARAMETER Experiment Name: Zm_Imbibed_Seeds_P Parameter: Age (day) Value: 5 vs. 2
  misc_feature: MA Experiment 108529 PARAMETER Experiment Name: Zm_Imbibed_Seeds_P Parameter: Organism Value: Zea mays
  misc_feature: MA Experiment 108529 PARAMETER Experiment Name: Zm_Imbibed_Seeds_P Parameter: Plant Line Value: 35A19
  misc_feature: MA Experiment 108529 PARAMETER Experiment Name: Zm_Imbibed_Seeds_P Parameter: Tissue Value: Roots vs. Embryo
  misc_feature: MA Experiment ID: 108530 Result: Down-regulated in Transcription
  misc_feature: MA Experiment 108530 PARAMETER Experiment Name: Zm_Imbibed_Seeds_P Parameter: Age (day) Value: 6 vs. 2
  misc_feature: MA Experiment 108530 PARAMETER Experiment Name: Zm_Imbibed_Seeds_P Parameter: Organism Value: Zea mays
  misc_feature: MA Experiment 108530 PARAMETER Experiment Name: Zm_Imbibed_Seeds_P Parameter: Plant Line Value: 35A19
  misc_feature: MA Experiment 108530 PARAMETER Experiment Name: Zm_Imbibed_Seeds_P Parameter: Tissue Value: Aerial vs. Embryo
  misc_feature: MA Experiment ID: 108536 Result: Up-regulated in Transcription
  misc_feature: MA Experiment 108536 PARAMETER Experiment Name: Zm_Meristem_P Parameter: Age (day) Value: 8
  misc_feature: MA Experiment 108536 PARAMETER Experiment Name: Zm_Meristem_P Parameter: Organism Value: Zea mays
  misc_feature: MA Experiment 108536 PARAMETER Experiment Name: Zm_Meristem_P Parameter: Plant Line Value: 35A19
  misc_feature: MA Experiment 108536 PARAMETER Experiment Name: Zm_Meristem_P Parameter: Tissue Value: Shoot Meristem vs. Above Shoot Meristem
  misc_feature: MA Experiment ID: 108543 Result: Up-regulated in Transcription
  misc_feature: MA Experiment ID: 108546 Result: Down-regulated in Transcription
  misc_feature: MA Experiment 108546 PARAMETER Experiment Name: Zm_Imbibed_Seeds_P Parameter: Age (day) Value: 3 vs. 2
  misc_feature: MA Experiment 108546 PARAMETER Experiment Name: Zm_Imbibed_Seeds_P Parameter: Organism Value: Zea mays
  misc_feature: MA Experiment 108546 PARAMETER Experiment Name: Zm_Imbibed_Seeds_P Parameter: Plant Line Value: 35A19
  misc_feature: MA Experiment 108546 PARAMETER Experiment Name: Zm_Imbibed_Seeds_P Parameter: Tissue Value: Roots vs. Embryo
  misc_feature: MA Experiment ID: 108547 Result: Down-regulated in Transcription
  misc_feature: MA Experiment 108547 PARAMETER Experiment Name: Zm_Imbibed_Seeds_P Parameter: Age (day) Value: 4 vs. 2
  misc_feature: MA Experiment 108547 PARAMETER Experiment Name: Zm_Imbibed_Seeds_P Parameter: Organism Value: Zea mays
  misc_feature: MA Experiment 108547 PARAMETER Experiment Name: Zm_Imbibed_Seeds_P Parameter: Plant Line Value: 35A19
  misc_feature: MA Experiment 108547 PARAMETER Experiment Name: Zm_Imbibed_Seeds_P Parameter: Tissue Value: Aerial vs. Embryo
gtccgccgcctcctctctccgcacaggctcaccaaacgacgaacactctccctcgacccgtgaccgtgagcaagcgggtggcgacggcgcgcggccggccatggtgagcgagagcaaccgcggcggtgcggaccggacgacggcggcgggggaggagcgcgggcagctgctgttcgacgtgccggagatcaggttcaccaagctcttcatcaacggatccttcgtcgacgccgtctcagagccggacgttcgagacgagggacccgcgcacggggggcgtcatcgccagcgtggcagaagctgacaaagaagacgtggacttggcagtgagggcagccagggccgctttcgaccacggcgagtggccacgcatgtctggatccgaacgggggcggatcatggcgaggctggccgacctggtggaggagcgcgcggacgagctggcggccctggagagcctggacgccggcaagcacccggccgtgacccgggcggtggacgtcggcaacgccgccggcagcctgcgctacttcgccggcgcggccgacaagatccacggcgagacgctcaagatgccgggccagttccagggccacaccctgcgcgagccgctcggcgtcgccggcgtcatcatcccctggaacttcccgtccaccatgttcgccgtcaaggtggcgccggcgctggccgcacggctgcgccctggtcgtcaagcccgccgagcagacgccgctcagcgccctgtacctcgcgcagctcgccaagcaggcaggggtcccagacggcgtgatcaacgtcgtgccaggcttcggncngacggcaggagccgcgctggcntctcacatggacgttgacatggtgagtttcaccggatccacggaggtcgggcgccttataatgaaggcctccncggagagcaacnngnagcccgtntacctggagctgggcggcaagtccccgctcatcgtnttnnacgacgccgacctcgacatgnccgtggagctnnccgtcggcgccagcttctttaacaagggagaggcctgcgtcgccgcgagccgcgtctacgtgcaggaacgcgtctacgacaggttcgaggagaggttgccggagaggatgaggagctgggtcgtgggcgacccgttcagcgaccctagcgccgaccagggcccgcaggtggacaaggctcagtatgagagggttctgagctacattgaccatggcnagcgagaaggggccactcttctgactggaggaaggccatgcggtccggaagggaaaggctactacattgagcccacagttttcaccaacgtcaaggaggacatgatcatagcgaaggaggagatcttcggacccgtcatgtgcctgatgaagttcaagacggtggaggaggcgatcgcgagggcgaacgacacgcggtacgggctgggggcgggggtggtgacgcgggacctggacgtggcgaaccgggtggtgaggtcggtgcgcgccggggtggtgtgggtgaactgctacttcgccatgggcagcgactgccccttcggcggccgcaanatgagcggcttcggcaaggacgagggcatgcacgcgctcgacaagtacctggccgtcaagtccgtcgtcaccccgctccgcgcctcgccctggatctgattctctttaatttctggtgtcagtcacccacccncaacacatatacagcagtggtcaaaagatatttatttattgataataaagtagctagctatattgtgcgg

SEQ ID NO: 20124 - protein, 269 aa, Zea mays subsp. mays
  peptide (1)..(269): Ceres Seq. ID no. 12435556
  misc_feature (1)..(269): Homolog of NCBI NO: 20530129 NR Description: mitochondrial aldehyde dehydrogenase [Sorghum
  misc_feature (1)..(269): Homolog of NCBI NO: 18395300 NR Description: putative aldehyde dehydrogenase
  misc_feature (1)..(269): Homolog of NCBI NO: 15228319 NR Description: aldehyde dehydrogenase (NAD+)-like protein
  misc_feature (1)..(269): Homolog of NCBI NO: 18404212 NR Description: Expressed protein
  misc_feature (1)..(268): Homolog of NCBI NO: 19850245 NR Description: cytosolic aldehyde dehydrogenase RF2D [Zea mays]
  misc_feature (1)..(269): Homolog of NCBI NO: 34912248 NR Description: cytosolic aldehyde dehydrogenase
  misc_feature (1)..(268): Homolog of NCBI NO: 34912252 NR Description: putative cytosolic aldehyde dehydrogenase
  misc_feature (1)..(269): Homolog of NCBI NO: 19850241 NR Description: cytosolic aldehyde dehydrogenase RF2C [Zea mays]
  misc_feature (1)..(269): Homolog of NCBI NO: 19850243 NR Description: cytosolic aldehyde dehydrogenase RF2C [Zea mays]
  misc_feature (1)..(268): Homolog of NCBI NO: 19850247 NR Description: cytosolic aldehyde dehydrogenase RF2D [Zea mays]
  misc_feature (23)..(23): Xaa is any aa, unknown or other
  misc_feature (27)..(27): Xaa is any aa, unknown or other
  misc_feature (28)..(28): Xaa is any aa, unknown or other
  misc_feature (30)..(30): Xaa is any aa, unknown or other
  misc_feature (42)..(42): Xaa is any aa, unknown or other
  misc_feature (43)..(43): Xaa is any aa, unknown or other
  misc_feature (44)..(44): Xaa is any aa, unknown or other
  misc_feature (51)..(51): Xaa is any aa, unknown or other
  misc_feature (54)..(54): Xaa is any aa, unknown or other
  misc_feature (55)..(55): Xaa is any aa, unknown or other
  misc_feature (127)..(127): Xaa is any aa, unknown or other
  misc_feature (237)..(237): Xaa is any aa, unknown or other
MDVDMVSFTGSTEVGRLIMKASXESNXXPXYLELGGKSPLIXXXDADLDMXVEXXVGASFFNKGEACVAASRVYVQERVYDRFEERLPERMRSWVVGDPFSDPSADQGPQVDKAQYERVLSYIDHGXREGATLLTGGRPCGPEGKGYYIEPTVFTNVKEDMIIAKEEIFGPVMCLMKFKTVEEAIARANDTRYGLGAGVVTRDLDVANRVVRSVRAGVVWVNCYFAMGSDCPFGGRXMSGFGKDEGMHALDKYLAVKSVVTPLRASPWI

SEQ ID NO: 20125 - protein, 265 aa, Zea mays subsp. mays
  peptide (1)..(265): Ceres Seq. ID no. 12435557
  misc_feature (1)..(265): Homolog of NCBI NO: 20530129 NR Description: mitochondrial aldehyde dehydrogenase [Sorghum
  misc_feature (1)..(265): Homolog of NCBI NO: 18395300 NR Description: putative aldehyde dehydrogenase
  misc_feature (1)..(265): Homolog of NCBI NO: 15228319 NR Description: aldehyde dehydrogenase (NAD+)-like protein
  misc_feature (1)..(265): Homolog of NCBI NO: 18404212 NR Description: Expressed protein
  misc_feature (1)..(264): Homolog of NCBI NO: 19850245 NR Description: cytosolic aldehyde dehydrogenase RF2D [Zea mays]
  misc_feature (1)..(265): Homolog of NCBI NO: 34912248 NR Description: cytosolic aldehyde dehydrogenase
  misc_feature (1)..(264): Homolog of NCBI NO: 34912252 NR Description: putative cytosolic aldehyde dehydrogenase
  misc_feature (1)..(265): Homolog of NCBI NO: 19850241 NR Description: cytosolic aldehyde dehydrogenase RF2C [Zea mays]
  misc_feature (1)..(265): Homolog of NCBI NO: 19850243 NR Description: cytosolic aldehyde dehydrogenase RF2C [Zea mays]
  misc_feature (1)..(264): Homolog of NCBI NO: 19850247 NR Description: cytosolic aldehyde dehydrogenase RF2D [Zea mays]
  misc_feature (19)..(19): Xaa is any aa, unknown or other
  misc_feature (23)..(23): Xaa is any aa, unknown or other
  misc_feature (24)..(24): Xaa is any aa, unknown or other
  misc_feature (26)..(26): Xaa is any aa, unknown or other
  misc_feature (38)..(38): Xaa is any aa, unknown or other
  misc_feature (39)..(39): Xaa is any aa, unknown or other
  misc_feature (40)..(40): Xaa is any aa, unknown or other
  misc_feature (47)..(47): Xaa is any aa, unknown or other
  misc_feature (50)..(50): Xaa is any aa, unknown or other
  misc_feature (51)..(51): Xaa is any aa, unknown or other
  misc_feature (123)..(123): Xaa is any aa, unknown or other
  misc_feature (233)..(233): Xaa is any aa, unknown or other
MVSFTGSTEVGRLIMKASXESNXXPXYLELGGKSPLIXXXDADLDMXVEXXVGASFFNKGEACVAASRVYVQERVYDRFEERLPERMRSWVVGDPFSDPSADQGPQVDKAQYERVLSYIDHGXREGATLLTGGRPCGPEGKGYYIEPTVFTNVKEDMIIAKEEIFGPVMCLMKFKTVEEAIARANDTRYGLGAGVVTRDLDVANRVVRSVRAGVVWVNCYFAMGSDCPFGGRXMSGFGKDEGMHALDKYLAVKSVVTPLRASPWI

SEQ ID NO: 20126 - protein, 251 aa, Zea mays subsp. mays
  peptide (1)..(251): Ceres Seq. ID no. 12435558
  misc_feature (1)..(251): Homolog of NCBI NO: 20530129 NR Description: mitochondrial aldehyde dehydrogenase [Sorghum
  misc_feature (1)..(251): Homolog of NCBI NO: 18395300 NR Description: putative aldehyde dehydrogenase
  misc_feature (1)..(251): Homolog of NCBI NO: 15228319 NR Description: aldehyde dehydrogenase (NAD+)-like protein
  misc_feature (1)..(251): Homolog of NCBI NO: 18404212 NR Description: Expressed protein
  misc_feature (1)..(250): Homolog of NCBI NO: 19850245 NR Description: cytosolic aldehyde dehydrogenase RF2D [Zea mays]
  misc_feature (1)..(251): Homolog of NCBI NO: 34912248 NR Description: cytosolic aldehyde dehydrogenase
  misc_feature (1)..(250): Homolog of NCBI NO: 34912252 NR Description: putative cytosolic aldehyde dehydrogenase
  misc_feature (1)..(251): Homolog of NCBI NO: 19850241 NR Description: cytosolic aldehyde dehydrogenase RF2C [Zea mays]
  misc_feature (1)..(251): Homolog of NCBI NO: 19850243 NR Description: cytosolic aldehyde dehydrogenase RF2C [Zea mays]
  misc_feature (1)..(250): Homolog of NCBI NO: 19850247 NR Description: cytosolic aldehyde dehydrogenase RF2D [Zea mays]
  misc_feature (5)..(5): Xaa is any aa, unknown or other
  misc_feature (9)..(9): Xaa is any aa, unknown or other
  misc_feature (10)..(10): Xaa is any aa, unknown or other
  misc_feature (12)..(12): Xaa is any aa, unknown or other
  misc_feature (24)..(24): Xaa is any aa, unknown or other
  misc_feature (25)..(25): Xaa is any aa, unknown or other
  misc_feature (26)..(26): Xaa is any aa, unknown or other
  misc_feature (33)..(33): Xaa is any aa, unknown or other
  misc_feature (36)..(36): Xaa is any aa, unknown or other
  misc_feature (37)..(37): Xaa is any aa, unknown or other
  misc_feature (109)..(109): Xaa is any aa, unknown or other
  misc_feature (219)..(219): Xaa is any aa, unknown or other
MKASXESNXXPXYLELGGKSPLIXXXDADLDMXVEXXVGASFFNKGEACVAASRVYVQERVYDRFEERLPERMRSWVVGDPFSDPSADQGPQVDKAQYERVLSYIDHGXREGATLLTGGRPCGPEGKGYYIEPTVFTNVKEDMIIAKEEIFGPVMCLMKFKTVEEAIARANDTRYGLGAGVVTRDLDVANRVVRSVRAGVVWVNCYFAMGSDCPFGGRXMSGFGKDEGMHALDKYLAVKSVVTPLRASPWI

SEQ ID NO: 20127 - DNA, 1787 bp, Zea mays subsp. mays; identical to SEQ ID NO: 17627
  misc_feature (1)..(1787): Ceres Seq. ID no. 13498188
  misc_feature: MA Experiment ID: 108522 Result: Up-regulated in Transcription
  misc_feature: MA Experiment 108522 PARAMETER Experiment Name: Zm_42deg_Heat_P Parameter: Age (day) Value: 8
  misc_feature: MA Experiment 108522 PARAMETER Experiment Name: Zm_42deg_Heat_P Parameter: Organism Value: Zea mays
  misc_feature: MA Experiment 108522 PARAMETER Experiment Name: Zm_42deg_Heat_P Parameter: Plant Line Value: 35A19
  misc_feature: MA Experiment 108522 PARAMETER Experiment Name: Zm_42deg_Heat_P Parameter: Temperature (deg C) Value: 42 vs. 22
  misc_feature: MA Experiment 108522 PARAMETER Experiment Name: Zm_42deg_Heat_P Parameter: Timepoint (hr) Value: 1
  misc_feature: MA Experiment 108522 PARAMETER Experiment Name: Zm_42deg_Heat_P Parameter: Tissue Value: Aerial

SEQ ID NO: 20128 - protein, 437 aa, Zea mays subsp. mays; identical to SEQ ID NO: 17628
  peptide (1)..(437): Ceres Seq. ID no. 13498189
  misc_feature (167)..(213): Pfam Name: Kelch motif Pfam Description: Kelch motif
  misc_feature (167)..(213): Pfam Name: Kelch motif Pfam Description: Kelch motif
  misc_feature (73)..(344): Homolog of NCBI NO: 15223520 NR Description: Kelch repeat containing F-box protein family
  misc_feature (64)..(403): Homolog of NCBI NO: 18397351 NR Description: Kelch repeat containing F-box protein family
  misc_feature (65)..(371): Homolog of NCBI NO: 15220452 NR Description: Kelch repeat containing F-box protein family
  misc_feature (65)..(371): Homolog of NCBI NO: 7487225 NR Description: hypothetical protein T1F15.5 - Arabidopsis
  misc_feature (73)..(387): Homolog of NCBI NO: 26453288 NR Description: putative SKP1 interacting partner 4 SKIP4
  misc_feature (73)..(344): Homolog of NCBI NO: 15223520 NR Description: Kelch repeat containing F-box protein family
  misc_feature (65)..(371): Homolog of NCBI NO: 15220452 NR Description: Kelch repeat containing F-box protein family
  misc_feature (73)..(387): Homolog of NCBI NO: 26453288 NR Description: putative SKP1 interacting partner 4 SKIP4
  misc_feature (1)..(437): Homolog of NCBI NO: 37534254 NR Description: unknown protein [Oryza sativa (japonica
  misc_feature (22)..(437): Homolog of NCBI NO: 19071626 NR Description: putative Kelch motif containing protein
  misc_feature (1)..(436): Homolog of NCBI NO: 18405298 NR Description: Kelch repeat containing F-box protein family
  misc_feature (1)..(403): Homolog of NCBI NO: 25405811 NR Description: unknown protein, 58496-60308 [imported] -
  misc_feature (73)..(387): Homolog of NCBI NO: 18411974 NR Description: SKP1 interacting partner 4 (SKIP4), putative
  misc_feature (65)..(371): Homolog of NCBI NO: 7487225 NR Description: hypothetical protein T1F15.5 - Arabidopsis
  misc_feature (64)..(403): Homolog of NCBI NO: 18397351 NR Description: Kelch repeat containing F-box protein family
  misc_feature (73)..(387): Homolog of NCBI NO: 18411974 NR Description: SKP1 interacting partner 4 (SKIP4), putative
  misc_feature (1)..(403): Homolog of NCBI NO: 25405811 NR Description: unknown protein, 58496-60308 [imported] -
  misc_feature (1)..(436): Homolog of NCBI NO: 18405298 NR Description: Kelch repeat containing F-box protein family
  misc_feature (22)..(437): Homolog of NCBI NO: 19071626 NR Description: putative Kelch motif containing protein
  misc_feature (1)..(437): Homolog of NCBI NO: 37534254 NR Description: unknown protein [Oryza sativa (japonica

SEQ ID NO: 20129 - protein, 388 aa, Zea mays subsp. mays; identical to SEQ ID NO: 17629
  peptide (1)..(388): Ceres Seq. ID no. 13498190
  misc_feature (118)..(164): Pfam Name: Kelch motif Pfam Description: Kelch motif
  misc_feature (118)..(164): Pfam Name: Kelch motif Pfam Description: Kelch motif
  misc_feature (24)..(295): Homolog of NCBI NO: 15223520 NR Description: Kelch repeat containing F-box protein family
  misc_feature (15)..(354): Homolog of NCBI NO: 18397351 NR Description: Kelch repeat containing F-box protein family
  misc_feature (16)..(322): Homolog of NCBI NO: 15220452 NR Description: Kelch repeat containing F-box protein family
  misc_feature (16)..(322): Homolog of NCBI NO: 7487225 NR Description: hypothetical protein T1F15.5 - Arabidopsis
  misc_feature (24)..(338): Homolog of NCBI NO: 26453288 NR Description: putative SKP1 interacting partner 4 SKIP4
  misc_feature (24)..(295): Homolog of NCBI NO: 15223520 NR Description: Kelch repeat containing F-box protein family
  misc_feature (16)..(322): Homolog of NCBI NO: 15220452 NR Description: Kelch repeat containing F-box protein family
  misc_feature (24)..(338): Homolog of NCBI NO: 26453288 NR Description: putative SKP1 interacting partner 4 SKIP4
  misc_feature (1)..(388): Homolog of NCBI NO: 37534254 NR Description: unknown protein [Oryza sativa (japonica
  misc_feature (1)..(388): Homolog of NCBI NO: 19071626 NR Description: putative Kelch motif containing protein
  misc_feature (1)..(387): Homolog of NCBI NO: 18405298 NR Description: Kelch repeat containing F-box protein family
  misc_feature (1)..(354): Homolog of NCBI NO: 25405811 NR Description: unknown protein, 58496-60308 [imported] -
  misc_feature (24)..(338): Homolog of NCBI NO: 18411974 NR Description: SKP1 interacting partner 4 (SKIP4), putative
  misc_feature (16)..(322): Homolog of NCBI NO: 7487225 NR Description: hypothetical protein T1F15.5 - Arabidopsis
  misc_feature (15)..(354): Homolog of NCBI NO: 18397351 NR Description: Kelch repeat containing F-box protein family
  misc_feature (24)..(338): Homolog of NCBI NO: 18411974 NR Description: SKP1 interacting partner 4 (SKIP4), putative
  misc_feature (1)..(354): Homolog of NCBI NO: 25405811 NR Description: unknown protein, 58496-60308 [imported] -
  misc_feature (1)..(387): Homolog of NCBI NO: 18405298 NR Description: Kelch repeat containing F-box protein family
  misc_feature (1)..(388): Homolog of NCBI NO: 19071626 NR Description: putative Kelch motif containing protein
  misc_feature (1)..(388): Homolog of NCBI NO: 37534254 NR Description: unknown protein [Oryza sativa (japonica

SEQ ID NO: 20130 - protein, 386 aa, Zea mays subsp. mays; identical to SEQ ID NO: 17630
  peptide (1)..(386): Ceres Seq. ID no. 13498191
  misc_feature (116)..(162): Pfam Name: Kelch motif Pfam Description: Kelch motif
  misc_feature (116)..(162): Pfam Name: Kelch motif Pfam Description: Kelch motif
  misc_feature (22)..(293): Homolog of NCBI NO: 15223520 NR Description: Kelch repeat containing F-box protein family
  misc_feature (13)..(352): Homolog of NCBI NO: 18397351 NR Description: Kelch repeat containing F-box protein family
  misc_feature (14)..(320): Homolog of NCBI NO: 15220452 NR Description: Kelch repeat containing F-box protein family
  misc_feature (14)..(320): Homolog of NCBI NO: 7487225 NR Description: hypothetical protein T1F15.5 - Arabidopsis
  misc_feature (22)..(336): Homolog of NCBI NO: 26453288 NR Description: putative SKP1 interacting partner 4 SKIP4
  misc_feature (22)..(293): Homolog of NCBI NO: 15223520 NR Description: Kelch repeat containing F-box protein family
  misc_feature (14)..(320): Homolog of NCBI NO: 15220452 NR Description: Kelch repeat containing F-box protein family
  misc_feature (22)..(336): Homolog of NCBI NO: 26453288 NR Description: putative SKP1 interacting partner 4 SKIP4
  misc_feature (1)..(386): Homolog of NCBI NO: 37534254 NR Description: unknown protein [Oryza sativa (japonica
  misc_feature (1)..(386): Homolog of NCBI NO: 19071626 NR Description: putative Kelch motif containing protein
  misc_feature (1)..(385): Homolog of NCBI NO: 18405298 NR Description: Kelch repeat containing F-box protein family
  misc_feature (1)..(352): Homolog of NCBI NO: 25405811 NR Description: unknown protein, 58496-60308 [imported] -
  misc_feature (22)..(336): Homolog of NCBI NO: 18411974 NR Description: SKP1 interacting partner 4 (SKIP4), putative
  misc_feature (14)..(320): Homolog of NCBI NO: 7487225 NR Description: hypothetical protein T1F15.5 - Arabidopsis
  misc_feature (13)..(352): Homolog of NCBI NO: 18397351 NR Description: Kelch repeat containing F-box protein family
  misc_feature (22)..(336): Homolog of NCBI NO: 18411974 NR Description: SKP1 interacting partner 4 (SKIP4), putative
  misc_feature (1)..(352): Homolog of NCBI NO: 25405811 NR Description: unknown protein, 58496-60308 [imported] -
  misc_feature (1)..(385): Homolog of NCBI NO: 18405298 NR Description: Kelch repeat containing F-box protein family
  misc_feature (1)..(386): Homolog of NCBI NO: 19071626 NR Description: putative Kelch motif containing protein
  misc_feature (1)..(386): Homolog of NCBI NO: 37534254 NR Description: unknown protein [Oryza sativa (japonica

SEQ ID NO: 20131 - DNA, 613 bp, Zea mays subsp. mays
  misc_feature (1)..(613): Ceres Seq. ID no. 12637951
  misc_feature: MA Experiment ID: 20000534 Result: Up-regulated in Transcription
  misc_feature: MA Experiment 20000534 PARAMETER Experiment Name: Zm_Hybrid_Pollen_P Parameter: Age (day) Value: 8
  misc_feature: MA Experiment 20000534 PARAMETER Experiment Name: Zm_Hybrid_Pollen_P Parameter: Organism Value: Zea mays
  misc_feature: MA Experiment 20000534 PARAMETER Experiment Name: Zm_Hybrid_Pollen_P Parameter: Plant Line Value: 35A19
  misc_feature: MA Experiment 20000534 PARAMETER Experiment Name: Zm_Hybrid_Pollen_P Parameter: Tissue Value: Pollen vs. Aerial
atccattccccacagtcattggagtcttctcttcggcctcccgctaaccgccatccgatccaccagaccaccacaccgagccccgagcccactaactcccaatccatcgcatcgccatccctgctgccatggctgtgcctccgcggtgggcgaacctcaacatcgacctggtgacggagatcatgaaccgcgtcccgtgcgcaatcgaccgcacgcggatggccgccgtctgtcaggcgtggctcgcggcggtcgcgcgggcagagcgtctgacatttcagctcccgtcgctccttttcccgcccgcggacgcgaatgacgtctactgctacctcagcggttgccgcgaacacaacatgttggccgggccccgctacttcggatcgtacgacgacggctggttcttcgtcgcctacggccacacttgcgggcatcggctgctcaacatccgcaccggagattcccacgcgctacccgacatcctcgtggatcacgtcgctcacgaaatacacagcatggtcatcctcgccgccgccatctcgtgcccgcctgagttcgcgccatgcgccgcgggcatcgtcagctaccagccggagctcgacgcgccgcgccg

SEQ ID NO: 20132 - protein, 161 aa, Zea mays subsp. mays
  peptide (1)..(161): Ceres Seq. ID no. 13624451
  misc_feature (1)..(152): Homolog of NCBI NO: 34911048 NR Description: P0007F06.19 [Oryza sativa (japonica
  misc_feature (1)..(91): Homolog of NCBI NO: 34909984 NR Description: P0490D09.16 [Oryza sativa (japonica
  misc_feature (1)..(116): Homolog of NCBI NO: 34909988 NR Description: P0490D09.18 [Oryza sativa (japonica
  misc_feature (1)..(95): Homolog of NCBI NO: 34909978 NR Description: P0490D09.13 [Oryza sativa (japonica
  misc_feature (1)..(127): Homolog of NCBI NO: 34909986 NR Description: P0490D09.17 [Oryza sativa (japonica
  misc_feature (6)..(159): Homolog of NCBI NO: 34894448 NR Description: OSJNBa0025P13.19 [Oryza sativa (japonica
MAVPPRWANLNIDLVTEIMNRVPCAIDRTRMAAVCQAWLAAVARAERLTFQLPSLLFPPADANDVYCYLSGCREHNMLAGPRYFGSYDDGWFFVAYGHTCGHRLLNIRTGDSHALPDILVDHVAHEIHSMVILAAAISCPPEFAPCAAGIVSYQPELDAPR

SEQ ID NO: 20133 - protein, 143 aa, Zea mays subsp. mays
  peptide (1)..(143): Ceres Seq. ID no. 13624452
  misc_feature (1)..(109): Homolog of NCBI NO: 34909986 NR Description: P0490D09.17 [Oryza sativa (japonica
  misc_feature (1)..(141): Homolog of NCBI NO: 34894448 NR Description: OSJNBa0025P13.19 [Oryza sativa (japonica
  misc_feature (1)..(98): Homolog of NCBI NO: 34909988 NR Description: P0490D09.18 [Oryza sativa (japonica
  misc_feature (1)..(77): Homolog of NCBI NO: 34909978 NR Description: P0490D09.13 [Oryza sativa (japonica
  misc_feature (1)..(134): Homolog of NCBI NO: 34911048 NR Description: P0007F06.19 [Oryza sativa (japonica
  misc_feature (1)..(73): Homolog of NCBI NO: 34909984 NR Description: P0490D09.16 [Oryza sativa (japonica
MNRVPCAIDRTRMAAVCQAWLAAVARAERLTFQLPSLLFPPADANDVYCYLSGCREHNMLAGPRYFGSYDDGWFFVAYGHTCGHRLLNIRTGDSHALPDILVDHVAHEIHSMVILAAAISCPPEFAPCAAGIVSYQPELDAPR

SEQ ID NO: 20134 - protein, 131 aa, Zea mays subsp. mays
  peptide (1)..(131): Ceres Seq. ID no. 13624453
  misc_feature (1)..(122): Homolog of NCBI NO: 34911048 NR Description: P0007F06.19 [Oryza sativa (japonica
  misc_feature (1)..(61): Homolog of NCBI NO: 34909984 NR Description: P0490D09.16 [Oryza sativa (japonica
  misc_feature (1)..(86): Homolog of NCBI NO: 34909988 NR Description: P0490D09.18 [Oryza sativa (japonica
  misc_feature (1)..(65): Homolog of NCBI NO: 34909978 NR Description: P0490D09.13 [Oryza sativa (japonica
  misc_feature (1)..(97): Homolog of NCBI NO: 34909986 NR Description: P0490D09.17 [Oryza sativa (japonica
  misc_feature (1)..(129): Homolog of NCBI NO: 34894448 NR Description: OSJNBa0025P13.19 [Oryza sativa (japonica
MAAVCQAWLAAVARAERLTFQLPSLLFPPADANDVYCYLSGCREHNMLAGPRYFGSYDDGWFFVAYGHTCGHRLLNIRTGDSHALPDILVDHVAHEIHSMVILAAAISCPPEFAPCAAGIVSYQPELDAPR

SEQ ID NO: 20135 - DNA, 1499 bp, Zea mays subsp. mays
  misc_feature (1)..(1499): Ceres Seq. ID no. 13622663
  misc_feature: MA Experiment ID: 108504 Result: Down-regulated in Transcription
  misc_feature: MA Experiment 108504 PARAMETER Experiment Name: Zm_Drought_P Parameter: Age (day) Value: 8
  misc_feature: MA Experiment 108504 PARAMETER Experiment Name: Zm_Drought_P Parameter: Organism Value: Zea mays
  misc_feature: MA Experiment 108504 PARAMETER Experiment Name: Zm_Drought_P Parameter: Plant Line Value: 35A19
  misc_feature: MA Experiment 108504 PARAMETER Experiment Name: Zm_Drought_P Parameter: Timepoint (hr) Value: 12
  misc_feature: MA Experiment 108504 PARAMETER Experiment Name: Zm_Drought_P Parameter: Tissue Value: Aerial
  misc_feature: MA Experiment 108504 PARAMETER Experiment Name: Zm_Drought_P Parameter: Treatment Value: Drought vs. No Drought
  misc_feature: MA Experiment ID: 108515 Result: Down-regulated in Transcription
  misc_feature: MA Experiment 108515 PARAMETER Experiment Name: Zm_2mM_SA_P Parameter: Age (day) Value: 8
  misc_feature: MA Experiment 108515 PARAMETER Experiment Name: Zm_2mM_SA_P Parameter: Organism Value: Zea mays
  misc_feature: MA Experiment 108515 PARAMETER Experiment Name: Zm_2mM_SA_P Parameter: Plant Line Value: 35A19
  misc_feature: MA Experiment 108515 PARAMETER Experiment Name: Zm_2mM_SA_P Parameter: Timepoint (hr) Value: 12
  misc_feature: MA Experiment 108515 PARAMETER Experiment Name: Zm_2mM_SA_P Parameter: Tissue Value: Aerial
  misc_feature: MA Experiment 108515 PARAMETER Experiment Name: Zm_2mM_SA_P Parameter: Treatment Value: 2mM SA vs. No Treatment
  misc_feature: MA Experiment ID: 108522 Result: Down-regulated in Transcription
  misc_feature: MA Experiment 108522 PARAMETER Experiment Name: Zm_42deg_Heat_P Parameter: Age (day) Value: 8
  misc_feature: MA Experiment 108522 PARAMETER Experiment Name: Zm_42deg_Heat_P Parameter: Organism Value: Zea mays
  misc_feature: MA Experiment 108522 PARAMETER Experiment Name: Zm_42deg_Heat_P Parameter: Plant Line Value: 35A19
  misc_feature: MA Experiment 108522 PARAMETER Experiment Name: Zm_42deg_Heat_P Parameter: Temperature (deg C) Value: 42 vs. 22
  misc_feature: MA Experiment 108522 PARAMETER Experiment Name: Zm_42deg_Heat_P Parameter: Timepoint (hr) Value: 1
  misc_feature: MA Experiment 108522 PARAMETER Experiment Name: Zm_42deg_Heat_P Parameter: Tissue Value: Aerial
  misc_feature: MA Experiment ID: 108527 Result: Down-regulated in Transcription
  misc_feature: MA Experiment 108527 PARAMETER Experiment Name: Zm_5mM_NO_P Parameter: Age (day) Value: 8
  misc_feature: MA Experiment 108527 PARAMETER Experiment Name: Zm_5mM_NO_P Parameter: Organism Value: Zea mays
  misc_feature: MA Experiment 108527 PARAMETER Experiment Name: Zm_5mM_NO_P Parameter: Plant Line Value: 35A19
  misc_feature: MA Experiment 108527 PARAMETER Experiment Name: Zm_5mM_NO_P Parameter: Timepoint (hr) Value: 6
  misc_feature: MA Experiment 108527 PARAMETER Experiment Name: Zm_5mM_NO_P Parameter: Tissue Value: Aerial
  misc_feature: MA Experiment 108527 PARAMETER Experiment Name: Zm_5mM_NO_P Parameter: Treatment Value: 5mM NO vs. No Treatment
  misc_feature: MA Experiment ID: 108528 Result: Up-regulated in Transcription
  misc_feature: MA Experiment 108528 PARAMETER Experiment Name: Zm_Imbibed_Seeds_P Parameter: Age (day) Value: 5 vs. 2
  misc_feature: MA Experiment 108528 PARAMETER Experiment Name: Zm_Imbibed_Seeds_P Parameter: Organism Value: Zea mays
  misc_feature: MA Experiment 108528 PARAMETER Experiment Name: Zm_Imbibed_Seeds_P Parameter: Plant Line Value: 35A19
  misc_feature: MA Experiment 108528 PARAMETER Experiment Name: Zm_Imbibed_Seeds_P Parameter: Tissue Value: Aerial vs. Embryo
  misc_feature: MA Experiment ID: 108529 Result: Down-regulated in Transcription
  misc_feature: MA Experiment 108529 PARAMETER Experiment Name: Zm_Imbibed_Seeds_P Parameter: Age (day) Value: 5 vs. 2
  misc_feature: MA Experiment 108529 PARAMETER Experiment Name: Zm_Imbibed_Seeds_P Parameter: Organism Value: Zea mays
  misc_feature: MA Experiment 108529 PARAMETER Experiment Name: Zm_Imbibed_Seeds_P Parameter: Plant Line Value: 35A19
  misc_feature: MA Experiment 108529 PARAMETER Experiment Name: Zm_Imbibed_Seeds_P Parameter: Tissue Value: Roots vs. Embryo
  misc_feature: MA Experiment ID: 108530 Result: Up-regulated in Transcription
  misc_feature: MA Experiment 108530 PARAMETER Experiment Name: Zm_Imbibed_Seeds_P Parameter: Age (day) Value: 6 vs. 2
  misc_feature: MA Experiment 108530 PARAMETER Experiment Name: Zm_Imbibed_Seeds_P Parameter: Organism Value: Zea mays
  misc_feature: MA Experiment 108530 PARAMETER Experiment Name: Zm_Imbibed_Seeds_P Parameter: Plant Line Value: 35A19
  misc_feature: MA Experiment 108530 PARAMETER Experiment Name: Zm_Imbibed_Seeds_P Parameter: Tissue Value: Aerial vs. Embryo
  misc_feature: MA Experiment ID: 108536 Result: Down-regulated in Transcription
  misc_feature: MA Experiment 108536 PARAMETER Experiment Name: Zm_Meristem_P Parameter: Age (day) Value: 8
  misc_feature: MA Experiment 108536 PARAMETER Experiment Name: Zm_Meristem_P Parameter: Organism Value: Zea mays
  misc_feature: MA Experiment 108536 PARAMETER Experiment Name: Zm_Meristem_P Parameter: Plant Line Value: 35A19
  misc_feature: MA Experiment 108536 PARAMETER Experiment Name: Zm_Meristem_P Parameter: Tissue Value: Shoot Meristem vs. Above Shoot Meristem
  misc_feature: MA Experiment ID: 108545 Result: Up-regulated in Transcription
  misc_feature: MA Experiment 108545 PARAMETER Experiment Name: Zm_Imbibed_Seeds_P Parameter: Age (day) Value: 3 vs. 2
  misc_feature: MA Experiment 108545 PARAMETER Experiment Name: Zm_Imbibed_Seeds_P Parameter: Organism Value: Zea mays
  misc_feature: MA Experiment 108545 PARAMETER Experiment Name: Zm_Imbibed_Seeds_P Parameter: Plant Line Value: 35A19
  misc_feature: MA Experiment 108545 PARAMETER Experiment Name: Zm_Imbibed_Seeds_P Parameter: Tissue Value: Aerial vs. Embryo
  misc_feature: MA Experiment ID: 108546 Result: Down-regulated in Transcription
  misc_feature: MA Experiment 108546 PARAMETER Experiment Name: Zm_Imbibed_Seeds_P Parameter: Age (day) Value: 3 vs. 2
  misc_feature: MA Experiment 108546 PARAMETER Experiment Name: Zm_Imbibed_Seeds_P Parameter: Organism Value: Zea mays
  misc_feature: MA Experiment 108546 PARAMETER Experiment Name: Zm_Imbibed_Seeds_P Parameter: Plant Line Value: 35A19
  misc_feature: MA Experiment 108546 PARAMETER Experiment Name: Zm_Imbibed_Seeds_P Parameter: Tissue Value: Roots vs. Embryo
  misc_feature: MA Experiment ID: 108547 Result: Up-regulated in Transcription
  misc_feature: MA Experiment 108547 PARAMETER Experiment Name: Zm_Imbibed_Seeds_P Parameter: Age (day) Value: 4 vs. 2
  misc_feature: MA Experiment 108547 PARAMETER Experiment Name: Zm_Imbibed_Seeds_P Parameter: Organism Value: Zea mays
  misc_feature: MA Experiment 108547 PARAMETER Experiment Name: Zm_Imbibed_Seeds_P Parameter: Plant Line Value: 35A19
  misc_feature: MA Experiment 108547 PARAMETER Experiment Name: Zm_Imbibed_Seeds_P Parameter: Tissue Value: Aerial vs. Embryo
  misc_feature: MA Experiment ID: 108559 Result: Down-regulated in Transcription
  misc_feature: MA Experiment 108559 PARAMETER Experiment Name: Zm_5mM_NO_P Parameter: Age (day) Value: 8
  misc_feature: MA Experiment 108559 PARAMETER Experiment Name: Zm_5mM_NO_P Parameter: Organism Value: Zea mays
  misc_feature: MA Experiment 108559 PARAMETER Experiment Name: Zm_5mM_NO_P Parameter: Plant Line Value: 35A19
  misc_feature: MA Experiment 108559 PARAMETER Experiment Name: Zm_5mM_NO_P Parameter: Timepoint (hr) Value: 12
  misc_feature: MA Experiment 108559 PARAMETER Experiment Name: Zm_5mM_NO_P Parameter: Tissue Value: Aerial
  misc_feature: MA Experiment 108559 PARAMETER Experiment Name: Zm_5mM_NO_P Parameter: Treatment Value: 5mM NO vs. No Treatment
  misc_feature: MA Experiment ID: 108597 Result: Down-regulated in Transcription
  misc_feature: MA Experiment 108597 PARAMETER Experiment Name: Zm_100uM_ABA_P Parameter: Age (day) Value: 9
  misc_feature: MA Experiment 108597 PARAMETER Experiment Name: Zm_100uM_ABA_P Parameter: Organism Value: Zea mays
  misc_feature: MA Experiment 108597 PARAMETER Experiment Name: Zm_100uM_ABA_P Parameter: Plant Line Value: 35A19
  misc_feature: MA Experiment 108597 PARAMETER Experiment Name: Zm_100uM_ABA_P Parameter: Timepoint (hr) Value: 24
  misc_feature: MA Experiment 108597 PARAMETER Experiment Name: Zm_100uM_ABA_P Parameter: Tissue Value: Aerial
  misc_feature: MA Experiment 108597 PARAMETER Experiment Name: Zm_100uM_ABA_P Parameter: Treatment Value: 100uM ABA vs. No Treatment
  misc_feature: MA Experiment ID: 108687 Result: Down-regulated in Transcription
  misc_feature: MA Experiment 108687 PARAMETER Experiment Name: Zm_Embryos-Flowers__P Parameter: Tissue Value: Embryo vs. Aerial+
  misc_feature: MA Experiment ID: 20000535 Result: Down-regulated in Transcription
  misc_feature: MA Experiment 20000535 PARAMETER Experiment Name: Zm_Hybrid_Seed_Dev_P Parameter: DAP Value: 30 vs. 12
  misc_feature: MA Experiment 20000535 PARAMETER Experiment Name: Zm_Hybrid_Seed_Dev_P Parameter: Organism Value: Zea mays
  misc_feature: MA Experiment 20000535 PARAMETER Experiment Name: Zm_Hybrid_Seed_Dev_P Parameter: Plant Line Value: 35A19
  misc_feature: MA Experiment 20000535 PARAMETER Experiment Name: Zm_Hybrid_Seed_Dev_P Parameter: Tissue Value: Embryo vs. Unfert Floret
  misc_feature: MA Experiment ID: 20000626 Result: Down-regulated in Transcription
  misc_feature: MA Experiment 20000626 PARAMETER Experiment Name: Zm_Herbicide-Treatments_P Parameter: Timepoint (hr) Value: 12
  misc_feature: MA Experiment 20000626 PARAMETER Experiment Name: Zm_Herbicide-Treatments_P Parameter: Tissue Value: Aerial
  misc_feature: MA Experiment 20000626 PARAMETER Experiment Name: Zm_Herbicide-Treatments_P Parameter: Treatment Value: Roundup vs. No Treatment
gcgatctcagctcccaaccaaccttcatcaatccagtaccatcggaagcgtacatgcatacataccatacgtccataccatacggccggaccacgcccagcaaccaatcaataatactcctagtccgccaccagtcgctccgcctcggcgccatcgcacggaaagcttgctgttgctggcgacctcgcggcggggcgccggagcagccatgcctataaaatccgggcgagagcacccacccattcgtaccctatcagccgcctcccctgcctccggtcctctcccgcctctctctctctcttgcacacacacgacgtcgtacgcggcagctagcagcacgcacgatcgatcgccacagcgtacgtactagcacagaggacgacgaccgacgccatggcggcctccttccgcgcggcggcgtggcagcggcggcggcgacggcgctggtgatggtggcggcggtgctggcggtgtcgtgggccggcgtggcccgcgcggacttcgcccaggaccgcgccatgtgcgcggaccggctgatggggctggcgacgtgcctgacgttcgtgcaggacaaggcgacggcgcgcgcgccgacgcccgactgctgcgcggggctcaagcaggtggtggccgccagcaagctgtgcatgtgcgtgctggtcaaggaccgcgacgagccggcgctggggttcaagatcaacgtcacccgcgccatggacctgccctcgctctgcagcaaccccgccaccttctccgactgccccaagatcctgggcatgtcgcccgacgcccccgaggcggagatcttcaaggagtacgcgaagaagcacgagagcaacaacggcaccaccattcctgccgctgcaaccggcgccgccgcggcgaccgggaagagcacgagcgcggcgccgacggcggacggcgccgggaggcagcccggcacggtcttcttctacgtcgtgtcggcgctgctcgtctccgtcgcggtcctgctgtgctgatggcttaacggccggccgcggcagcgcatgcattcatggccggccggccggcagggagatggaggtgctactgcacgctgcacgactggaaggaagcccggagacacaattcaagtctttgagatgagcaaactaaaggacacgagtactcttttttttttctctttcctgtagcctttttgtgtgtgtgtggcgtgttgtggggagtttgtgagacgtcggcttgtgctagtgctgacggtgcaccagcgacgcagctctgtacttcccagctgttgggctgtggccttccagcctggggattttaatgtggtggcccgggactgccgacctgtctgtctgaatctgatgattctgacccattatgttggcacttggcacattgtatgtttggtttctttggttttagttctcgtcttcttgcttttttttatttaaagtaatttctgtaagcaacatgatgcatgtaactagaaggacctttgtttgtatacgctc

SEQ ID NO: 20136 - protein, 183 aa, Zea mays subsp. mays
  peptide (1)..(183): Ceres Seq. ID no. 13622664
  misc_feature (25)..(104): Pfam Name: Protease inhibitor/seed storage/LTP family Pfam Description: Protease inhibitor/seed storage/LTP family
  misc_feature (1)..(156): Homolog of NCBI NO: 15219578 NR Description: protease inhibitor/seed storage/lipid transfer
  misc_feature (1)..(182): Homolog of NCBI NO: 15217777 NR Description: lipid transfer protein - related [Arabidopsis
  misc_feature (1)..(182): Homolog of NCBI NO: 21553541 NR Description: lipid transfer protein, putative [Arabidopsis
  misc_feature (12)..(178): Homolog of NCBI NO: 21537387 NR Description: unknown [Arabidopsis thaliana]
  misc_feature (1)..(178): Homolog of NCBI NO: 18405294 NR Description: protease inhibitor/seed storage/lipid transfer
  misc_feature (1)..(148): Homolog of NCBI NO: 21555220 NR Description: unknown [Arabidopsis thaliana]
  misc_feature (1)..(148): Homolog of NCBI NO: 15231070 NR Description: protease inhibitor/seed storage/lipid transfer
  misc_feature (1)..(161): Homolog of NCBI NO: 15224863 NR Description: lipid transfer protein - related [Arabidopsis
  misc_feature (1)..(165): Homolog of NCBI NO: 15224862 NR Description: lipid transfer protein family [Arabidopsis
  misc_feature (1)..(182): Homolog of NCBI NO: 34394084 NR Description: lipid transfer protein-like
MVAAVLAVSWAGVARADFAQDRAMCADRLMGLATCLTFVQDKATARAPTPDCCAGLKQVVAASKLCMCVLVKDRDEPALGFKINVTRAMDLPSLCSNPATFSDCPKILGMSPDAPEAEIFKEYAKKHESNNGTTIPAAATGAAAATGKSTSAAPTADGAGRQPGTVFFYVVSALLVSVAVLLC

SEQ ID NO: 20137 - protein, 160 aa, Zea mays subsp. mays
  peptide (1)..(160): Ceres Seq. ID no. 13622665
  misc_feature (2)..(81): Pfam Name: Protease inhibitor/seed storage/LTP family Pfam Description: Protease inhibitor/seed storage/LTP family
  misc_feature (1)..(133): Homolog of NCBI NO: 15219578 NR Description: protease inhibitor/seed storage/lipid transfer
  misc_feature (1)..(159): Homolog of NCBI NO: 15217777 NR Description: lipid transfer protein - related [Arabidopsis
  misc_feature (1)..(159): Homolog of NCBI NO: 21553541 NR Description: lipid transfer protein, putative [Arabidopsis
  misc_feature (1)..(155): Homolog of NCBI NO: 21537387 NR Description: unknown [Arabidopsis thaliana]
  misc_feature (1)..(155): Homolog of NCBI NO: 18405294 NR Description: protease inhibitor/seed storage/lipid transfer
  misc_feature (1)..(125): Homolog of NCBI NO: 21555220 NR Description: unknown [Arabidopsis thaliana]
  misc_feature (1)..(125): Homolog of NCBI NO: 15231070 NR Description: protease inhibitor/seed storage/lipid transfer
  misc_feature (1)..(138): Homolog of NCBI NO: 15224863 NR Description: lipid transfer protein - related [Arabidopsis
  misc_feature (1)..(142): Homolog of NCBI NO: 15224862 NR Description: lipid transfer protein family [Arabidopsis
  misc_feature (1)..(159): Homolog of NCBI NO: 34394084 NR Description: lipid transfer protein-like
MCADRLMGLATCLTFVQDKATARAPTPDCCAGLKQVVAASKLCMCVLVKDRDEPALGFKINVTRAMDLPSLCSNPATFSDCPKILGMSPDAPEAEIFKEYAKKHESNNGTTIPAAATGAAAATGKSTSAAPTADGAGRQPGTVFFYVVSALLVSVAVLLC

SEQ ID NO: 20138 - protein, 154 aa, Zea mays subsp. mays
  peptide (1)..(154): Ceres Seq. ID no. 13622666
  misc_feature (1)..(75): Pfam Name: Protease inhibitor/seed storage/LTP family Pfam Description: Protease inhibitor/seed storage/LTP family
  misc_feature (1)..(127): Homolog of NCBI NO: 15219578 NR Description: protease inhibitor/seed storage/lipid transfer
  misc_feature (1)..(153): Homolog of NCBI NO: 15217777 NR Description: lipid transfer protein - related [Arabidopsis
  misc_feature (1)..(153): Homolog of NCBI NO: 21553541 NR Description: lipid transfer protein, putative [Arabidopsis
  misc_feature (1)..(149): Homolog of NCBI NO: 21537387 NR Description: unknown [Arabidopsis thaliana]
  misc_feature (1)..(149): Homolog of NCBI NO: 18405294 NR Description: protease inhibitor/seed storage/lipid transfer
  misc_feature (1)..(119): Homolog of NCBI NO: 21555220 NR Description: unknown [Arabidopsis thaliana]
  misc_feature (1)..(119): Homolog of NCBI NO: 15231070 NR Description: protease inhibitor/seed storage/lipid transfer
  misc_feature (1)..(132): Homolog of NCBI NO: 15224863 NR Description: lipid transfer protein - related [Arabidopsis
  misc_feature (1)..(136): Homolog of NCBI NO: 15224862 NR Description: lipid transfer protein family [Arabidopsis
  misc_feature (1)..(153): Homolog of NCBI NO: 34394084 NR Description: lipid transfer protein-like
MGLATCLTFVQDKATARAPTPDCCAGLKQVVAASKLCMCVLVKDRDEPALGFKINVTRAMDLPSLCSNPATFSDCPKILGMSPDAPEAEIFKEYAKKHESNNGTTIPAAATGAAAATGKSTSAAPTADGAGRQPGTVFFYVVSALLVSVAVLLC

SEQ ID NO: 20139 - DNA, 1463 bp, Zea mays subsp. mays
  misc_feature (1)..(1463): Ceres Seq. ID no. 12454872
  misc_feature: MA Experiment ID: 108543 Result: Down-regulated in Transcription
aggtgcagtcagtcagtcaggcagagaaacgtgcggaggtggaagccacaacgggagcgcctaccctcgcagtccgcccctcgacctcggagccgcagcccgcgaggagcgttcacaatcacaccggccaccgcggaccctagcgctttagccttatccgtccgagcgcgcgcccgatgcagacggaggcgcgcgtgggcgtcgtcgtcgacggcggcgccgccgtgggccggtgccaggagcagcgccacatcggcacggcggcgcacctcgccgccggaggcttcgcgggcgccgtcagcaagacgtgcaccgcccccctcgcgcggctcaccatcctcttccaggtagctggtatgcattcagatgttgcgactctaaggaagtgtagcatatggcatgaggcttcacgaatttttcgagaagaagggattgaagccttttggaaaggaaatctagtgacaattgtacatcgcttgccttattctgccatcagcttctattcgtatgagcgctacaaaaatcttctccaaacggttcctggcctggatagagactcaaataatgttggtgttgtacgtttgcttggtggtggtttggcgggaataactgctgcatctttaacttacccgttggatgttgttcgtactcgcttggcgacgcagaaaaccactaggtattacaagggcatcttccatgcggtgtccacaatttgtagagacgagggtgtcaaaggattgtataaaggccttggggccacgttattgggagttggacctagtatagcaatcagcttttctgtctatgaatcactaaggtcttattggcaaatggaaaggccccatgattcaactgcagttgttagcttgttttctgggagtctatctggtattgcatcatctacagccacatttccccttgatcttgtaaagcgacggatgcaacttcaaggagcagctgggacagcgtccgtccagaaatcaaccatatctggaactgtccgtgatatcttgcagagagaaggtctccgtggcttctacagaggtatcgcccctgagtacctcaaggtcgttcctagtgttggaatcgccttcatgacatacgagacactgaagggcttgctctccagcattgacatagacgatgagagctgaggtttcccattatacgaagaggttaaacttcaccggattttttggccataggttaccatcagaatgtatgtaagtgcatcagagtggttacacgaacggcattgtggcagttttgtagttgacggtaggtcaaagcttacctgaggtgtacaactagtcttgtgttgtaccataggctaaacagagcaaataagcgcttcatgatggagtcttcatcttgtgttcctttgtacattatgctccatcaaggaagagcaaaaaaaaaaaaaaaagaagaagaagaaggtgaaagtcaatgattttataggt

SEQ ID NO: 20140 - protein, 325 aa, Zea mays subsp. mays
  peptide (1)..(325): Ceres Seq. ID no. 12454873
  misc_feature (28)..(320): Homolog of NCBI NO: 40739120 NR Description: hypothetical protein AN5801.2 [Aspergillus
  misc_feature (32)..(316): Homolog of NCBI NO: 33598954 NR Description: calcium-binding transporter [Homo sapiens]
  misc_feature (1)..(319): Homolog of NCBI NO: 25295875 NR Description: probable mitochondrial carrier protein
  misc_feature (1)..(319): Homolog of NCBI NO: 30687297 NR Description: mitochondrial carrier protein family [Arabidopsis
  misc_feature (21)..(319): Homolog of NCBI NO: 11277067 NR Description: hypothetical protein F5K20.240 - Arabidopsis
  misc_feature (21)..(319): Homolog of NCBI NO: 22331775 NR Description: mitochondrial carrier protein family
  misc_feature (1)..(313): Homolog of NCBI NO: 21554682 NR Description: Ca-dependent solute carrier-like protein
  misc_feature (1)..(313): Homolog of NCBI NO: 15228163 NR Description: mitochondrial carrier protein family
  misc_feature (23)..(323): Homolog of NCBI NO: 34902034 NR Description: putative peroxisomal Ca-dependent solute carrier
  misc_feature (1)..(325): Homolog of NCBI NO: 34895726 NR Description: putative peroxisomal Ca-dependent solute carrier
MQTEARVGVVVDGGAAVGRCQEQRHIGTAAHLAAGGFAGAVSKTCTAPLARLTILFQVAGMHSDVATLRKCSIWHEASRIFREEGIEAFWKGNLVTIVHRLPYSAISFYSYERYKNLLQTVPGLDRDSNNVGVVRLLGGGLAGITAASLTYPLDVVRTRLATQKTTRYYKGIFHAVSTICRDEGVKGLYKGLGATLLGVGPSIAISFSVYESLRSYWQMERPHDSTAVVSLFSGSLSGIASSTATFPLDLVKRRMQLQGAAGTASVQKSTISGTVRDILQREGLRGFYRGIAPEYLKVVPSVGIAFMTYETLKGLLSSIDIDDES

SEQ ID NO: 20141 - protein, 265 aa, Zea mays subsp. mays
  peptide (1)..(265): Ceres Seq. ID no. 12454874
  misc_feature (1)..(260): Homolog of NCBI NO: 40739120 NR Description: hypothetical protein AN5801.2 [Aspergillus
  misc_feature (1)..(256): Homolog of NCBI NO: 33598954 NR Description: calcium-binding transporter [Homo sapiens]
  misc_feature (1)..(259): Homolog of NCBI NO: 25295875 NR Description: probable mitochondrial carrier protein
  misc_feature (1)..(259): Homolog of NCBI NO: 30687297 NR Description: mitochondrial carrier protein family [Arabidopsis
  misc_feature (1)..(259): Homolog of NCBI NO: 11277067 NR Description: hypothetical protein F5K20.240 - Arabidopsis
  misc_feature (1)..(259): Homolog of NCBI NO: 22331775 NR Description: mitochondrial carrier protein family
  misc_feature (1)..(253): Homolog of NCBI NO: 21554682 NR Description: Ca-dependent solute carrier-like protein
  misc_feature (1)..(253): Homolog of NCBI NO: 15228163 NR Description: mitochondrial carrier protein family
  misc_feature (1)..(263): Homolog of NCBI NO: 34902034 NR Description: putative peroxisomal Ca-dependent solute carrier
  misc_feature (1)..(265): Homolog of NCBI NO: 34895726 NR Description: putative peroxisomal Ca-dependent solute carrier
MHSDVATLRKCSIWHEASRIFREEGIEAFWKGNLVTIVHRLPYSAISFYSYERYKNLLQTVPGLDRDSNNVGVVRLLGGGLAGITAASLTYPLDVVRTRLATQKTTRYYKGIFHAVSTICRDEGVKGLYKGLGATLLGVGPSIAISFSVYESLRSYWQMERPHDSTAVVSLFSGSLSGIASSTATFPLDLVKRRMQLQGAAGTASVQKSTISGTVRDILQREGLRGFYRGIAPEYLKVVPSVGIAFMTYETLKGLLSSIDIDDES

SEQ ID NO: 20142 - DNA, 2116 bp, Zea mays subsp. mays; identical to SEQ ID NO: 18260
  misc_feature (1)..(2116): Ceres Seq. ID no. 13566658
  misc_feature: MA Experiment ID: 108504 Result: Down-regulated in Transcription
  misc_feature: MA Experiment 108504 PARAMETER Experiment Name: Zm_Drought_P Parameter: Age (day) Value: 8
  misc_feature: MA Experiment 108504 PARAMETER Experiment Name: Zm_Drought_P Parameter: Organism Value: Zea mays
  misc_feature: MA Experiment 108504 PARAMETER Experiment Name: Zm_Drought_P Parameter: Plant Line Value: 35A19
  misc_feature: MA Experiment 108504 PARAMETER Experiment Name: Zm_Drought_P Parameter: Timepoint (hr) Value: 12
  misc_feature: MA Experiment 108504 PARAMETER Experiment Name: Zm_Drought_P Parameter: Tissue Value: Aerial
  misc_feature: MA Experiment 108504 PARAMETER Experiment Name: Zm_Drought_P Parameter: Treatment Value: Drought vs. No Drought
  misc_feature: MA Experiment ID: 108535 Result: Up-regulated in Transcription
  misc_feature: MA Experiment 108535 PARAMETER Experiment Name: Zm_Meristem_P Parameter: Age (day) Value: 8
  misc_feature: MA Experiment 108535 PARAMETER Experiment Name: Zm_Meristem_P Parameter: Organism Value: Zea mays
  misc_feature: MA Experiment 108535 PARAMETER Experiment Name: Zm_Meristem_P Parameter: Plant Line Value: 35A19
  misc_feature: MA Experiment 108535 PARAMETER Experiment Name: Zm_Meristem_P Parameter: Tissue Value: Root Meristem vs. Above Root Meristem
  misc_feature: MA Experiment ID: 108543 Result: Down-regulated in Transcription
  misc_feature: MA Experiment ID: 108556 Result: Down-regulated in Transcription
  misc_feature: MA Experiment 108556 PARAMETER Experiment Name: Zm_Drought_P Parameter: Age (day) Value: 9
  misc_feature: MA Experiment 108556 PARAMETER Experiment Name: Zm_Drought_P Parameter: Organism Value: Zea mays
  misc_feature: MA Experiment 108556 PARAMETER Experiment Name: Zm_Drought_P Parameter: Plant Line Value: 35A19
  misc_feature: MA Experiment 108556 PARAMETER Experiment Name: Zm_Drought_P Parameter: Timepoint (hr) Value: 24
  misc_feature: MA Experiment 108556 PARAMETER Experiment Name: Zm_Drought_P Parameter: Tissue Value: Aerial
  misc_feature: MA Experiment 108556 PARAMETER Experiment Name: Zm_Drought_P Parameter: Treatment Value: Drought vs. No Drought
  misc_feature: MA Experiment ID: 108597 Result: Down-regulated in Transcription
  misc_feature: MA Experiment 108597 PARAMETER Experiment Name: Zm_100uM_ABA_P Parameter: Age (day) Value: 9
  misc_feature: MA Experiment 108597 PARAMETER Experiment Name: Zm_100uM_ABA_P Parameter: Organism Value: Zea mays
  misc_feature: MA Experiment 108597 PARAMETER Experiment Name: Zm_100uM_ABA_P Parameter: Plant Line Value: 35A19
  misc_feature: MA Experiment 108597 PARAMETER Experiment Name: Zm_100uM_ABA_P Parameter: Timepoint (hr) Value: 24
  misc_feature: MA Experiment 108597 PARAMETER Experiment Name: Zm_100uM_ABA_P Parameter: Tissue Value: Aerial
  misc_feature: MA Experiment 108597 PARAMETER Experiment Name: Zm_100uM_ABA_P Parameter: Treatment Value: 100uM ABA vs. No Treatment
  misc_feature: MA Experiment ID: 108689 Result: Down-regulated in Transcription
  misc_feature: MA Experiment 108689 PARAMETER Experiment Name: Zm_Drought_Roots_P Parameter: Age (day) Value: 9
  misc_feature: MA Experiment 108689 PARAMETER Experiment Name: Zm_Drought_Roots_P Parameter: Organism Value: Zea mays
  misc_feature: MA Experiment 108689 PARAMETER Experiment Name: Zm_Drought_Roots_P Parameter: Plant Line Value: 35A19
  misc_feature: MA Experiment 108689 PARAMETER Experiment Name: Zm_Drought_Roots_P Parameter: Timepoint (hr) Value: 24
  misc_feature: MA Experiment 108689 PARAMETER Experiment Name: Zm_Drought_Roots_P Parameter: Tissue Value: Roots
  misc_feature: MA Experiment 108689 PARAMETER Experiment Name: Zm_Drought_Roots_P Parameter: Treatment Value: Drought vs. No Drought
  misc_feature: MA Experiment ID: 20000477 Result: Down-regulated in Transcription
  misc_feature: MA Experiment 20000477 PARAMETER Experiment Name: Zm_5mM_SA_P Parameter: Age (day) Value: 10
  misc_feature: MA Experiment 20000477 PARAMETER Experiment Name: Zm_5mM_SA_P Parameter: Organism Value: Zea mays
  misc_feature: MA Experiment 20000477 PARAMETER Experiment Name: Zm_5mM_SA_P Parameter: Plant Line Value: 35A19
  misc_feature: MA Experiment 20000477 PARAMETER Experiment Name: Zm_5mM_SA_P Parameter: Timepoint (hr) Value: 48
  misc_feature: MA Experiment 20000477 PARAMETER Experiment Name: Zm_5mM_SA_P Parameter: Tissue Value: Aerial
  misc_feature: MA Experiment 20000477 PARAMETER Experiment Name: Zm_5mM_SA_P Parameter: Treatment Value: 5mM SA vs. No Treatment
  misc_feature: MA Experiment ID: 20000478 Result: Down-regulated in Transcription
  misc_feature: MA Experiment 20000478 PARAMETER Experiment Name: Zm_5mM_SA_P Parameter: Age (day) Value: 11
  misc_feature: MA Experiment 20000478 PARAMETER Experiment Name: Zm_5mM_SA_P Parameter: Organism Value: Zea mays
  misc_feature: MA Experiment 20000478 PARAMETER Experiment Name: Zm_5mM_SA_P Parameter: Plant Line Value: 35A19
  misc_feature: MA Experiment 20000478 PARAMETER Experiment Name: Zm_5mM_SA_P Parameter: Timepoint (hr) Value: 72
  misc_feature: MA Experiment 20000478 PARAMETER Experiment Name: Zm_5mM_SA_P Parameter: Tissue Value: Aerial
  misc_feature: MA Experiment 20000478 PARAMETER Experiment Name: Zm_5mM_SA_P Parameter: Treatment Value: 5mM SA vs. No Treatment
  misc_feature: MA Experiment ID: 20000479 Result: Down-regulated in Transcription
  misc_feature: MA Experiment 20000479 PARAMETER Experiment Name: Zm_Drought_P Parameter: Age (day) Value: 10
  misc_feature: MA Experiment 20000479 PARAMETER Experiment Name: Zm_Drought_P Parameter: Organism Value: Zea mays
  misc_feature: MA Experiment 20000479 PARAMETER Experiment Name: Zm_Drought_P Parameter: Plant Line Value: 35A19
  misc_feature: MA Experiment 20000479 PARAMETER Experiment Name: Zm_Drought_P Parameter: Timepoint (hr) Value: 48
  misc_feature: MA Experiment 20000479 PARAMETER Experiment Name: Zm_Drought_P Parameter: Tissue Value: Aerial
  misc_feature: MA Experiment 20000479 PARAMETER Experiment Name: Zm_Drought_P Parameter: Treatment Value: Drought vs. No Drought
  misc_feature: MA Experiment ID: 20000480 Result: Down-regulated in Transcription
  misc_feature: MA Experiment 20000480 PARAMETER Experiment Name: Zm_Drought_P Parameter: Age (day) Value: 11
  misc_feature: MA Experiment 20000480 PARAMETER Experiment Name: Zm_Drought_P Parameter: Organism Value: Zea mays
  misc_feature: MA Experiment 20000480 PARAMETER Experiment Name: Zm_Drought_P Parameter: Plant Line Value: 35A19
  misc_feature: MA Experiment 20000480 PARAMETER Experiment Name: Zm_Drought_P Parameter: Timepoint (hr) Value: 72
  misc_feature: MA Experiment 20000480 PARAMETER Experiment Name: Zm_Drought_P Parameter: Tissue Value: Aerial
  misc_feature: MA Experiment 20000480 PARAMETER Experiment Name: Zm_Drought_P Parameter: Treatment Value: Drought vs. No Drought
  misc_feature: MA Experiment ID: 20000492 Result: Up-regulated in Transcription
  misc_feature: MA Experiment 20000492 PARAMETER Experiment Name: Zm_Hybrid_Seed_Dev_P Parameter: DAP Value: 12
  misc_feature: MA Experiment 20000492 PARAMETER Experiment Name: Zm_Hybrid_Seed_Dev_P Parameter: Organism Value: Zea mays
  misc_feature: MA Experiment 20000492 PARAMETER Experiment Name: Zm_Hybrid_Seed_Dev_P Parameter: Plant Line Value: 35A19
  misc_feature: MA Experiment 20000492 PARAMETER Experiment Name: Zm_Hybrid_Seed_Dev_P Parameter: Tissue Value: Fert Kernel vs. Unfert Floret
  misc_feature: MA Experiment ID: 20000533 Result: Down-regulated in Transcription
  misc_feature: MA Experiment 20000533 PARAMETER Experiment Name: Zm_0.001percent_MeJA_P Parameter: Age (day) Value: 11
  misc_feature: MA Experiment 20000533 PARAMETER Experiment Name: Zm_0.001percent_MeJA_P Parameter: Organism Value: Zea mays
  misc_feature: MA Experiment 20000533 PARAMETER Experiment Name: Zm_0.001percent_MeJA_P Parameter: Plant Line Value: 35A19
  misc_feature: MA Experiment 20000533 PARAMETER Experiment Name: Zm_0.001percent_MeJA_P Parameter: Timepoint (hr) Value: 72
  misc_feature: MA Experiment 20000533 PARAMETER Experiment Name: Zm_0.001percent_MeJA_P Parameter: Tissue Value: Aerial
  misc_feature: MA Experiment 20000533 PARAMETER Experiment Name: Zm_0.001percent_MeJA_P Parameter: Treatment Value: 0.001percent MeJA vs. No Treatment
  misc_feature: MA Experiment ID: 20000535 Result: Up-regulated in Transcription
  misc_feature: MA Experiment 20000535 PARAMETER Experiment Name: Zm_Hybrid_Seed_Dev_P Parameter: DAP Value: 30 vs. 12
  misc_feature: MA Experiment 20000535 PARAMETER Experiment Name: Zm_Hybrid_Seed_Dev_P Parameter: Organism Value: Zea mays
  misc_feature: MA Experiment 20000535 PARAMETER Experiment Name: Zm_Hybrid_Seed_Dev_P Parameter: Plant Line Value: 35A19
  misc_feature: MA Experiment 20000535 PARAMETER Experiment Name: Zm_Hybrid_Seed_Dev_P Parameter: Tissue Value: Embryo vs. Unfert Floret

SEQ ID NO: 20143 - protein, 592 aa, Zea mays subsp. mays; identical to SEQ ID NO: 18261
  peptide (1)..(592): Ceres Seq. ID no. 13566659
  misc_feature (21)..(592): Homolog of NCBI NO: 15234551 NR Description: pectinesterase (pectin methylesterase) family
  misc_feature (7)..(589): Homolog of NCBI NO: 27817921 NR Description: putative pectinesterase [Oryza sativa (japonica
  misc_feature (7)..(588): Homolog of NCBI NO: 34897712 NR Description: ESTs AU082304(C61278),C93463(C50982) correspond a region of the predicted gene.~Similar to Arabidopsis thaliana chromosome 4, BAC clone F24A6, Pollen-specific protein precursor
  misc_feature (490)..(557): Homolog of NCBI NO: 34893990 NR Description: putative pollen-specific protein homolog
  misc_feature (8)..(490): Homolog of NCBI NO: 34893990 NR Description: putative pollen-specific protein homolog
  misc_feature (13)..(557): Homolog of NCBI NO: 7433000 NR Description: pollen-specific protein homolog F24A6.80 -
  misc_feature (5)..(588): Homolog of NCBI NO: 15242108 NR Description: pectinesterase (pectin methylesterase) family
  misc_feature (13)..(589): Homolog of NCBI NO: 22328918 NR Description: pectinesterase (pectin methylesterase) family
  misc_feature (326)..(590): Homolog of NCBI NO: 37535902 NR Description: putative ascorbate oxidase
  misc_feature (1)..(341): Homolog of NCBI NO: 37535902 NR Description: putative ascorbate oxidase
  misc_feature (490)..(557): Homolog of NCBI NO: 34893990 NR Description: putative pollen-specific protein homolog
  misc_feature (8)..(490): Homolog of NCBI NO: 34893990 NR Description: putative pollen-specific protein homolog
  misc_feature (13)..(557): Homolog of NCBI NO: 7433000 NR Description: pollen-specific protein homolog F24A6.80 -
  misc_feature (5)..(588): Homolog of NCBI NO: 15242108 NR Description: pectinesterase (pectin methylesterase) family
  misc_feature (13)..(589): Homolog of NCBI NO: 22328918 NR Description: pectinesterase (pectin methylesterase) family
  misc_feature (326)..(590): Homolog of NCBI NO: 37535902 NR Description: putative ascorbate oxidase
  misc_feature (1)..(341): Homolog of NCBI NO: 37535902 NR Description: putative ascorbate oxidase
  misc_feature (21)..(592): Homolog of NCBI NO: 15234551 NR Description: pectinesterase (pectin methylesterase) family
  misc_feature (7)..(589): Homolog of NCBI NO: 27817921 NR Description: putative pectinesterase [Oryza sativa (japonica
  misc_feature (7)..(588): Homolog of NCBI NO: 34897712 NR Description: ESTs AU082304(C61278),C93463(C50982) correspond a region of the predicted gene.~Similar to Arabidopsis thaliana chromosome 4, BAC clone F24A6, Pollen-specific protein precursor
  misc_feature (490)..(557): Homolog of NCBI NO: 34893990 NR Description: putative pollen-specific protein homolog
  misc_feature (8)..(490): Homolog of NCBI NO: 34893990 NR Description: putative pollen-specific protein homolog
  misc_feature (13)..(557): Homolog of NCBI NO: 7433000 NR Description: pollen-specific protein homolog F24A6.80 -
  misc_feature (5)..(588): Homolog of NCBI NO: 15242108 NR Description: pectinesterase (pectin methylesterase) family
  misc_feature (13)..(589): Homolog of NCBI NO: 22328918 NR Description: pectinesterase (pectin methylesterase) family
  misc_feature (326)..(590): Homolog of NCBI NO: 37535902 NR Description: putative ascorbate oxidase
  misc_feature (1)..(341): Homolog of NCBI NO: 37535902 NR Description: putative ascorbate oxidase
  misc_feature (21)..(592): Homolog of NCBI NO: 15234551 NR Description: pectinesterase (pectin methylesterase) family
  misc_feature (7)..(589): Homolog of NCBI NO: 27817921 NR Description: putative pectinesterase [Oryza sativa (japonica
  misc_feature (7)..(588): Homolog of NCBI NO: 34897712 NR Description: ESTs AU082304(C61278),C93463(C50982) correspond a region of the predicted gene.~Similar to Arabidopsis thaliana chromosome 4, BAC clone F24A6, Pollen-specific protein precursor
  misc_feature (489)..(489): Xaa is any aa, unknown or other

SEQ ID NO: 20144 - protein, 535 aa, Zea mays subsp. mays; identical to SEQ ID NO: 18262
  peptide (1)..(535): Ceres Seq. ID no. 13566660
  misc_feature (433)..(500): Homolog of NCBI NO: 34893990 NR Description: putative pollen-specific protein homolog
  misc_feature (1)..(433): Homolog of NCBI NO: 34893990 NR Description: putative pollen-specific protein homolog
  misc_feature (1)..(500): Homolog of NCBI NO: 7433000 NR Description: pollen-specific protein homolog F24A6.80 -
  misc_feature (1)..(531): Homolog of NCBI NO: 15242108 NR Description: pectinesterase (pectin methylesterase) family
  misc_feature (1)..(532): Homolog of NCBI NO: 22328918 NR Description: pectinesterase (pectin methylesterase) family
  misc_feature (269)..(533): Homolog of NCBI NO: 37535902 NR Description: putative ascorbate oxidase
  misc_feature (1)..(284): Homolog of NCBI NO: 37535902 NR Description: putative ascorbate oxidase
  misc_feature (1)..(535): Homolog of NCBI NO: 15234551 NR Description: pectinesterase (pectin methylesterase) family
  misc_feature (1)..(532): Homolog of NCBI NO: 27817921 NR Description: putative pectinesterase [Oryza sativa (japonica
  misc_feature (1)..(531): Homolog of NCBI NO: 34897712 NR Description: ESTs AU082304(C61278),C93463(C50982) correspond a region of the predicted gene.~Similar to Arabidopsis thaliana chromosome 4, BAC clone F24A6, Pollen-specific protein precursor
  misc_feature (433)..(500): Homolog of NCBI NO: 34893990 NR Description: putative pollen-specific protein homolog
  misc_feature (1)..(433): Homolog of NCBI NO: 34893990 NR Description: putative pollen-specific protein homolog
  misc_feature (1)..(500): Homolog of NCBI NO: 7433000 NR Description: pollen-specific protein homolog F24A6.80 -
  misc_feature (1)..(531): Homolog of NCBI NO: 15242108 NR Description: pectinesterase (pectin methylesterase) family
  misc_feature (1)..(532): Homolog of NCBI NO: 22328918 NR Description: pectinesterase (pectin methylesterase) family
  misc_feature (269)..(533): Homolog of NCBI NO: 37535902 NR Description: putative ascorbate oxidase
  misc_feature (1)..(284): Homolog of NCBI NO: 37535902 NR Description: putative ascorbate oxidase
  misc_feature (1)..(535): Homolog of NCBI NO: 15234551 NR Description: pectinesterase (pectin methylesterase) family
  misc_feature (1)..(532): Homolog of NCBI NO: 27817921 NR Description: putative pectinesterase [Oryza sativa (japonica
  misc_feature (1)..(531): Homolog of NCBI NO: 34897712 NR Description: ESTs AU082304(C61278),C93463(C50982) correspond a region of the predicted gene.~Similar to Arabidopsis thaliana chromosome 4, BAC clone F24A6, Pollen-specific protein precursor
  misc_feature (1)..(531): Homolog of NCBI NO: 34897712 NR Description: ESTs AU082304(C61278),C93463(C50982) correspond a region of the predicted gene.~Similar to Arabidopsis thaliana chromosome 4, BAC clone F24A6, Pollen-specific protein precursor
  misc_feature (433)..(500): Homolog of NCBI NO: 34893990 NR Description: putative pollen-specific protein homolog
  misc_feature (1)..(433): Homolog of NCBI NO: 34893990 NR Description: putative pollen-specific protein homolog
  misc_feature (1)..(500): Homolog of NCBI NO: 7433000 NR Description: pollen-specific protein homolog F24A6.80 -
  misc_feature (1)..(531): Homolog of NCBI NO: 15242108 NR Description: pectinesterase (pectin methylesterase) family
  misc_feature (1)..(532): Homolog of NCBI NO: 22328918 NR Description: pectinesterase (pectin methylesterase) family
  misc_feature (269)..(533): Homolog of NCBI NO: 37535902 NR Description: putative ascorbate oxidase
  misc_feature (1)..(284): Homolog of NCBI NO: 37535902 NR Description: putative ascorbate oxidase
  misc_feature (1)..(535): Homolog of NCBI NO: 15234551 NR Description: pectinesterase (pectin methylesterase) family
  misc_feature (1)..(532): Homolog of NCBI NO: 27817921 NR Description: putative pectinesterase [Oryza sativa (japonica
  misc_feature (432)..(432): Xaa is any aa, unknown or other

SEQ ID NO: 20145 - protein, 463 aa, Zea mays subsp. mays; identical to SEQ ID NO: 18263
  peptide (1)..(463): Ceres Seq. ID no. 13566661
  misc_feature (361)..(428): Homolog of NCBI NO: 34893990 NR Description: putative pollen-specific protein homolog
  misc_feature (1)..(361): Homolog of NCBI NO: 34893990 NR Description: putative pollen-specific protein homolog
  misc_feature (1)..(428): Homolog of NCBI NO: 7433000 NR Description: pollen-specific protein homolog F24A6.80 -
  misc_feature (1)..(459): Homolog of NCBI NO: 15242108 NR Description: pectinesterase (pectin methylesterase) family
  misc_feature (1)..(460): Homolog of NCBI NO: 22328918 NR Description: pectinesterase (pectin methylesterase) family
  misc_feature (197)..(461): Homolog of NCBI NO: 37535902 NR Description: putative ascorbate oxidase
  misc_feature (1)..(212): Homolog of NCBI NO: 37535902 NR Description: putative ascorbate oxidase
  misc_feature (1)..(463): Homolog of NCBI NO: 15234551 NR Description: pectinesterase (pectin methylesterase) family
  misc_feature (1)..(460): Homolog of NCBI NO: 27817921 NR Description: putative pectinesterase [Oryza sativa (japonica
  misc_feature (1)..(459): Homolog of NCBI NO: 34897712 NR Description: ESTs AU082304(C61278),C93463(C50982) correspond a region of the predicted gene.~Similar to Arabidopsis thaliana chromosome 4, BAC clone F24A6, Pollen-specific protein precursor
  misc_feature (361)..(428): Homolog of NCBI NO: 34893990 NR Description: putative pollen-specific protein homolog
  misc_feature (1)..(361): Homolog of NCBI NO: 34893990 NR Description: putative pollen-specific protein homolog
  misc_feature (1)..(428): Homolog of NCBI NO: 7433000 NR Description: pollen-specific protein homolog F24A6.80 -
  misc_feature (1)..(459): Homolog of NCBI NO: 15242108 NR Description: pectinesterase (pectin methylesterase) family
  misc_feature (1)..(460): Homolog of NCBI NO: 22328918 NR Description: pectinesterase (pectin methylesterase) family
  misc_feature (197)..(461): Homolog of NCBI NO: 37535902 NR Description: putative ascorbate oxidase
  misc_feature (1)..(212): Homolog of NCBI NO: 37535902 NR Description: putative ascorbate oxidase
  misc_feature (1)..(463): Homolog of NCBI NO: 15234551 NR Description: pectinesterase (pectin methylesterase) family
  misc_feature (1)..(460): Homolog of NCBI NO: 27817921 NR Description: putative pectinesterase [Oryza sativa (japonica
  misc_feature (1)..(459): Homolog of NCBI NO: 34897712 NR Description: ESTs AU082304(C61278),C93463(C50982) correspond a region of the predicted gene.~Similar to Arabidopsis thaliana chromosome 4, BAC clone F24A6, Pollen-specific protein precursor
  misc_feature (361)..(428): Homolog of NCBI NO: 34893990 NR Description: putative pollen-specific protein homolog
  misc_feature (1)..(361): Homolog of NCBI NO: 34893990 NR Description: putative pollen-specific protein homolog
  misc_feature (1)..(428): Homolog of NCBI NO: 7433000 NR Description: pollen-specific protein homolog F24A6.80 -
  misc_feature (1)..(459): Homolog of NCBI NO: 15242108 NR Description: pectinesterase (pectin methylesterase) family
  misc_feature (1)..(460): Homolog of NCBI NO: 22328918 NR Description: pectinesterase (pectin methylesterase) family
  misc_feature (197)..(461): Homolog of NCBI NO: 37535902 NR Description: putative ascorbate oxidase
  misc_feature (1)..(212): Homolog of NCBI NO: 37535902 NR Description: putative ascorbate oxidase
  misc_feature (1)..(463): Homolog of NCBI NO: 15234551 NR Description: pectinesterase (pectin methylesterase) family
  misc_feature (1)..(460): Homolog of NCBI NO: 27817921 NR Description: putative pectinesterase [Oryza sativa (japonica
  misc_feature (1)..(459): Homolog of NCBI NO: 34897712 NR Description: ESTs AU082304(C61278),C93463(C50982) correspond a region of the predicted gene.~Similar to Arabidopsis thaliana chromosome 4, BAC clone F24A6, Pollen-specific protein precursor
  misc_feature (360)..(360): Xaa is any aa, unknown or other

SEQ ID NO: 20146 - DNA, 1402 bp, Zea mays subsp. mays; identical to SEQ ID NO: 11933
  misc_feature (1)..(1402): Ceres Seq. ID no. 13492514
  misc_feature: MA Experiment ID: 20000534 Result: Down-regulated in Transcription
  misc_feature: MA Experiment 20000534 PARAMETER Experiment Name: Zm_Hybrid_Pollen_P Parameter: Age (day) Value: 8
  misc_feature: MA Experiment 20000534 PARAMETER Experiment Name: Zm_Hybrid_Pollen_P Parameter: Organism Value: Zea mays
  misc_feature: MA Experiment 20000534 PARAMETER Experiment Name: Zm_Hybrid_Pollen_P Parameter: Plant Line Value: 35A19
  misc_feature: MA Experiment 20000534 PARAMETER Experiment Name: Zm_Hybrid_Pollen_P Parameter: Tissue Value: Pollen vs. Aerial
  misc_feature: MA Experiment ID: 20000535 Result: Down-regulated in Transcription
  misc_feature: MA Experiment 20000535 PARAMETER Experiment Name: Zm_Hybrid_Seed_Dev_P Parameter: DAP Value: 30 vs. 12
  misc_feature: MA Experiment 20000535 PARAMETER Experiment Name: Zm_Hybrid_Seed_Dev_P Parameter: Organism Value: Zea mays
  misc_feature: MA Experiment 20000535 PARAMETER Experiment Name: Zm_Hybrid_Seed_Dev_P Parameter: Plant Line Value: 35A19
  misc_feature: MA Experiment 20000535 PARAMETER Experiment Name: Zm_Hybrid_Seed_Dev_P Parameter: Tissue Value: Embryo vs. Unfert Floret

SEQ ID NO: 20147 - protein, 243 aa, Zea mays subsp. mays; identical to SEQ ID NO: 11934
  peptide (1)..(243): Ceres Seq. ID no. 13492515
  misc_feature (165)..(242): Pfam Name: UBX domain Pfam Description: UBX domain
  misc_feature (34)..(242): Homolog of NCBI NO: 13123657 NR Description: phosphatase-like protein Mtc923 [Medicago
  misc_feature (34)..(243): Homolog of NCBI NO: 13123659 NR Description: phosphatase-like protein Psc923 [Pisum sativum]
  misc_feature (27)..(242): Homolog of NCBI NO: 18412499 NR Description: membrane trafficking factor -related [Arabidopsis >gi|20268692|gb|AAM14050.1| putative membrane trafficking factor thaliana] >gi|21553471|gb|AAM62564.1| putative membrane
  misc_feature (27)..(242): Homolog of NCBI NO: 7487458 NR Description: hypothetical protein T27D20.10 - Arabidopsis >gi|3377843|gb|AAC28225.1| contains similarity to rat p47 protein
  misc_feature (34)..(242): Homolog of NCBI NO: 15234731 NR Description: expressed protein [Arabidopsis thaliana]
  misc_feature (25)..(242): Homolog of NCBI NO: 18414442 NR Description: phosphatase like protein [Arabidopsis thaliana]
  misc_feature (25)..(242): Homolog of NCBI NO: 15292665 NR Description: putative phosphatase [Arabidopsis thaliana]
  misc_feature (25)..(239): Homolog of NCBI NO: 7485149 NR Description: hypothetical protein - Arabidopsis thaliana phosphatase like protein [Arabidopsis thaliana]
  misc_feature (48)..(243): Homolog of NCBI NO: 29568099 NR Description: p47 protein [Homo sapiens]
  misc_feature (61)..(243): Homolog of NCBI NO: 20149635 NR Description: p47 protein [Homo sapiens] dJ776F14.1 (P47 protein) [Homo sapiens]

SEQ ID NO: 20148 - protein, 242 aa, Zea mays subsp. mays; identical to SEQ ID NO: 11935
  peptide (1)..(242): Ceres Seq. ID no. 13492516
  misc_feature (164)..(241): Pfam Name: UBX domain Pfam Description: UBX domain
  misc_feature (33)..(241): Homolog of NCBI NO: 13123657 NR Description: phosphatase-like protein Mtc923 [Medicago
  misc_feature (33)..(242): Homolog of NCBI NO: 13123659 NR Description: phosphatase-like protein Psc923 [Pisum sativum]
  misc_feature (26)..(241): Homolog of NCBI NO: 18412499 NR Description: membrane trafficking factor -related [Arabidopsis >gi|20268692|gb|AAM14050.1| putative membrane trafficking factor thaliana] >gi|21553471|gb|AAM62564.1| putative membrane
  misc_feature (26)..(241): Homolog of NCBI NO: 7487458 NR Description: hypothetical protein T27D20.10 - Arabidopsis >gi|3377843|gb|AAC28225.1| contains similarity to rat p47 protein
  misc_feature (33)..(241): Homolog of NCBI NO: 15234731 NR Description: expressed protein [Arabidopsis thaliana]
  misc_feature (24)..(241): Homolog of NCBI NO: 18414442 NR Description: phosphatase like protein [Arabidopsis thaliana]
  misc_feature (24)..(241): Homolog of NCBI NO: 15292665 NR Description: putative phosphatase [Arabidopsis thaliana]
  misc_feature (24)..(238): Homolog of NCBI NO: 7485149 NR Description: hypothetical protein - Arabidopsis thaliana phosphatase like protein [Arabidopsis thaliana]
  misc_feature (47)..(242): Homolog of NCBI NO: 29568099 NR Description: p47 protein [Homo sapiens]
  misc_feature (60)..(242): Homolog of NCBI NO: 20149635 NR Description: p47 protein [Homo sapiens] dJ776F14.1 (P47 protein) [Homo sapiens]

SEQ ID NO: 20149 - protein, 240 aa, Zea mays subsp. mays; identical to SEQ ID NO: 11936
  peptide (1)..(240): Ceres Seq. ID no. 13492517
  misc_feature (162)..(239): Pfam Name: UBX domain Pfam Description: UBX domain
  misc_feature (31)..(239): Homolog of NCBI NO: 13123657 NR Description: phosphatase-like protein Mtc923 [Medicago
  misc_feature (31)..(240): Homolog of NCBI NO: 13123659 NR Description: phosphatase-like protein Psc923 [Pisum sativum]
  misc_feature (24)..(239): Homolog of NCBI NO: 18412499 NR Description: membrane trafficking factor -related [Arabidopsis >gi|20268692|gb|AAM14050.1| putative membrane trafficking factor thaliana] >gi|21553471|gb|AAM62564.1| putative membrane
  misc_feature (24)..(239): Homolog of NCBI NO: 7487458 NR Description: hypothetical protein T27D20.10 - Arabidopsis >gi|3377843|gb|AAC28225.1| contains similarity to rat p47 protein
  misc_feature (31)..(239): Homolog of NCBI NO: 15234731 NR Description: expressed protein [Arabidopsis thaliana]
  misc_feature (22)..(239): Homolog of NCBI NO: 18414442 NR Description: phosphatase like protein [Arabidopsis thaliana]
  misc_feature (22)..(239): Homolog of NCBI NO: 15292665 NR Description: putative phosphatase [Arabidopsis thaliana]
  misc_feature (22)..(236): Homolog of NCBI NO: 7485149 NR Description: hypothetical protein - Arabidopsis thaliana phosphatase like protein [Arabidopsis thaliana]
  misc_feature (45)..(240): Homolog of NCBI NO: 29568099 NR Description: p47 protein [Homo sapiens]
  misc_feature (58)..(240): Homolog of NCBI NO: 20149635 NR Description: p47 protein [Homo sapiens] dJ776F14.1 (P47 protein) [Homo sapiens]

SEQ ID NO: 20150 - DNA, 845 bp, Zea mays subsp. mays
  misc_feature (1)..(845): Ceres Seq. ID no. 12418375
  misc_feature: MA Experiment ID: 108522 Result: Up-regulated in Transcription
  misc_feature: MA Experiment 108522 PARAMETER Experiment Name: Zm_42deg_Heat_P Parameter: Age (day) Value: 8
  misc_feature: MA Experiment 108522 PARAMETER Experiment Name: Zm_42deg_Heat_P Parameter: Organism Value: Zea mays
  misc_feature: MA Experiment 108522 PARAMETER Experiment Name: Zm_42deg_Heat_P Parameter: Plant Line Value: 35A19
  misc_feature: MA Experiment 108522 PARAMETER Experiment Name: Zm_42deg_Heat_P Parameter: Temperature (deg C) Value: 42 vs. 22
  misc_feature: MA Experiment 108522 PARAMETER Experiment Name: Zm_42deg_Heat_P Parameter: Timepoint (hr) Value: 1
  misc_feature: MA Experiment 108522 PARAMETER Experiment Name: Zm_42deg_Heat_P Parameter: Tissue Value: Aerial
  misc_feature: MA Experiment ID: 108523 Result: Up-regulated in Transcription
  misc_feature: MA Experiment 108523 PARAMETER Experiment Name: Zm_42deg_Heat_P Parameter: Age (day) Value: 8
  misc_feature: MA Experiment 108523 PARAMETER Experiment Name: Zm_42deg_Heat_P Parameter: Organism Value: Zea mays
  misc_feature: MA Experiment 108523 PARAMETER Experiment Name: Zm_42deg_Heat_P Parameter: Plant Line Value: 35A19
  misc_feature: MA Experiment 108523 PARAMETER Experiment Name: Zm_42deg_Heat_P Parameter: Temperature (deg C) Value: 42 vs. 22
  misc_feature: MA Experiment 108523 PARAMETER Experiment Name: Zm_42deg_Heat_P Parameter: Timepoint (hr) Value: 6
  misc_feature: MA Experiment 108523 PARAMETER Experiment Name: Zm_42deg_Heat_P Parameter: Tissue Value: Aerial
  misc_feature: MA Experiment ID: 108527 Result: Up-regulated in Transcription
  misc_feature: MA Experiment 108527 PARAMETER Experiment Name: Zm_5mM_NO_P Parameter: Age (day) Value: 8
  misc_feature: MA Experiment 108527 PARAMETER Experiment Name: Zm_5mM_NO_P Parameter: Organism Value: Zea mays
  misc_feature: MA Experiment 108527 PARAMETER Experiment Name: Zm_5mM_NO_P Parameter: Plant Line Value: 35A19
  misc_feature: MA Experiment 108527 PARAMETER Experiment Name: Zm_5mM_NO_P Parameter: Timepoint (hr) Value: 6
  misc_feature: MA Experiment 108527 PARAMETER Experiment Name: Zm_5mM_NO_P Parameter: Tissue Value: Aerial
  misc_feature: MA Experiment 108527 PARAMETER Experiment Name: Zm_5mM_NO_P Parameter: Treatment Value: 5mM NO vs. No Treatment
  misc_feature: MA Experiment ID: 108543 Result: Down-regulated in Transcription
  misc_feature: MA Experiment ID: 108688 Result: Down-regulated in Transcription
  misc_feature: MA Experiment 108688 PARAMETER Experiment Name: Zm_Embryos-Flowers__P Parameter: Tissue Value: Immature Flowers vs. Aerial+
gaagaagccgcgtgcgttatcctttgagcagtttgggcgctgagcaagtccagtgagagagggagagcggcgagaggatggctgggatggcatcgctgcagggcgccatggcgtcgctctccatctccgcgctaggcgcggcgacggcgagcagcagcagcttctggggcaaccggctcgccacctactccgcgccgcagcctggggtaaggtttatggtcaagatatgcccaattgaaatgagacttaagagatgggagcgaaagaagtgtaaaccaaacagtcttcctgtgctgcacaagatgcatgttaggatcggggacacggtacaggttattgcaggccgtgagaaaggaaaggttggagaagtcacacgccaaaaggtggatttagaaaaccttcgcttagccaagctgacaaatttcaagggccacgtaatgagatgcagctagtagcatttctgcttagacagtctagtagtctgaagaaactatttctgattgctcccaaggaggatcaccctcaaggactgcgcaaggttcagtcagatatgctgcctgattttcttaaaaaagaaatatcgcatctggaaagaccttcagcaaatacccagatatttttcggcgagcctgatgctcagacccacccgttgcattcggaggtctttgtcaggttttagcttgaaatgagcaaatgctgttgtagcccaattcctgctcatatagatttagatttctcgttagataacggacatggggaaaaaagtatctgcaaggcatacagagtttgatatatgtttcctcttttgcaattcatattactaaagaagtcctgcatagcagtcg

SEQ ID NO: 20151 - protein, 124 aa, Zea mays subsp. mays
  peptide (1)..(124): Ceres Seq. ID no. 12418376
  misc_feature (11)..(120): Homolog of NCBI NO: 132821 NR Description: 50S RIBOSOMAL PROTEIN L24, CHLOROPLAST PRECURSOR
  misc_feature (11)..(99): Homolog of NCBI NO: 400989 NR Description: 50S RIBOSOMAL PROTEIN L24, CHLOROPLAST PRECURSOR
  misc_feature (4)..(100): Homolog of NCBI NO: 132819 NR Description: 50S RIBOSOMAL PROTEIN L24, CHLOROPLAST PRECURSOR
  misc_feature (1)..(100): Homolog of NCBI NO: 30696487 NR Description: 50S ribosomal protein L24, chloroplast precursor
  misc_feature (1)..(100): Homolog of NCBI NO: 30696483 NR Description: 50S ribosomal protein L24, chloroplast precursor
  misc_feature (1)..(100): Homolog of NCBI NO: 1694974 NR Description: plastid ribosomal protein [Arabidopsis thaliana]
MAGMASLQGAMASLSISALGAATASSSSFWGNRLATYSAPQPGVRFMVKICPIEMRLKRWERKKCKPNSLPVLHKMHVRIGDTVQVIAGREKGKVGEVTRQKVDLENLRLAKLTNFKGHVMRCS

SEQ ID NO: 20152 - protein, 121 aa, Zea mays subsp. mays
  peptide (1)..(121): Ceres Seq. ID no. 12418377
  misc_feature (8)..(117): Homolog of NCBI NO: 132821 NR Description: 50S RIBOSOMAL PROTEIN L24, CHLOROPLAST PRECURSOR
  misc_feature (8)..(96): Homolog of NCBI NO: 400989 NR Description: 50S RIBOSOMAL PROTEIN L24, CHLOROPLAST PRECURSOR
  misc_feature (1)..(97): Homolog of NCBI NO: 132819 NR Description: 50S RIBOSOMAL PROTEIN L24, CHLOROPLAST PRECURSOR
  misc_feature (1)..(97): Homolog of NCBI NO: 30696487 NR Description: 50S ribosomal protein L24, chloroplast precursor
  misc_feature (1)..(97): Homolog of NCBI NO: 30696483 NR Description: 50S ribosomal protein L24, chloroplast precursor
  misc_feature (1)..(97): Homolog of NCBI NO: 1694974 NR Description: plastid ribosomal protein [Arabidopsis thaliana]
MASLQGAMASLSISALGAATASSSSFWGNRLATYSAPQPGVRFMVKICPIEMRLKRWERKKCKPNSLPVLHKMHVRIGDTVQVIAGREKGKVGEVTRQKVDLENLRLAKLTNFKGHVMRCS

SEQ ID NO: 20153 - protein, 114 aa, Zea mays subsp. mays
  peptide (1)..(114): Ceres Seq. ID no. 12418378
  misc_feature (1)..(110): Homolog of NCBI NO: 132821 NR Description: 50S RIBOSOMAL PROTEIN L24, CHLOROPLAST PRECURSOR
  misc_feature (1)..(89): Homolog of NCBI NO: 400989 NR Description: 50S RIBOSOMAL PROTEIN L24, CHLOROPLAST PRECURSOR
  misc_feature (1)..(90): Homolog of NCBI NO: 132819 NR Description: 50S RIBOSOMAL PROTEIN L24, CHLOROPLAST PRECURSOR
  misc_feature (1)..(90): Homolog of NCBI NO: 30696487 NR Description: 50S ribosomal protein L24, chloroplast precursor
  misc_feature (1)..(90): Homolog of NCBI NO: 30696483 NR Description: 50S ribosomal protein L24, chloroplast precursor
  misc_feature (1)..(90): Homolog of NCBI NO: 1694974 NR Description: plastid ribosomal protein [Arabidopsis thaliana]
MASLSISALGAATASSSSFWGNRLATYSAPQPGVRFMVKICPIEMRLKRWERKKCKPNSLPVLHKMHVRIGDTVQVIAGREKGKVGEVTRQKVDLENLRLAKLTNFKGHVMRCS

SEQ ID NO: 20154 - DNA, 1023 bp, Zea mays subsp. mays
  misc_feature (1)..(1023): Ceres Seq. ID no. 12378098
  misc_feature: MA Experiment ID: 108543 Result: Down-regulated in Transcription
  misc_feature: MA Experiment ID: 108544 Result: Down-regulated in Transcription
  misc_feature: MA Experiment ID: 108689 Result: Down-regulated in Transcription
  misc_feature: MA Experiment 108689 PARAMETER Experiment Name: Zm_Drought_Roots_P Parameter: Age (day) Value: 9
  misc_feature: MA Experiment 108689 PARAMETER Experiment Name: Zm_Drought_Roots_P Parameter: Organism Value: Zea mays
  misc_feature: MA Experiment 108689 PARAMETER Experiment Name: Zm_Drought_Roots_P Parameter: Plant Line Value: 35A19
  misc_feature: MA Experiment 108689 PARAMETER Experiment Name: Zm_Drought_Roots_P Parameter: Timepoint (hr) Value: 24
  misc_feature: MA Experiment 108689 PARAMETER Experiment Name: Zm_Drought_Roots_P Parameter: Tissue Value: Roots
  misc_feature: MA Experiment 108689 PARAMETER Experiment Name: Zm_Drought_Roots_P Parameter: Treatment Value: Drought vs. No Drought
  misc_feature: MA Experiment ID: 20000487 Result: Up-regulated in Transcription
  misc_feature: MA Experiment 20000487 PARAMETER Experiment Name: Zm_50mM_NH4NO3_L_to_H_P Parameter: Organism Value: Zea mays
  misc_feature: MA Experiment 20000487 PARAMETER Experiment Name: Zm_50mM_NH4NO3_L_to_H_P Parameter: Timepoint (hr) Value: 4
  misc_feature: MA Experiment 20000487 PARAMETER Experiment Name: Zm_50mM_NH4NO3_L_to_H_P Parameter: Tissue Value: Leaves
  misc_feature: MA Experiment 20000487 PARAMETER Experiment Name: Zm_50mM_NH4NO3_L_to_H_P Parameter: Treatment Value: 50mM NH4NO3 vs. 100mM Mannitol
  misc_feature: MA Experiment ID: 20000488 Result: Up-regulated in Transcription
  misc_feature: MA Experiment 20000488 PARAMETER Experiment Name: Zm_50mM_NH4NO3_L_to_H_P Parameter: Organism Value: Zea mays
  misc_feature: MA Experiment 20000488 PARAMETER Experiment Name: Zm_50mM_NH4NO3_L_to_H_P Parameter: Timepoint (hr) Value: 8
  misc_feature: MA Experiment 20000488 PARAMETER Experiment Name: Zm_50mM_NH4NO3_L_to_H_P Parameter: Tissue Value: Leaves
  misc_feature: MA Experiment 20000488 PARAMETER Experiment Name: Zm_50mM_NH4NO3_L_to_H_P Parameter: Treatment Value: 50mM NH4NO3 vs. 100mM Mannitol
acaaccacaggcaacgcaacccccaaacccaaaaccctaccacggcgcccatggcttcgccgccgcctcctcctgcccggcaccccacctccgcagcaaccgccgctgcggcgggcaatggccacgacacctccgcagcaaccgccgctgcggcgggaaatagccacgccacctccgcttcgccggtggacgccctcttcctccagaacctcatgacccgcgtccagctccgcccgcccttcctcgacaccaactcattcctcacccaggaccttgacgacttcctcctcaacgagttcgccgcgctatccgccgctgcaggggcgtcggatgatgacgaagacgtggaggatgaggatggtgggctcgctggcggggagggctccggggaggcgaggcggcggcggatgctggcgagggaggaggcgaagctggagaaggagattgtgcggatggtgctggccggggaggccgaggacaagctcaagcccaattcgggccagtccgtggctgtcggcgaccaccacctctgcgtcggtttccacgacgatgccagcggggagtatcgcatctgggaatggcatggccacgtcatgctgttcgacgacgaggaaggatactccgcagagtacatttatggcaaccacttcgagccgctcgctgctgccacagccagggccaagaagaaggagaaggagatgagagagaaggaattgagcatgggtcttcgggatttggtcgtggacactgacgacggtggcaatgccaatcgctccaaggagaacggtagcagcggagggcccagggtagtgcgcaggaatgtcgtcaatggcccaaccacgcctgctaggtaatggctttctagagcttgcagtgtgcttggtggaagaagcagtgccgcagtgcatcaatctgtgtgacaaaaacaaataaagatctgttgtccttttctcgcttatagctgtttaagctgtctattgtattctgttgagaaatcaatcacatctatactttgcttctgct

SEQ ID NO: 20155 - protein, 283 aa, Zea mays subsp. mays
  peptide (1)..(283): Ceres Seq. ID no. 12378099
  misc_feature (126)..(255): Homolog of NCBI NO: 22331772 NR Description: putative protein
  misc_feature (126)..(255): Homolog of NCBI NO: 11357797 NR Description: hypothetical protein F4P12.330 - Arabidopsis
NHRQRNPQTQNPTTAPMASPPPPPARHPTSAATAAAAGNGHDTSAATAAAAGNSHATSASPVDALFLQNLMTRVQLRPPFLDTNSFLTQDLDDFLLNEFAALSAAAGASDDDEDVEDEDGGLAGGEGSGEARRRRMLAREEAKLEKEIVRMVLAGEAEDKLKPNSGQSVAVGDHHLCVGFHDDASGEYRIWEWHGHVMLFDDEEGYSAEYIYGNHFEPLAAATARAKKKEKEMREKELSMGLRDLVVDTDDGGNANRSKENGSSGGPRVVRRNVVNGPTTPAR

SEQ ID NO: 20156 - protein, 267 aa, Zea mays subsp. mays
  peptide (1)..(267): Ceres Seq. ID no. 12378100
  misc_feature (110)..(239): Homolog of NCBI NO: 22331772 NR Description: putative protein
  misc_feature (110)..(239): Homolog of NCBI NO: 11357797 NR Description: hypothetical protein F4P12.330 - Arabidopsis
MASPPPPPARHPTSAATAAAAGNGHDTSAATAAAAGNSHATSASPVDALFLQNLMTRVQLRPPFLDTNSFLTQDLDDFLLNEFAALSAAAGASDDDEDVEDEDGGLAGGEGSGEARRRRMLAREEAKLEKEIVRMVLAGEAEDKLKPNSGQSVAVGDHHLCVGFHDDASGEYRIWEWHGHVMLFDDEEGYSAEYIYGNHFEPLAAATARAKKKEKEMREKELSMGLRDLVVDTDDGGNANRSKENGSSGGPRVVRRNVVNGPTTPAR

SEQ ID NO: 20157 - protein, 213 aa, Zea mays subsp. mays
  peptide (1)..(213): Ceres Seq. ID no. 12378101
  misc_feature (56)..(185): Homolog of NCBI NO: 11357797 NR Description: hypothetical protein F4P12.330 - Arabidopsis
  misc_feature (56)..(185): Homolog of NCBI NO: 22331772 NR Description: putative protein
MTRVQLRPPFLDTNSFLTQDLDDFLLNEFAALSAAAGASDDDEDVEDEDGGLAGGEGSGEARRRRMLAREEAKLEKEIVRMVLAGEAEDKLKPNSGQSVAVGDHHLCVGFHDDASGEYRIWEWHGHVMLFDDEEGYSAEYIYGNHFEPLAAATARAKKKEKEMREKELSMGLRDLVVDTDDGGNANRSKENGSSGGPRVVRRNVVNGPTTPAR

SEQ ID NO: 20158 - DNA, 975 bp, Zea mays subsp. mays
  misc_feature (1)..(975): Ceres Seq. ID no. 14305221
  misc_feature: MA Experiment ID: 108522 Result: Down-regulated in Transcription
  misc_feature: MA Experiment 108522 PARAMETER Experiment Name: Zm_42deg_Heat_P Parameter: Age (day) Value: 8
  misc_feature: MA Experiment 108522 PARAMETER Experiment Name: Zm_42deg_Heat_P Parameter: Organism Value: Zea mays
  misc_feature: MA Experiment 108522 PARAMETER Experiment Name: Zm_42deg_Heat_P Parameter: Plant Line Value: 35A19
  misc_feature: MA Experiment 108522 PARAMETER Experiment Name: Zm_42deg_Heat_P Parameter: Temperature (deg C) Value: 42 vs. 22
  misc_feature: MA Experiment 108522 PARAMETER Experiment Name: Zm_42deg_Heat_P Parameter: Timepoint (hr) Value: 1
  misc_feature: MA Experiment 108522 PARAMETER Experiment Name: Zm_42deg_Heat_P Parameter: Tissue Value: Aerial
  misc_feature: MA Experiment ID: 108523 Result: Down-regulated in Transcription
  misc_feature: MA Experiment 108523 PARAMETER Experiment Name: Zm_42deg_Heat_P Parameter: Age (day) Value: 8
  misc_feature: MA Experiment 108523 PARAMETER Experiment Name: Zm_42deg_Heat_P Parameter: Organism Value: Zea mays
  misc_feature: MA Experiment 108523 PARAMETER Experiment Name: Zm_42deg_Heat_P Parameter: Plant Line Value: 35A19
  misc_feature: MA Experiment 108523 PARAMETER Experiment Name: Zm_42deg_Heat_P Parameter: Temperature (deg C) Value: 42 vs. 22
  misc_feature: MA Experiment 108523 PARAMETER Experiment Name: Zm_42deg_Heat_P Parameter: Timepoint (hr) Value: 6
  misc_feature: MA Experiment 108523 PARAMETER Experiment Name: Zm_42deg_Heat_P Parameter: Tissue Value: Aerial
  misc_feature: MA Experiment ID: 108527 Result: Down-regulated in Transcription
  misc_feature: MA Experiment 108527 PARAMETER Experiment Name: Zm_5mM_NO_P Parameter: Age (day) Value: 8
  misc_feature: MA Experiment 108527 PARAMETER Experiment Name: Zm_5mM_NO_P Parameter: Organism Value: Zea mays
  misc_feature: MA Experiment 108527 PARAMETER Experiment Name: Zm_5mM_NO_P Parameter: Plant Line Value: 35A19
  misc_feature: MA Experiment 108527 PARAMETER Experiment Name: Zm_5mM_NO_P Parameter: Timepoint (hr) Value: 6
  misc_feature: MA Experiment 108527 PARAMETER Experiment Name: Zm_5mM_NO_P Parameter: Tissue Value: Aerial
  misc_feature: MA Experiment 108527 PARAMETER Experiment Name: Zm_5mM_NO_P Parameter: Treatment Value: 5mM NO vs. No Treatment
  misc_feature: MA Experiment ID: 108529 Result: Up-regulated in Transcription
  misc_feature: MA Experiment 108529 PARAMETER Experiment Name: Zm_Imbibed_Seeds_P Parameter: Age (day) Value: 5 vs. 2
  misc_feature: MA Experiment 108529 PARAMETER Experiment Name: Zm_Imbibed_Seeds_P Parameter: Organism Value: Zea mays
  misc_feature: MA Experiment 108529 PARAMETER Experiment Name: Zm_Imbibed_Seeds_P Parameter: Plant Line Value: 35A19
  misc_feature: MA Experiment 108529 PARAMETER Experiment Name: Zm_Imbibed_Seeds_P Parameter: Tissue Value: Roots vs. Embryo
  misc_feature: MA Experiment ID: 108535 Result: Down-regulated in Transcription
  misc_feature: MA Experiment 108535 PARAMETER Experiment Name: Zm_Meristem_P Parameter: Age (day) Value: 8
  misc_feature: MA Experiment 108535 PARAMETER Experiment Name: Zm_Meristem_P Parameter: Organism Value: Zea mays
  misc_feature: MA Experiment 108535 PARAMETER Experiment Name: Zm_Meristem_P Parameter: Plant Line Value: 35A19
  misc_feature: MA Experiment 108535 PARAMETER Experiment Name: Zm_Meristem_P Parameter: Tissue Value: Root Meristem vs. Above Root Meristem
  misc_feature: MA Experiment ID: 108536 Result: Down-regulated in Transcription
  misc_feature: MA Experiment 108536 PARAMETER Experiment Name: Zm_Meristem_P Parameter: Age (day) Value: 8
  misc_feature: MA Experiment 108536 PARAMETER Experiment Name: Zm_Meristem_P Parameter: Organism Value: Zea mays
  misc_feature: MA Experiment 108536 PARAMETER Experiment Name: Zm_Meristem_P Parameter: Plant Line Value: 35A19
  misc_feature: MA Experiment 108536 PARAMETER Experiment Name: Zm_Meristem_P Parameter: Tissue Value: Shoot Meristem vs. Above Shoot Meristem
  misc_feature: MA Experiment ID: 108543 Result: Up-regulated in Transcription
  misc_feature: MA Experiment ID: 108545 Result: Down-regulated in Transcription
  misc_feature: MA Experiment 108545 PARAMETER Experiment Name: Zm_Imbibed_Seeds_P Parameter: Age (day) Value: 3 vs. 2
  misc_feature: MA Experiment 108545 PARAMETER Experiment Name: Zm_Imbibed_Seeds_P Parameter: Organism Value: Zea mays
  misc_feature: MA Experiment 108545 PARAMETER Experiment Name: Zm_Imbibed_Seeds_P Parameter: Plant Line Value: 35A19
  misc_feature: MA Experiment 108545 PARAMETER Experiment Name: Zm_Imbibed_Seeds_P Parameter: Tissue Value: Aerial vs. Embryo
  misc_feature: MA Experiment ID: 108546 Result: Up-regulated in Transcription
  misc_feature: MA Experiment 108546 PARAMETER Experiment Name: Zm_Imbibed_Seeds_P Parameter: Age (day) Value: 3 vs. 2
  misc_feature: MA Experiment 108546 PARAMETER Experiment Name: Zm_Imbibed_Seeds_P Parameter: Organism Value: Zea mays
  misc_feature: MA Experiment 108546 PARAMETER Experiment Name: Zm_Imbibed_Seeds_P Parameter: Plant Line Value: 35A19
  misc_feature: MA Experiment 108546 PARAMETER Experiment Name: Zm_Imbibed_Seeds_P Parameter: Tissue Value: Roots vs. Embryo
  misc_feature: MA Experiment ID: 108556 Result: Down-regulated in Transcription
  misc_feature: MA Experiment 108556 PARAMETER Experiment Name: Zm_Drought_P Parameter: Age (day) Value: 9
  misc_feature: MA Experiment 108556 PARAMETER Experiment Name: Zm_Drought_P Parameter: Organism Value: Zea mays
  misc_feature: MA Experiment 108556 PARAMETER Experiment Name: Zm_Drought_P Parameter: Plant Line Value: 35A19
  misc_feature: MA Experiment 108556 PARAMETER Experiment Name: Zm_Drought_P Parameter: Timepoint (hr) Value: 24
  misc_feature: MA Experiment 108556 PARAMETER Experiment Name: Zm_Drought_P Parameter: Tissue Value: Aerial
  misc_feature: MA Experiment 108556 PARAMETER Experiment Name: Zm_Drought_P Parameter: Treatment Value: Drought vs. No Drought
  misc_feature: MA Experiment ID: 108599 Result: Down-regulated in Transcription
  misc_feature: MA Experiment 108599 PARAMETER Experiment Name: Zm_RT1_P Parameter: Age (day) Value: 11
  misc_feature: MA Experiment 108599 PARAMETER Experiment Name: Zm_RT1_P Parameter: Organism Value: Zea mays
  misc_feature: MA Experiment 108599 PARAMETER Experiment Name: Zm_RT1_P Parameter: Plant Line Value: rt1 mut vs. rt1 wt
  misc_feature: MA Experiment 108599 PARAMETER Experiment Name: Zm_RT1_P Parameter: Tissue Value: Roots
  misc_feature: MA Experiment ID: 108687 Result: Down-regulated in Transcription
  misc_feature: MA Experiment 108687 PARAMETER Experiment Name: Zm_Embryos-Flowers__P Parameter: Tissue Value: Embryo vs. Aerial+
  misc_feature: MA Experiment ID: 108688 Result: Down-regulated in Transcription
  misc_feature: MA Experiment 108688 PARAMETER Experiment Name: Zm_Embryos-Flowers__P Parameter: Tissue Value: Immature Flowers vs. Aerial+
  misc_feature: MA Experiment ID: 108689 Result: Up-regulated in Transcription
  misc_feature: MA Experiment 108689 PARAMETER Experiment Name: Zm_Drought_Roots_P Parameter: Age (day) Value: 9
  misc_feature: MA Experiment 108689 PARAMETER Experiment Name: Zm_Drought_Roots_P Parameter: Organism Value: Zea mays
  misc_feature: MA Experiment 108689 PARAMETER Experiment Name: Zm_Drought_Roots_P Parameter: Plant Line Value: 35A19
  misc_feature: MA Experiment 108689 PARAMETER Experiment Name: Zm_Drought_Roots_P Parameter: Timepoint (hr) Value: 24
  misc_feature: MA Experiment 108689 PARAMETER Experiment Name: Zm_Drought_Roots_P Parameter: Tissue Value: Roots
  misc_feature: MA Experiment 108689 PARAMETER Experiment Name: Zm_Drought_Roots_P Parameter: Treatment Value: Drought vs. No Drought
  misc_feature: MA Experiment ID: 20000477 Result: Down-regulated in Transcription
  misc_feature: MA Experiment 20000477 PARAMETER Experiment Name: Zm_5mM_SA_P Parameter: Age (day) Value: 10
  misc_feature: MA Experiment 20000477 PARAMETER Experiment Name: Zm_5mM_SA_P Parameter: Organism Value: Zea mays
  misc_feature: MA Experiment 20000477 PARAMETER Experiment Name: Zm_5mM_SA_P Parameter: Plant Line Value: 35A19
  misc_feature: MA Experiment 20000477 PARAMETER Experiment Name: Zm_5mM_SA_P Parameter: Timepoint (hr) Value: 48
  misc_feature: MA Experiment 20000477 PARAMETER Experiment Name: Zm_5mM_SA_P Parameter: Tissue Value: Aerial
  misc_feature: MA Experiment 20000477 PARAMETER Experiment Name: Zm_5mM_SA_P Parameter: Treatment Value: 5mM SA vs. No Treatment
  misc_feature: MA Experiment ID: 20000478 Result: Down-regulated in Transcription
  misc_feature: MA Experiment 20000478 PARAMETER Experiment Name: Zm_5mM_SA_P Parameter: Age (day) Value: 11
  misc_feature: MA Experiment 20000478 PARAMETER Experiment Name: Zm_5mM_SA_P Parameter: Organism Value: Zea mays
  misc_feature: MA Experiment 20000478 PARAMETER Experiment Name: Zm_5mM_SA_P Parameter: Plant Line Value: 35A19
  misc_feature: MA Experiment 20000478 PARAMETER Experiment Name: Zm_5mM_SA_P Parameter: Timepoint (hr) Value: 72
  misc_feature: MA Experiment 20000478 PARAMETER Experiment Name: Zm_5mM_SA_P Parameter: Tissue Value: Aerial
  misc_feature: MA Experiment 20000478 PARAMETER Experiment Name: Zm_5mM_SA_P Parameter: Treatment Value: 5mM SA vs. No Treatment
  misc_feature: MA Experiment ID: 20000479 Result: Down-regulated in Transcription
  misc_feature: MA Experiment 20000479 PARAMETER Experiment Name: Zm_Drought_P Parameter: Age (day) Value: 10
  misc_feature: MA Experiment 20000479 PARAMETER Experiment Name: Zm_Drought_P Parameter: Organism Value: Zea mays
  misc_feature: MA Experiment 20000479 PARAMETER Experiment Name: Zm_Drought_P Parameter: Plant Line Value: 35A19
  misc_feature: MA Experiment 20000479 PARAMETER Experiment Name: Zm_Drought_P Parameter: Timepoint (hr) Value: 48
  misc_feature: MA Experiment 20000479 PARAMETER Experiment Name: Zm_Drought_P Parameter: Tissue Value: Aerial
  misc_feature: MA Experiment 20000479 PARAMETER Experiment Name: Zm_Drought_P Parameter: Treatment Value: Drought vs. No Drought
  misc_feature: MA Experiment ID: 20000533 Result: Down-regulated in Transcription
  misc_feature: MA Experiment 20000533 PARAMETER Experiment Name: Zm_0.001percent_MeJA_P Parameter: Age (day) Value: 11
  misc_feature: MA Experiment 20000533 PARAMETER Experiment Name: Zm_0.001percent_MeJA_P Parameter: Organism Value: Zea mays
  misc_feature: MA Experiment 20000533 PARAMETER Experiment Name: Zm_0.001percent_MeJA_P Parameter: Plant Line Value: 35A19
  misc_feature: MA Experiment 20000533 PARAMETER Experiment Name: Zm_0.001percent_MeJA_P Parameter: Timepoint (hr) Value: 72
  misc_feature: MA Experiment 20000533 PARAMETER Experiment Name: Zm_0.001percent_MeJA_P Parameter: Tissue Value: Aerial
  misc_feature: MA Experiment 20000533 PARAMETER Experiment Name: Zm_0.001percent_MeJA_P Parameter: Treatment Value: 0.001percent MeJA vs. No Treatment
  misc_feature: MA Experiment ID: 20000534 Result: Down-regulated in Transcription
  misc_feature: MA Experiment 20000534 PARAMETER Experiment Name: Zm_Hybrid_Pollen_P Parameter: Age (day) Value: 8
  misc_feature: MA Experiment 20000534 PARAMETER Experiment Name: Zm_Hybrid_Pollen_P Parameter: Organism Value: Zea mays
  misc_feature: MA Experiment 20000534 PARAMETER Experiment Name: Zm_Hybrid_Pollen_P Parameter: Plant Line Value: 35A19
  misc_feature: MA Experiment 20000534 PARAMETER Experiment Name: Zm_Hybrid_Pollen_P Parameter: Tissue Value: Pollen vs. Aerial
  misc_feature: MA Experiment ID: 20000535 Result: Down-regulated in Transcription
  misc_feature: MA Experiment 20000535 PARAMETER Experiment Name: Zm_Hybrid_Seed_Dev_P Parameter: DAP Value: 30 vs. 12
  misc_feature: MA Experiment 20000535 PARAMETER Experiment Name: Zm_Hybrid_Seed_Dev_P Parameter: Organism Value: Zea mays
  misc_feature: MA Experiment 20000535 PARAMETER Experiment Name: Zm_Hybrid_Seed_Dev_P Parameter: Plant Line Value: 35A19
  misc_feature: MA Experiment 20000535 PARAMETER Experiment Name: Zm_Hybrid_Seed_Dev_P Parameter: Tissue Value: Embryo vs. Unfert Floret
  misc_feature: MA Experiment ID: 20000626 Result: Down-regulated in Transcription
  misc_feature: MA Experiment 20000626 PARAMETER Experiment Name: Zm_Herbicide-Treatments_P Parameter: Timepoint (hr) Value: 12
  misc_feature: MA Experiment 20000626 PARAMETER Experiment Name: Zm_Herbicide-Treatments_P Parameter: Tissue Value: Aerial
  misc_feature: MA Experiment 20000626 PARAMETER Experiment Name: Zm_Herbicide-Treatments_P Parameter: Treatment Value: Roundup vs. No Treatment
ataaaggggcattggcttgggatcacctctgcatctcgcctgggatctgctagcttgatctctcctagtcctagcccattcgcttctcctgttcgtcgctcttaatttgcttgctcgatccctggcagtggcagctgctgcaatggcttccggtggcgcgtcgtcactggccttggccgcgctgctcctcgtgagctgcgcctcggcggcggtggcgaccaagtacaccgtcggggacgcgtccggctggacgaccaccggcgactacgccacctgggccagcggcaagaagttcaaagtcggcgacagtctcgagttcaaatacgccggcggggcgcacacggtggacgaggtgagcgcggcggactacgccgcctgctcctccagcaacgcgctcagcaccgacagcgccggcgccacgaccgtgaccctcaagacggccggcaagcactacttcatctgcggcgtggcgggccattgcagcagcggcatgaagctcgcggtggacgtggccaaggcggtgaccgccccggcgccggccccagccgcggccccggccccggccgcggacacagccccagatgcccccgacaccacgccgtcgaccccgacgtccccctcgagctccggcggccgcacgcccaagagcccagacacgacggtcctgtcgccgccggacaagaagtccacctcctccggcgccaccgggctcagcgccgcggcgtgggccggcttgggcctggccgggctcgtggccgtgcacctcggcgcgttctaggccagcccgctggcctggccagggaggagacagtgccgtgtgttgttgttaggctgcacgtcatggattggattggtgtattggttgagggacttgactgcttaccagagagagatctcttttggttcagggaactgtgctgtagacctgtagttggataccttggatgttatgctatcagttttgctgttgttatc

SEQ ID NO: 20159 - protein, 211 aa, Zea mays subsp. mays
  peptide (1)..(211): Ceres Seq. ID no. 14305222
  misc_feature (36)..(117): Pfam Name: Plastocyanin-like domain Pfam Description: Plastocyanin-like domain
  misc_feature (11)..(203): Homolog of NCBI NO: 34915492 NR Description: contains ESTs
  misc_feature (9)..(165): Homolog of NCBI NO: 38636761 NR Description: putative blue copper binding protein
  misc_feature (1)..(200): Homolog of NCBI NO: 25453521 NR Description: blue copper-binding protein II [imported] -
  misc_feature (11)..(166): Homolog of NCBI NO: 38346158 NR Description: OSJNBa0079A21.5 [Oryza sativa (japonica
  misc_feature (7)..(186): Homolog of NCBI NO: 15232289 NR Description: uclacyanin 3 [Arabidopsis thaliana]
  misc_feature (1)..(200): Homolog of NCBI NO: 25453522 NR Description: blue copper-binding protein II [imported] -
  misc_feature (1)..(200): Homolog of NCBI NO: 15224960 NR Description: uclacyanin II [Arabidopsis thaliana]
  misc_feature (1)..(200): Homolog of NCBI NO: 21554060 NR Description: phytocyanin [Arabidopsis thaliana]
  misc_feature (5)..(206): Homolog of NCBI NO: 14140127 NR Description: uclacyanin 3-like protein [Oryza sativa]
  misc_feature (6)..(170): Homolog of NCBI NO: 2493318 NR Description: Blue copper protein precursor
MASGGASSLALAALLLVSCASAAVATKYTVGDASGWTTTGDYATWASGKKFKVGDSLEFKYAGGAHTVDEVSAADYAACSSSNALSTDSAGATTVTLKTAGKHYFICGVAGHCSSGMKLAVDVAKAVTAPAPAPAAAPAPAADTAPDAPDTTPSTPTSPSSSGGRTPKSPDTTVLSPPDKKSTSSGATGLSAAAWAGLGLAGLVAVHLGAF

SEQ ID NO: 20160 - DNA, 488 bp, Zea mays subsp. mays
  misc_feature (1)..(488): Ceres Seq. ID no. 2789959
  misc_feature: MA Experiment ID: 108689 Result: Up-regulated in Transcription
  misc_feature: MA Experiment 108689 PARAMETER Experiment Name: Zm_Drought_Roots_P Parameter: Age (day) Value: 9
  misc_feature: MA Experiment 108689 PARAMETER Experiment Name: Zm_Drought_Roots_P Parameter: Organism Value: Zea mays
  misc_feature: MA Experiment 108689 PARAMETER Experiment Name: Zm_Drought_Roots_P Parameter: Plant Line Value: 35A19
  misc_feature: MA Experiment 108689 PARAMETER Experiment Name: Zm_Drought_Roots_P Parameter: Timepoint (hr) Value: 24
  misc_feature: MA Experiment 108689 PARAMETER Experiment Name: Zm_Drought_Roots_P Parameter: Tissue Value: Roots
  misc_feature: MA Experiment 108689 PARAMETER Experiment Name: Zm_Drought_Roots_P Parameter: Treatment Value: Drought vs. No Drought
  misc_feature: MA Experiment ID: 20000534 Result: Up-regulated in Transcription
  misc_feature: MA Experiment 20000534 PARAMETER Experiment Name: Zm_Hybrid_Pollen_P Parameter: Age (day) Value: 8
  misc_feature: MA Experiment 20000534 PARAMETER Experiment Name: Zm_Hybrid_Pollen_P Parameter: Organism Value: Zea mays
  misc_feature: MA Experiment 20000534 PARAMETER Experiment Name: Zm_Hybrid_Pollen_P Parameter: Plant Line Value: 35A19
  misc_feature: MA Experiment 20000534 PARAMETER Experiment Name: Zm_Hybrid_Pollen_P Parameter: Tissue Value: Pollen vs. Aerial
acgggcacgaccatctcctacacccgcgggcaaaagttccctgtcccccgtacacattccaccccaaaatggcactcgcgccatcacccccagcgctgccgcccaacccggcgctccctttgccgtggtgggggcgggccggccgcggtgcgctcgtccgcgcccgcgcccgcgccgtccgcgcggcgctacggccccgagccagtggtccgtcgggagctggcggggccgcccggcgcagcagcwgcccgagtacccggacaaggcggacctggaagacgtgctgcggacggtgggaacgttcccgcccatcgtcttcgccggcgaggcgcgcaccctcgaggagcgcctcgcggaggccgccgtcggccgggccttcctcctccagggcggcgactgcgccgagagcttcaaggagttcaacgccaacaacatcagggacacttccgcgtcctcctgcaaatgtccgttgtgctcatgttcggagg

SEQ ID NO: 20161 - protein, 162 aa, Zea mays subsp. mays
  peptide (1)..(162): Ceres Seq. ID no. 2789960
  misc_feature (68)..(148): Pfam Name: Class-II DAHP synthetase family Pfam Description: Class-II DAHP synthetase family
  misc_feature (57)..(148): Homolog of NCBI NO: 166690 NR Description: 3-deoxy-D-arabino-heptulosonate 7-phosphate
  misc_feature (54)..(148): Homolog of NCBI NO: 2398681 NR Description: 3-deoxy-D-arabino-heptulosonate 7-phosphate
  misc_feature (67)..(148): Homolog of NCBI NO: 114193 NR Description: Phospho-2-dehydro-3-deoxyheptonate aldolase 1, precursor (Phospho-2-keto-3-deoxyheptonate aldolase 1) (DAHP
  misc_feature (20)..(148): Homolog of NCBI NO: 2398679 NR Description: 3-deoxy-D-arabino-heptulosonate 7-phosphate
  misc_feature (2)..(148): Homolog of NCBI NO: 34906844 NR Description: putative phospho-2-dehydro-3-deoxyheptonate
  misc_feature (60)..(148): Homolog of NCBI NO: 24745903 NR Description: 3-deoxy-D-arabino-heptulosonate 7-phosphate
  misc_feature (60)..(148): Homolog of NCBI NO: 584777 NR Description: Phospho-2-dehydro-3-deoxyheptonate aldolase 1, precursor (Phospho-2-keto-3-deoxyheptonate aldolase 1) (DAHP
  misc_feature (60)..(148): Homolog of NCBI NO: 100437 NR Description: cystathionine gamma-lyase (EC 4.4.1.1) - potato
  misc_feature (32)..(148): Homolog of NCBI NO: 37536912 NR Description: putative 3-deoxy-D-arabino-heptulosonate
  misc_feature (60)..(148): Homolog of NCBI NO: 584778 NR Description: Phospho-2-dehydro-3-deoxyheptonate aldolase 2, precursor (Phospho-2-keto-3-deoxyheptonate aldolase 2) (DAHP
  misc_feature (82)..(82): Xaa is any aa, unknown or other
RARPSPTPAGKSSLSPVHIPPQNGTRAITPSAAAQPGAPFAVVGAGRPRCARPRPRPRRPRGATAPSQWSVGSWRGRPAQQXPEYPDKADLEDVLRTVGTFPPIVFAGEARTLEERLAEAAVGRAFLLQGGDCAESFKEFNANNIRDTSASSCKCPLCSCSE

SEQ ID NO: 20162 - protein, 162 aa, Zea mays subsp. mays
  peptide (1)..(162): Ceres Seq. ID no. 2789961
  misc_feature (48)..(151): Pfam Name: Cupin Pfam Description: Cupin
  misc_feature (8)..(149): Homolog of NCBI NO: 31204361 NR Description: ENSANGP00000004749 [Anopheles gambiae]
  misc_feature (82)..(82): Xaa is any aa, unknown or other
GHDHLLHPRAKVPCPPYTFHPKMALAPSPPALPPNPALPLPWWGRAGRGALVRARARAVRAALRPRASGPSGAGGAARRSSXPSTRTRRTWKTCCGRWERSRPSSSPARRAPSRSASRRPPSAGPSSSRAATAPRASRSSTPTTSGTLPRPPANVRCAHVRR

SEQ ID NO: 20163 - protein, 162 aa, Zea mays subsp. mays
  peptide (1)..(162): Ceres Seq. ID no. 2789962
  misc_feature (82)..(82): Xaa is any aa, unknown or other
TGTTISYTRGQKFPVPRTHSTPKWHSRHHPQRCRPTRRSLCRGGGGPAAVRSSAPAPAPSARRYGPEPVVRRELAGPPGAAXARVPGQGGPGRRAADGGNVPAHRLRRRGAHPRGAPRGGRRRPGLPPPGRRLRRELQGVQRQQHQGHFRVLLQMSVVLMFG

SEQ ID NO: 20164 - DNA, 931 bp, Zea mays subsp. mays; identical to SEQ ID NO: 16713
  misc_feature (1)..(931): Ceres Seq. ID no. 12354601
  misc_feature: MA Experiment ID: 108527 Result: Down-regulated in Transcription
  misc_feature: MA Experiment 108527 PARAMETER Experiment Name: Zm_5mM_NO_P Parameter: Age (day) Value: 8
  misc_feature: MA Experiment 108527 PARAMETER Experiment Name: Zm_5mM_NO_P Parameter: Organism Value: Zea mays
  misc_feature: MA Experiment 108527 PARAMETER Experiment Name: Zm_5mM_NO_P Parameter: Plant Line Value: 35A19
  misc_feature: MA Experiment 108527 PARAMETER Experiment Name: Zm_5mM_NO_P Parameter: Timepoint (hr) Value: 6
  misc_feature: MA Experiment 108527 PARAMETER Experiment Name: Zm_5mM_NO_P Parameter: Tissue Value: Aerial
  misc_feature: MA Experiment 108527 PARAMETER Experiment Name: Zm_5mM_NO_P Parameter: Treatment Value: 5mM NO vs. No Treatment
  misc_feature: MA Experiment ID: 108530 Result: Up-regulated in Transcription
  misc_feature: MA Experiment 108530 PARAMETER Experiment Name: Zm_Imbibed_Seeds_P Parameter: Age (day) Value: 6 vs. 2
  misc_feature: MA Experiment 108530 PARAMETER Experiment Name: Zm_Imbibed_Seeds_P Parameter: Organism Value: Zea mays
  misc_feature: MA Experiment 108530 PARAMETER Experiment Name: Zm_Imbibed_Seeds_P Parameter: Plant Line Value: 35A19
  misc_feature: MA Experiment 108530 PARAMETER Experiment Name: Zm_Imbibed_Seeds_P Parameter: Tissue Value: Aerial vs. Embryo

SEQ ID NO: 20165 - protein, 310 aa, Zea mays subsp. mays; identical to SEQ ID NO: 16714
  peptide (1)..(310): Ceres Seq. ID no. 12354602
  misc_feature (51)..(303): Homolog of NCBI NO: 34909024 NR Description: cytochrome P450-like protein
  misc_feature (26)..(309): Homolog of NCBI NO: 18000070 NR Description: cytochrome P450-dependent fatty acid hydroxylase
  misc_feature (16)..(309): Homolog of NCBI NO: 18000068 NR Description: cytochrome P450-dependent fatty acid hydroxylase
  misc_feature (51)..(308): Homolog of NCBI NO: 34909018 NR Description: cytochrome P450-like protein
  misc_feature (51)..(308): Homolog of NCBI NO: 34909016 NR Description: cytochrome P450-like protein
  misc_feature (23)..(308): Homolog of NCBI NO: 34909030 NR Description: cytochrome P450-like protein
  misc_feature (11)..(308): Homolog of NCBI NO: 34909022 NR Description: cytochrome P450-like protein
  misc_feature (51)..(306): Homolog of NCBI NO: 15218671 NR Description: cytochrome p450, putative; protein id:
  misc_feature (51)..(306): Homolog of NCBI NO: 15228981 NR Description: cytochrome P450, putative; protein id:
  misc_feature (12)..(309): Homolog of NCBI NO: 34902476 NR Description: Putative cytochrome P450 [Oryza sativa (japonica
  misc_feature (51)..(303): Homolog of NCBI NO: 34909024 NR Description: cytochrome P450-like protein
  misc_feature (26)..(309): Homolog of NCBI NO: 18000070 NR Description: cytochrome P450-dependent fatty acid hydroxylase
  misc_feature (16)..(309): Homolog of NCBI NO: 18000068 NR Description: cytochrome P450-dependent fatty acid hydroxylase
  misc_feature (51)..(308): Homolog of NCBI NO: 34909018 NR Description: cytochrome P450-like protein
  misc_feature (51)..(308): Homolog of NCBI NO: 34909016 NR Description: cytochrome P450-like protein
  misc_feature (23)..(308): Homolog of NCBI NO: 34909030 NR Description: cytochrome P450-like protein
  misc_feature (11)..(308): Homolog of NCBI NO: 34909022 NR Description: cytochrome P450-like protein
  misc_feature (51)..(306): Homolog of NCBI NO: 15218671 NR Description: cytochrome p450, putative; protein id:
  misc_feature (51)..(306): Homolog of NCBI NO: 15228981 NR Description: cytochrome P450, putative; protein id:
  misc_feature (12)..(309): Homolog of NCBI NO: 34902476 NR Description: Putative cytochrome P450 [Oryza sativa (japonica

SEQ ID NO: 20166 - protein, 299 aa, Zea mays subsp. mays; identical to SEQ ID NO: 16715
  peptide (1)..(299): Ceres Seq. ID no. 12354603
  misc_feature (40)..(292): Homolog of NCBI NO: 34909024 NR Description: cytochrome P450-like protein
  misc_feature (15)..(298): Homolog of NCBI NO: 18000070 NR Description: cytochrome P450-dependent fatty acid hydroxylase
  misc_feature (5)..(298): Homolog of NCBI NO: 18000068 NR Description: cytochrome P450-dependent fatty acid hydroxylase
  misc_feature (40)..(297): Homolog of NCBI NO: 34909018 NR Description: cytochrome P450-like protein
  misc_feature (40)..(297): Homolog of NCBI NO: 34909016 NR Description: cytochrome P450-like protein
  misc_feature (12)..(297): Homolog of NCBI NO: 34909030 NR Description: cytochrome P450-like protein
  misc_feature (1)..(297): Homolog of NCBI NO: 34909022 NR Description: cytochrome P450-like protein
  misc_feature (40)..(295): Homolog of NCBI NO: 15218671 NR Description: cytochrome p450, putative; protein id:
  misc_feature (40)..(295): Homolog of NCBI NO: 15228981 NR Description: cytochrome P450, putative; protein id:
  misc_feature (1)..(298): Homolog of NCBI NO: 34902476 NR Description: Putative cytochrome P450 [Oryza sativa (japonica
  misc_feature (40)..(292): Homolog of NCBI NO: 34909024 NR Description: cytochrome P450-like protein
  misc_feature (15)..(298): Homolog of NCBI NO: 18000070 NR Description: cytochrome P450-dependent fatty acid hydroxylase
  misc_feature (5)..(298): Homolog of NCBI NO: 18000068 NR Description: cytochrome P450-dependent fatty acid hydroxylase
  misc_feature (40)..(297): Homolog of NCBI NO: 34909018 NR Description: cytochrome P450-like protein
  misc_feature (40)..(297): Homolog of NCBI NO: 34909016 NR Description: cytochrome P450-like protein
  misc_feature (12)..(297): Homolog of NCBI NO: 34909030 NR Description: cytochrome P450-like protein
  misc_feature (1)..(297): Homolog of NCBI NO: 34909022 NR Description: cytochrome P450-like protein
  misc_feature (40)..(295): Homolog of NCBI NO: 15218671 NR Description: cytochrome p450, putative; protein id:
  misc_feature (40)..(295): Homolog of NCBI NO: 15228981 NR Description: cytochrome P450, putative; protein id:
  misc_feature (1)..(298): Homolog of NCBI NO: 34902476 NR Description: Putative cytochrome P450 [Oryza sativa (japonica

SEQ ID NO: 20167 - protein, 236 aa, Zea mays subsp. mays; identical to SEQ ID NO: 16716
  peptide (1)..(236): Ceres Seq. ID no. 12354604
  misc_feature (1)..(229): Homolog of NCBI NO: 34909024 NR Description: cytochrome P450-like protein
  misc_feature (1)..(235): Homolog of NCBI NO: 18000070 NR Description: cytochrome P450-dependent fatty acid hydroxylase
  misc_feature (1)..(235): Homolog of NCBI NO: 18000068 NR Description: cytochrome P450-dependent fatty acid hydroxylase
  misc_feature (1)..(234): Homolog of NCBI NO: 34909018 NR Description: cytochrome P450-like protein
  misc_feature (1)..(234): Homolog of NCBI NO: 34909016 NR Description: cytochrome P450-like protein
  misc_feature (1)..(234): Homolog of NCBI NO: 34909030 NR Description: cytochrome P450-like protein
  misc_feature (1)..(234): Homolog of NCBI NO: 34909022 NR Description: cytochrome P450-like protein
  misc_feature (1)..(232): Homolog of NCBI NO: 15218671 NR Description: cytochrome p450, putative; protein id:
  misc_feature (1)..(232): Homolog of NCBI NO: 15228981 NR Description: cytochrome P450, putative; protein id:
  misc_feature (1)..(235): Homolog of NCBI NO: 34902476 NR Description: Putative cytochrome P450 [Oryza sativa (japonica
  misc_feature (1)..(229): Homolog of NCBI NO: 34909024 NR Description: cytochrome P450-like protein
  misc_feature (1)..(235): Homolog of NCBI NO: 18000070 NR Description: cytochrome P450-dependent fatty acid hydroxylase
  misc_feature (1)..(235): Homolog of NCBI NO: 18000068 NR Description: cytochrome P450-dependent fatty acid hydroxylase
  misc_feature (1)..(234): Homolog of NCBI NO: 34909018 NR Description: cytochrome P450-like protein
  misc_feature (1)..(234): Homolog of NCBI NO: 34909016 NR Description: cytochrome P450-like protein
  misc_feature (1)..(234): Homolog of NCBI NO: 34909030 NR Description: cytochrome P450-like protein
  misc_feature (1)..(234): Homolog of NCBI NO: 34909022 NR Description: cytochrome P450-like protein
  misc_feature (1)..(232): Homolog of NCBI NO: 15218671 NR Description: cytochrome p450, putative; protein id:
  misc_feature (1)..(232): Homolog of NCBI NO: 15228981 NR Description: cytochrome P450, putative; protein id:
  misc_feature (1)..(235): Homolog of NCBI NO: 34902476 NR Description: Putative cytochrome P450 [Oryza sativa (japonica

SEQ ID NO: 20168 - DNA, 1239 bp, Zea mays subsp. mays; identical to SEQ ID NO: 12588
  misc_feature (1)..(1239): Ceres Seq. ID no. 12364583
  misc_feature: MA Experiment ID: 108527 Result: Up-regulated in Transcription
  misc_feature: MA Experiment 108527 PARAMETER Experiment Name: Zm_5mM_NO_P Parameter: Age (day) Value: 8
  misc_feature: MA Experiment 108527 PARAMETER Experiment Name: Zm_5mM_NO_P Parameter: Organism Value: Zea mays
  misc_feature: MA Experiment 108527 PARAMETER Experiment Name: Zm_5mM_NO_P Parameter: Plant Line Value: 35A19
  misc_feature: MA Experiment 108527 PARAMETER Experiment Name: Zm_5mM_NO_P Parameter: Timepoint (hr) Value: 6
  misc_feature: MA Experiment 108527 PARAMETER Experiment Name: Zm_5mM_NO_P Parameter: Tissue Value: Aerial
  misc_feature: MA Experiment 108527 PARAMETER Experiment Name: Zm_5mM_NO_P Parameter: Treatment Value: 5mM NO vs. No Treatment
  misc_feature: MA Experiment ID: 108543 Result: Up-regulated in Transcription
  misc_feature: MA Experiment ID: 108544 Result: Up-regulated in Transcription
  misc_feature: MA Experiment ID: 20000478 Result: Up-regulated in Transcription
  misc_feature: MA Experiment 20000478 PARAMETER Experiment Name: Zm_5mM_SA_P Parameter: Age (day) Value: 11
  misc_feature: MA Experiment 20000478 PARAMETER Experiment Name: Zm_5mM_SA_P Parameter: Organism Value: Zea mays
  misc_feature: MA Experiment 20000478 PARAMETER Experiment Name: Zm_5mM_SA_P Parameter: Plant Line Value: 35A19
  misc_feature: MA Experiment 20000478 PARAMETER Experiment Name: Zm_5mM_SA_P Parameter: Timepoint (hr) Value: 72
  misc_feature: MA Experiment 20000478 PARAMETER Experiment Name: Zm_5mM_SA_P Parameter: Tissue Value: Aerial
  misc_feature: MA Experiment 20000478 PARAMETER Experiment Name: Zm_5mM_SA_P Parameter: Treatment Value: 5mM SA vs. No Treatment

SEQ ID NO: 20169 - protein, 130 aa, Zea mays subsp. mays; identical to SEQ ID NO: 12589
  peptide (1)..(130): Ceres Seq. ID no. 12364584
  misc_feature (1)..(90): Pfam Name: Ras family Pfam Description: Ras family
  misc_feature (1)..(130): Homolog of NCBI NO: 38175435 NR Description: putative ras-related protein [Oryza sativa
  misc_feature (1)..(130): Homolog of NCBI NO: 18447917 NR Description: ras-related protein RAB8-3 [Nicotiana tabacum]
  misc_feature (1)..(130): Homolog of NCBI NO: 15231322 NR Description: GTP-binding protein ara-3; protein id: supported by cDNA: gi_14334917, supported by cDNA: gi_14596014,
  misc_feature (1)..(130): Homolog of NCBI NO: 1370190 NR Description: RAB8A [Lotus japonicus]
  misc_feature (1)..(130): Homolog of NCBI NO: 18447921 NR Description: ras-related protein RAB8-5 [Nicotiana tabacum]
  misc_feature (1)..(130): Homolog of NCBI NO: 18447913 NR Description: ras-related protein RAB8-1 [Nicotiana tabacum]
  misc_feature (1)..(130): Homolog of NCBI NO: 5669640 NR Description: ethylene-responsive small GTP-binding protein
  misc_feature (1)..(130): Homolog of NCBI NO: 1362066 NR Description: GTP-binding protein GTP6 - garden pea
  misc_feature (1)..(129): Homolog of NCBI NO: 15232784 NR Description: Ras family GTP-binding protein, putative; protein
  misc_feature (1)..(130): Homolog of NCBI NO: 33146687 NR Description: putative ethylene-responsive small GTP-binding

SEQ ID NO: 20170 - protein, 92 aa, Zea mays subsp. mays; identical to SEQ ID NO: 12590
  peptide (1)..(92): Ceres Seq. ID no. 12364585

SEQ ID NO: 20171 - protein, 87 aa, Zea mays subsp. mays; identical to SEQ ID NO: 12591
  peptide (1)..(87): Ceres Seq. ID no. 12364586
  misc_feature (1)..(87): Homolog of NCBI NO: 38175435 NR Description: putative ras-related protein [Oryza sativa
  misc_feature (1)..(87): Homolog of NCBI NO: 18447917 NR Description: ras-related protein RAB8-3 [Nicotiana tabacum]
  misc_feature (1)..(87): Homolog of NCBI NO: 15231322 NR Description: GTP-binding protein ara-3; protein id: supported by cDNA: gi_14334917, supported by cDNA: gi_14596014,
  misc_feature (1)..(87): Homolog of NCBI NO: 1370190 NR Description: RAB8A [Lotus japonicus]
  misc_feature (1)..(87): Homolog of NCBI NO: 18447921 NR Description: ras-related protein RAB8-5 [Nicotiana tabacum]
  misc_feature (1)..(87): Homolog of NCBI NO: 18447913 NR Description: ras-related protein RAB8-1 [Nicotiana tabacum]
  misc_feature (1)..(87): Homolog of NCBI NO: 5669640 NR Description: ethylene-responsive small GTP-binding protein
  misc_feature (1)..(87): Homolog of NCBI NO: 1362066 NR Description: GTP-binding protein GTP6 - garden pea
  misc_feature (1)..(86): Homolog of NCBI NO: 15232784 NR Description: Ras family GTP-binding protein, putative; protein
  misc_feature (1)..(87): Homolog of NCBI NO: 33146687 NR Description: putative ethylene-responsive small GTP-binding

SEQ ID NO: 20172 - DNA, 407 bp, Zea mays subsp. mays
  misc_feature (1)..(407): Ceres Seq. ID no. 2787041
  misc_feature: MA Experiment ID: 20000535 Result: Up-regulated in Transcription
  misc_feature: MA Experiment 20000535 PARAMETER Experiment Name: Zm_Hybrid_Seed_Dev_P Parameter: DAP Value: 30 vs. 12
  misc_feature: MA Experiment 20000535 PARAMETER Experiment Name: Zm_Hybrid_Seed_Dev_P Parameter: Organism Value: Zea mays
  misc_feature: MA Experiment 20000535 PARAMETER Experiment Name: Zm_Hybrid_Seed_Dev_P Parameter: Plant Line Value: 35A19
  misc_feature: MA Experiment 20000535 PARAMETER Experiment Name: Zm_Hybrid_Seed_Dev_P Parameter: Tissue Value: Embryo vs. Unfert Floret
aaaaaatcaatcgcccacaaaggagagccaggcagccagccaaatcttccacctcctccatttccagccccgtccccacaccagctcgcgtaacctcctgcccatggctggaggcggcggcgcaggcgcgggctcgtcgtccggcggcggcggagggggcggcagggagggcgactgggactgcggcagctgcggcaaccgcaactacgccttccgctcgctctgcaaccgctgcaagcagccgcgcctcctcgtcgaccccaacaccccgcgcgactccaagtggctaccccgcgccggggactggatctgcaccggttgcagtaacaataattatgcatccagaaagaactgcaaaaagtgtggcttgcccaaggaggaagcagcaatgccagcattgcaaatgg

SEQ ID NO: 20173 - protein, 135 aa, Zea mays subsp. mays
  peptide (1)..(135): Ceres Seq. ID no. 2787042
  misc_feature (55)..(84): Pfam Name: Zn-finger in Ran binding protein and others Pfam Description: Zn-finger in Ran binding protein and others
  misc_feature (37)..(82): Homolog of NCBI NO: 908756 NR Description: unknown protein
  misc_feature (38)..(82): Homolog of NCBI NO: 31242041 NR Description: ENSANGP00000022825 [Anopheles gambiae]
  misc_feature (37)..(82): Homolog of NCBI NO: 24642434 NR Description: cabeza CG3606-PA
  misc_feature (37)..(82): Homolog of NCBI NO: 24642436 NR Description: cabeza CG3606-PB
  misc_feature (37)..(82): Homolog of NCBI NO: 8928004 NR Description: RNA-binding protein cabeza (Sarcoma-associated
  misc_feature (33)..(131): Homolog of NCBI NO: 27817857 NR Description: OJ1081_B12.5 [Oryza sativa (japonica
  misc_feature (55)..(134): Homolog of NCBI NO: 34913970 NR Description: B1110C07.23 [Oryza sativa (japonica
  misc_feature (29)..(82): Homolog of NCBI NO: 31242039 NR Description: ENSANGP00000022179 [Anopheles gambiae]
  misc_feature (38)..(128): Homolog of NCBI NO: 15865325 NR Description: putative non-ribosomal nucleolar protein
  misc_feature (52)..(133): Homolog of NCBI NO: 15227939 NR Description: similar to putative zinc finger protein; protein
KNQSPTKESQAASQIFHLLHFQPRPHTSSRNLLPMAGGGGAGAGSSSGGGGGGGREGDWDCGSCGNRNYAFRSLCNRCKQPRLLVDPNTPRDSKWLPRAGDWICTGCSNNNYASRKNCKKCGLPKEEAAMPALQM

SEQ ID NO: 20174 - protein, 135 aa, Zea mays subsp. mays
  peptide (1)..(135): Ceres Seq. ID no. 2787043
  misc_feature (18)..(118): Pfam Name: Glycoprotein GG/GX Pfam Description: Glycoprotein GG/GX
  misc_feature (9)..(124): Homolog of NCBI NO: 11360494 NR Description: antifreeze glycopeptide AFGP polyprotein
  misc_feature (8)..(126): Homolog of NCBI NO: 11360494 NR Description: antifreeze glycopeptide AFGP polyprotein
  misc_feature (8)..(126): Homolog of NCBI NO: 11360494 NR Description: antifreeze glycopeptide AFGP polyprotein
KINRPQRRARQPAKSSTSSISSPVPTPARVTSCPWLEAAAQARARRPAAAEGAAGRATGTAAAAATATTPSARSATAASSRASSSTPTPRATPSGYPAPGTGSAPVAVTIIMHPERTAKSVACPRRKQQCQHCKW

SEQ ID NO: 20175 - protein, 101 aa, Zea mays subsp. mays
  peptide (1)..(101): Ceres Seq. ID no. 2787044
  misc_feature (21)..(50): Pfam Name: Zn-finger in Ran binding protein and others Pfam Description: Zn-finger in Ran binding protein and others
  misc_feature (3)..(48): Homolog of NCBI NO: 908756 NR Description: unknown protein
  misc_feature (4)..(48): Homolog of NCBI NO: 31242041 NR Description: ENSANGP00000022825 [Anopheles gambiae]
  misc_feature (3)..(48): Homolog of NCBI NO: 24642436 NR Description: cabeza CG3606-PB
  misc_feature (3)..(48): Homolog of NCBI NO: 24642434 NR Description: cabeza CG3606-PA
  misc_feature (3)..(48): Homolog of NCBI NO: 8928004 NR Description: RNA-binding protein cabeza (Sarcoma-associated
  misc_feature (1)..(97): Homolog of NCBI NO: 27817857 NR Description: OJ1081_B12.5 [Oryza sativa (japonica
  misc_feature (21)..(100): Homolog of NCBI NO: 34913970 NR Description: B1110C07.23 [Oryza sativa (japonica
  misc_feature (1)..(48): Homolog of NCBI NO: 31242039 NR Description: ENSANGP00000022179 [Anopheles gambiae]
  misc_feature (4)..(94): Homolog of NCBI NO: 15865325 NR Description: putative non-ribosomal nucleolar protein
  misc_feature (18)..(99): Homolog of NCBI NO: 15227939 NR Description: similar to putative zinc finger protein; protein
MAGGGGAGAGSSSGGGGGGGREGDWDCGSCGNRNYAFRSLCNRCKQPRLLVDPNTPRDSKWLPRAGDWICTGCSNNNYASRKNCKKCGLPKEEAAMPALQM

SEQ ID NO: 20176 - DNA, 1694 bp, Zea mays subsp. mays
  misc_feature (1)..(1694): Ceres Seq. ID no. 12435649
  misc_feature: MA Experiment ID: 108504 Result: Down-regulated in Transcription
  misc_feature: MA Experiment 108504 PARAMETER Experiment Name: Zm_Drought_P Parameter: Age (day) Value: 8
  misc_feature: MA Experiment 108504 PARAMETER Experiment Name: Zm_Drought_P Parameter: Organism Value: Zea mays
  misc_feature: MA Experiment 108504 PARAMETER Experiment Name: Zm_Drought_P Parameter: Plant Line Value: 35A19
  misc_feature: MA Experiment 108504 PARAMETER Experiment Name: Zm_Drought_P Parameter: Timepoint (hr) Value: 12
  misc_feature: MA Experiment 108504 PARAMETER Experiment Name: Zm_Drought_P Parameter: Tissue Value: Aerial
  misc_feature: MA Experiment 108504 PARAMETER Experiment Name: Zm_Drought_P Parameter: Treatment Value: Drought vs. No Drought
  misc_feature: MA Experiment ID: 108528 Result: Up-regulated in Transcription
  misc_feature: MA Experiment 108528 PARAMETER Experiment Name: Zm_Imbibed_Seeds_P Parameter: Age (day) Value: 5 vs. 2
  misc_feature: MA Experiment 108528 PARAMETER Experiment Name: Zm_Imbibed_Seeds_P Parameter: Organism Value: Zea mays
  misc_feature: MA Experiment 108528 PARAMETER Experiment Name: Zm_Imbibed_Seeds_P Parameter: Plant Line Value: 35A19
  misc_feature: MA Experiment 108528 PARAMETER Experiment Name: Zm_Imbibed_Seeds_P Parameter: Tissue Value: Aerial vs. Embryo
  misc_feature: MA Experiment ID: 108529 Result: Up-regulated in Transcription
  misc_feature: MA Experiment 108529 PARAMETER Experiment Name: Zm_Imbibed_Seeds_P Parameter: Age (day) Value: 5 vs. 2
  misc_feature: MA Experiment 108529 PARAMETER Experiment Name: Zm_Imbibed_Seeds_P Parameter: Organism Value: Zea mays
  misc_feature: MA Experiment 108529 PARAMETER Experiment Name: Zm_Imbibed_Seeds_P Parameter: Plant Line Value: 35A19
  misc_feature: MA Experiment 108529 PARAMETER Experiment Name: Zm_Imbibed_Seeds_P Parameter: Tissue Value: Roots vs. Embryo
  misc_feature: MA Experiment ID: 108530 Result: Up-regulated in Transcription
  misc_feature: MA Experiment 108530 PARAMETER Experiment Name: Zm_Imbibed_Seeds_P Parameter: Age (day) Value: 6 vs. 2
  misc_feature: MA Experiment 108530 PARAMETER Experiment Name: Zm_Imbibed_Seeds_P Parameter: Organism Value: Zea mays
  misc_feature: MA Experiment 108530 PARAMETER Experiment Name: Zm_Imbibed_Seeds_P Parameter: Plant Line Value: 35A19
  misc_feature: MA Experiment 108530 PARAMETER Experiment Name: Zm_Imbibed_Seeds_P Parameter: Tissue Value: Aerial vs. Embryo
  misc_feature: MA Experiment ID: 108535 Result: Down-regulated in Transcription
  misc_feature: MA Experiment 108535 PARAMETER Experiment Name: Zm_Meristem_P Parameter: Age (day) Value: 8
  misc_feature: MA Experiment 108535 PARAMETER Experiment Name: Zm_Meristem_P Parameter: Organism Value: Zea mays
  misc_feature: MA Experiment 108535 PARAMETER Experiment Name: Zm_Meristem_P Parameter: Plant Line Value: 35A19
  misc_feature: MA Experiment 108535 PARAMETER Experiment Name: Zm_Meristem_P Parameter: Tissue Value: Root Meristem vs. Above Root Meristem
  misc_feature: MA Experiment ID: 108543 Result: Down-regulated in Transcription
  misc_feature: MA Experiment ID: 108547 Result: Up-regulated in Transcription
  misc_feature: MA Experiment 108547 PARAMETER Experiment Name: Zm_Imbibed_Seeds_P Parameter: Age (day) Value: 4 vs. 2
  misc_feature: MA Experiment 108547 PARAMETER Experiment Name: Zm_Imbibed_Seeds_P Parameter: Organism Value: Zea mays
  misc_feature: MA Experiment 108547 PARAMETER Experiment Name: Zm_Imbibed_Seeds_P Parameter: Plant Line Value: 35A19
  misc_feature: MA Experiment 108547 PARAMETER Experiment Name: Zm_Imbibed_Seeds_P Parameter: Tissue Value: Aerial vs. Embryo
  misc_feature: MA Experiment ID: 108556 Result: Down-regulated in Transcription
  misc_feature: MA Experiment 108556 PARAMETER Experiment Name: Zm_Drought_P Parameter: Age (day) Value: 9
  misc_feature: MA Experiment 108556 PARAMETER Experiment Name: Zm_Drought_P Parameter: Organism Value: Zea mays
  misc_feature: MA Experiment 108556 PARAMETER Experiment Name: Zm_Drought_P Parameter: Plant Line Value: 35A19
  misc_feature: MA Experiment 108556 PARAMETER Experiment Name: Zm_Drought_P Parameter: Timepoint (hr) Value: 24
  misc_feature: MA Experiment 108556 PARAMETER Experiment Name: Zm_Drought_P Parameter: Tissue Value: Aerial
  misc_feature: MA Experiment 108556 PARAMETER Experiment Name: Zm_Drought_P Parameter: Treatment Value: Drought vs. No Drought
  misc_feature: MA Experiment ID: 108559 Result: Down-regulated in Transcription
  misc_feature: MA Experiment 108559 PARAMETER Experiment Name: Zm_5mM_NO_P Parameter: Age (day) Value: 8
  misc_feature: MA Experiment 108559 PARAMETER Experiment Name: Zm_5mM_NO_P Parameter: Organism Value: Zea mays
  misc_feature: MA Experiment 108559 PARAMETER Experiment Name: Zm_5mM_NO_P Parameter: Plant Line Value: 35A19
  misc_feature: MA Experiment 108559 PARAMETER Experiment Name: Zm_5mM_NO_P Parameter: Timepoint (hr) Value: 12
  misc_feature: MA Experiment 108559 PARAMETER Experiment Name: Zm_5mM_NO_P Parameter: Tissue Value: Aerial
  misc_feature: MA Experiment 108559 PARAMETER Experiment Name: Zm_5mM_NO_P Parameter: Treatment Value: 5mM NO vs. No Treatment
  misc_feature: MA Experiment ID: 108687 Result: Down-regulated in Transcription
  misc_feature: MA Experiment 108687 PARAMETER Experiment Name: Zm_Embryos-Flowers__P Parameter: Tissue Value: Embryo vs. Aerial+
  misc_feature: MA Experiment ID: 108689 Result: Down-regulated in Transcription
  misc_feature: MA Experiment 108689 PARAMETER Experiment Name: Zm_Drought_Roots_P Parameter: Age (day) Value: 9
  misc_feature: MA Experiment 108689 PARAMETER Experiment Name: Zm_Drought_Roots_P Parameter: Organism Value: Zea mays
  misc_feature: MA Experiment 108689 PARAMETER Experiment Name: Zm_Drought_Roots_P Parameter: Plant Line Value: 35A19
  misc_feature: MA Experiment 108689 PARAMETER Experiment Name: Zm_Drought_Roots_P Parameter: Timepoint (hr) Value: 24
  misc_feature: MA Experiment 108689 PARAMETER Experiment Name: Zm_Drought_Roots_P Parameter: Tissue Value: Roots
  misc_feature: MA Experiment 108689 PARAMETER Experiment Name: Zm_Drought_Roots_P Parameter: Treatment Value: Drought vs. No Drought
  misc_feature: MA Experiment ID: 20000477 Result: Down-regulated in Transcription
  misc_feature: MA Experiment 20000477 PARAMETER Experiment Name: Zm_5mM_SA_P Parameter: Age (day) Value: 10
  misc_feature: MA Experiment 20000477 PARAMETER Experiment Name: Zm_5mM_SA_P Parameter: Organism Value: Zea mays
  misc_feature: MA Experiment 20000477 PARAMETER Experiment Name: Zm_5mM_SA_P Parameter: Plant Line Value: 35A19
  misc_feature: MA Experiment 20000477 PARAMETER Experiment Name: Zm_5mM_SA_P Parameter: Timepoint (hr) Value: 48
  misc_feature: MA Experiment 20000477 PARAMETER Experiment Name: Zm_5mM_SA_P Parameter: Tissue Value: Aerial
  misc_feature: MA Experiment 20000477 PARAMETER Experiment Name: Zm_5mM_SA_P Parameter: Treatment Value: 5mM SA vs. No Treatment
  misc_feature: MA Experiment ID: 20000478 Result: Down-regulated in Transcription
  misc_feature: MA Experiment 20000478 PARAMETER Experiment Name: Zm_5mM_SA_P Parameter: Age (day) Value: 11
  misc_feature: MA Experiment 20000478 PARAMETER Experiment Name: Zm_5mM_SA_P Parameter: Organism Value: Zea mays
  misc_feature: MA Experiment 20000478 PARAMETER Experiment Name: Zm_5mM_SA_P Parameter: Plant Line Value: 35A19
  misc_feature: MA Experiment 20000478 PARAMETER Experiment Name: Zm_5mM_SA_P Parameter: Timepoint (hr) Value: 72
  misc_feature: MA Experiment 20000478 PARAMETER Experiment Name: Zm_5mM_SA_P Parameter: Tissue Value: Aerial
  misc_feature: MA Experiment 20000478 PARAMETER Experiment Name: Zm_5mM_SA_P Parameter: Treatment Value: 5mM SA vs. No Treatment
  misc_feature: MA Experiment ID: 20000479 Result: Down-regulated in Transcription
  misc_feature: MA Experiment 20000479 PARAMETER Experiment Name: Zm_Drought_P Parameter: Age (day) Value: 10
  misc_feature: MA Experiment 20000479 PARAMETER Experiment Name: Zm_Drought_P Parameter: Organism Value: Zea mays
  misc_feature: MA Experiment 20000479 PARAMETER Experiment Name: Zm_Drought_P Parameter: Plant Line Value: 35A19
  misc_feature: MA Experiment 20000479 PARAMETER Experiment Name: Zm_Drought_P Parameter: Timepoint (hr) Value: 48
  misc_feature: MA Experiment 20000479 PARAMETER Experiment Name: Zm_Drought_P Parameter: Tissue Value: Aerial
  misc_feature: MA Experiment 20000479 PARAMETER Experiment Name: Zm_Drought_P Parameter: Treatment Value: Drought vs. No Drought
  misc_feature: MA Experiment ID: 20000480 Result: Down-regulated in Transcription
  misc_feature: MA Experiment 20000480 PARAMETER Experiment Name: Zm_Drought_P Parameter: Age (day) Value: 11
  misc_feature: MA Experiment 20000480 PARAMETER Experiment Name: Zm_Drought_P Parameter: Organism Value: Zea mays
  misc_feature: MA Experiment 20000480 PARAMETER Experiment Name: Zm_Drought_P Parameter: Plant Line Value: 35A19
  misc_feature: MA Experiment 20000480 PARAMETER Experiment Name: Zm_Drought_P Parameter: Timepoint (hr) Value: 72
  misc_feature: MA Experiment 20000480 PARAMETER Experiment Name: Zm_Drought_P Parameter: Tissue Value: Aerial
  misc_feature: MA Experiment 20000480 PARAMETER Experiment Name: Zm_Drought_P Parameter: Treatment Value: Drought vs. No Drought
aaccacgcaccagcagcagcgaggagctagagcagcggcagagcgcgcggcgcacaccacgcatcgtacgtcctagctcacgatggcgggcgcctggtccttgctcgcgctcgccctatcgctctgctccgtcgcggccgtcgcggtgcagcaggtgaacacggtggccgcggcgcagcaggcggcggaccgggtggcggggctcccggggcagccgcccgtggggttcgcgcagtacgccggctacgtgaccgtgaacgagacgcacggccgcgcgctcttctactggttcttcgaggccaccgcgtcgcccgacaagaagccgctcgtgctctggctcaacggcgggcccgggtgctcgtcgattgggtacggggaggcggaggagctgggtcccttcctggtgcagaagggcaagccggagctcagatggaacaactactcctggaacacagaggccaaccttatgttcctggagtccccggtgggcgtcggcttctcctacacaaacacgagctccgacctgctgcaactcggcgacaagatcaccgctgacgacgcttacaagttcctgctcaactggttcaagaggttcccgcagtacaggtcccacgacttctacatcgccggcgagagctacgccgggcactacgtcccgcagctgtcggagaagatcttcgacggcaacagggcggggcccaaggagagctacgtcaacctcaagggcctgatggtcgggaacgcgctcatggacgacgagacggaccagacgggcatggtcgactacgcctgggaccacgccgtcatctccgaccgggtgtacgccgacgtcaaggccaggtgcgacttcagcatggccaacgtcaccgacgcctgcaacgccgcgctccaggagtacttcgccgtgtaccgcctcatcgacatgtacagcctctacaccccggtctgcaccgacgacccggccggcgcgtcggcgttgccgtcctcctacgacgcgcgcggccaccggaaggtcgccgtccacggcgccgcccccaggatcttctccaaataccgaggatggatcatgaagccggcgggctacgacccctgcacggcggagtacgcggagacctacttcaaccggcccgacgtccaggcggcgctgcacgcgaacgtgaccaagatcggctacaactggacgcactgcagcgatgtgatcaacacttggaacgacgccgccttctccaccctccccaccatccgcaagctcgtcgccagcggcctcagggtgtgggtcttcagcggcgacaccgacgggaggatccccgtgacgtccacgaggctcaccctcaacaagctagggctcaagaccatccaggagtggacgccgtggtacgaccatctgcaggttggtggatggacggtcgtctatgagggcctgacgttcgtcaccatccgcggagccggacacgaggtgcctctgcacgcgccacggcaggcgctgacgctcttcagcaacttcctggcaggcaccaagatgcctccaacggcgttcccctagtttcaaaagaatttaaaaaaggtgcctcctcttgcccggcaaagccggctgatatgtttctttccccccttctcgcttctactaaagttgtaagtgtaattcgattggaaaaaagttcagaataaaagtcatagtgctgacctcaatgctc

SEQ ID NO: 20177 - protein, 486 aa, Zea mays subsp. mays
  peptide (1)..(486): Ceres Seq. ID no. 12435650
  misc_feature (38)..(289): Homolog of NCBI NO: 15224083 NR Description: putative serine carboxypeptidase II; protein id:
  misc_feature (331)..(485): Homolog of NCBI NO: 10140766 NR Description: putative serine carboxypeptidase [Oryza sativa]
  misc_feature (33)..(289): Homolog of NCBI NO: 10140766 NR Description: putative serine carboxypeptidase [Oryza sativa]
  misc_feature (5)..(485): Homolog of NCBI NO: 15241571 NR Description: serine-type carboxypeptidase II-like protein
  misc_feature (331)..(485): Homolog of NCBI NO: 37536528 NR Description: putative serine carboxypeptidase
  misc_feature (6)..(289): Homolog of NCBI NO: 37536528 NR Description: putative serine carboxypeptidase
  misc_feature (428)..(481): Homolog of NCBI NO: 38344436 NR Description: OSJNBa0038O10.8 [Oryza sativa (japonica
  misc_feature (6)..(445): Homolog of NCBI NO: 38344436 NR Description: OSJNBa0038O10.8 [Oryza sativa (japonica
  misc_feature (90)..(485): Homolog of NCBI NO: 30688865 NR Description: serine carboxypeptidase -related [Arabidopsis
  misc_feature (28)..(485): Homolog of NCBI NO: 10177810 NR Description: serine carboxypeptidase II-like protein
MAGAWSLLALALSLCSVAAVAVQQVNTVAAAQQAADRVAGLPGQPPVGFAQYAGYVTVNETHGRALFYWFFEATASPDKKPLVLWLNGGPGCSSIGYGEAEELGPFLVQKGKPELRWNNYSWNTEANLMFLESPVGVGFSYTNTSSDLLQLGDKITADDAYKFLLNWFKRFPQYRSHDFYIAGESYAGHYVPQLSEKIFDGNRAGPKESYVNLKGLMVGNALMDDETDQTGMVDYAWDHAVISDRVYADVKARCDFSMANVTDACNAALQEYFAVYRLIDMYSLYTPVCTDDPAGASALPSSYDARGHRKVAVHGAAPRIFSKYRGWIMKPAGYDPCTAEYAETYFNRPDVQAALHANVTKIGYNWTHCSDVINTWNDAAFSTLPTIRKLVASGLRVWVFSGDTDGRIPVTSTRLTLNKLGLKTIQEWTPWYDHLQVGGWTVVYEGLTFVTIRGAGHEVPLHAPRQALTLFSNFLAGTKMPPTAFP

SEQ ID NO: 20178 - protein, 358 aa, Zea mays subsp. mays
  peptide (1)..(358): Ceres Seq. ID no. 12435651
  misc_feature (1)..(161): Homolog of NCBI NO: 15224083 NR Description: putative serine carboxypeptidase II; protein id:
  misc_feature (203)..(357): Homolog of NCBI NO: 10140766 NR Description: putative serine carboxypeptidase [Oryza sativa]
  misc_feature (1)..(161): Homolog of NCBI NO: 10140766 NR Description: putative serine carboxypeptidase [Oryza sativa]
  misc_feature (1)..(357): Homolog of NCBI NO: 15241571 NR Description: serine-type carboxypeptidase II-like protein
  misc_feature (203)..(357): Homolog of NCBI NO: 37536528 NR Description: putative serine carboxypeptidase
  misc_feature (1)..(161): Homolog of NCBI NO: 37536528 NR Description: putative serine carboxypeptidase
  misc_feature (300)..(353): Homolog of NCBI NO: 38344436 NR Description: OSJNBa0038O10.8 [Oryza sativa (japonica
  misc_feature (1)..(317): Homolog of NCBI NO: 38344436 NR Description: OSJNBa0038O10.8 [Oryza sativa (japonica
  misc_feature (1)..(357): Homolog of NCBI NO: 30688865 NR Description: serine carboxypeptidase -related [Arabidopsis
  misc_feature (1)..(357): Homolog of NCBI NO: 10177810 NR Description: serine carboxypeptidase II-like protein
MFLESPVGVGFSYTNTSSDLLQLGDKITADDAYKFLLNWFKRFPQYRSHDFYIAGESYAGHYVPQLSEKIFDGNRAGPKESYVNLKGLMVGNALMDDETDQTGMVDYAWDHAVISDRVYADVKARCDFSMANVTDACNAALQEYFAVYRLIDMYSLYTPVCTDDPAGASALPSSYDARGHRKVAVHGAAPRIFSKYRGWIMKPAGYDPCTAEYAETYFNRPDVQAALHANVTKIGYNWTHCSDVINTWNDAAFSTLPTIRKLVASGLRVWVFSGDTDGRIPVTSTRLTLNKLGLKTIQEWTPWYDHLQVGGWTVVYEGLTFVTIRGAGHEVPLHAPRQALTLFSNFLAGTKMPPTAFP

SEQ ID NO: 20179 - protein, 270 aa, Zea mays subsp. mays
  peptide (1)..(270): Ceres Seq. ID no. 12435652
  misc_feature (1)..(73): Homolog of NCBI NO: 15224083 NR Description: putative serine carboxypeptidase II; protein id:
  misc_feature (115)..(269): Homolog of NCBI NO: 10140766 NR Description: putative serine carboxypeptidase [Oryza sativa]
  misc_feature (1)..(73): Homolog of NCBI NO: 10140766 NR Description: putative serine carboxypeptidase [Oryza sativa]
  misc_feature (1)..(269): Homolog of NCBI NO: 15241571 NR Description: serine-type carboxypeptidase II-like protein
  misc_feature (115)..(269): Homolog of NCBI NO: 37536528 NR Description: putative serine carboxypeptidase
  misc_feature (1)..(73): Homolog of NCBI NO: 37536528 NR Description: putative serine carboxypeptidase
  misc_feature (212)..(265): Homolog of NCBI NO: 38344436 NR Description: OSJNBa0038O10.8 [Oryza sativa (japonica
  misc_feature (1)..(229): Homolog of NCBI NO: 38344436 NR Description: OSJNBa0038O10.8 [Oryza sativa (japonica
  misc_feature (1)..(269): Homolog of NCBI NO: 30688865 NR Description: serine carboxypeptidase -related [Arabidopsis
  misc_feature (1)..(269): Homolog of NCBI NO: 10177810 NR Description: serine carboxypeptidase II-like protein
MVGNALMDDETDQTGMVDYAWDHAVISDRVYADVKARCDFSMANVTDACNAALQEYFAVYRLIDMYSLYTPVCTDDPAGASALPSSYDARGHRKVAVHGAAPRIFSKYRGWIMKPAGYDPCTAEYAETYFNRPDVQAALHANVTKIGYNWTHCSDVINTWNDAAFSTLPTIRKLVASGLRVWVFSGDTDGRIPVTSTRLTLNKLGLKTIQEWTPWYDHLQVGGWTVVYEGLTFVTIRGAGHEVPLHAPRQALTLFSNFLAGTKMPPTAFP

SEQ ID NO: 20180 - DNA, 1415 bp, Zea mays subsp. mays
  misc_feature (1)..(1415): Ceres Seq. ID no. 12435621
  misc_feature: MA Experiment ID: 108535 Result: Down-regulated in Transcription
  misc_feature: MA Experiment 108535 PARAMETER Experiment Name: Zm_Meristem_P Parameter: Age (day) Value: 8
  misc_feature: MA Experiment 108535 PARAMETER Experiment Name: Zm_Meristem_P Parameter: Organism Value: Zea mays
  misc_feature: MA Experiment 108535 PARAMETER Experiment Name: Zm_Meristem_P Parameter: Plant Line Value: 35A19
  misc_feature: MA Experiment 108535 PARAMETER Experiment Name: Zm_Meristem_P Parameter: Tissue Value: Root Meristem vs. Above Root Meristem
  misc_feature: MA Experiment ID: 108556 Result: Down-regulated in Transcription
  misc_feature: MA Experiment 108556 PARAMETER Experiment Name: Zm_Drought_P Parameter: Age (day) Value: 9
  misc_feature: MA Experiment 108556 PARAMETER Experiment Name: Zm_Drought_P Parameter: Organism Value: Zea mays
  misc_feature: MA Experiment 108556 PARAMETER Experiment Name: Zm_Drought_P Parameter: Plant Line Value: 35A19
  misc_feature: MA Experiment 108556 PARAMETER Experiment Name: Zm_Drought_P Parameter: Timepoint (hr) Value: 24
  misc_feature: MA Experiment 108556 PARAMETER Experiment Name: Zm_Drought_P Parameter: Tissue Value: Aerial
  misc_feature: MA Experiment 108556 PARAMETER Experiment Name: Zm_Drought_P Parameter: Treatment Value: Drought vs. No Drought
  misc_feature: MA Experiment ID: 108559 Result: Down-regulated in Transcription
  misc_feature: MA Experiment 108559 PARAMETER Experiment Name: Zm_5mM_NO_P Parameter: Age (day) Value: 8
  misc_feature: MA Experiment 108559 PARAMETER Experiment Name: Zm_5mM_NO_P Parameter: Organism Value: Zea mays
  misc_feature: MA Experiment 108559 PARAMETER Experiment Name: Zm_5mM_NO_P Parameter: Plant Line Value: 35A19
  misc_feature: MA Experiment 108559 PARAMETER Experiment Name: Zm_5mM_NO_P Parameter: Timepoint (hr) Value: 12
  misc_feature: MA Experiment 108559 PARAMETER Experiment Name: Zm_5mM_NO_P Parameter: Tissue Value: Aerial
  misc_feature: MA Experiment 108559 PARAMETER Experiment Name: Zm_5mM_NO_P Parameter: Treatment Value: 5mM NO vs. No Treatment
  misc_feature: MA Experiment ID: 20000108 Result: Down-regulated in Transcription
  misc_feature: MA Experiment 20000108 PARAMETER Experiment Name: Zm_Root-Tips_P Parameter: Age (day) Value: 12
  misc_feature: MA Experiment 20000108 PARAMETER Experiment Name: Zm_Root-Tips_P Parameter: Organism Value: Zea mays
  misc_feature: MA Experiment 20000108 PARAMETER Experiment Name: Zm_Root-Tips_P Parameter: Tissue Value: Root tips vs. Root mid region    35
  misc_feature: MA Experiment 20000108 PARAMETER Experiment Name: Zm_Root-Tips_P Parameter: Tissue Value: Root tips vs. Root mid region   Sequence Listing-Misc Features (4)
  misc_feature: MA Experiment ID: 20000477 Result: Down-regulated in Transcription
  misc_feature: MA Experiment 20000477 PARAMETER Experiment Name: Zm_5mM_SA_P Parameter: Age (day) Value: 10
  misc_feature: MA Experiment 20000477 PARAMETER Experiment Name: Zm_5mM_SA_P Parameter: Organism Value: Zea mays
  misc_feature: MA Experiment 20000477 PARAMETER Experiment Name: Zm_5mM_SA_P Parameter: Plant Line Value: 35A19
  misc_feature: MA Experiment 20000477 PARAMETER Experiment Name: Zm_5mM_SA_P Parameter: Timepoint (hr) Value: 48
  misc_feature: MA Experiment 20000477 PARAMETER Experiment Name: Zm_5mM_SA_P Parameter: Tissue Value: Aerial
  misc_feature: MA Experiment 20000477 PARAMETER Experiment Name: Zm_5mM_SA_P Parameter: Treatment Value: 5mM SA vs. No Treatment
  misc_feature: MA Experiment ID: 20000480 Result: Down-regulated in Transcription
  misc_feature: MA Experiment 20000480 PARAMETER Experiment Name: Zm_Drought_P Parameter: Age (day) Value: 11
  misc_feature: MA Experiment 20000480 PARAMETER Experiment Name: Zm_Drought_P Parameter: Organism Value: Zea mays
  misc_feature: MA Experiment 20000480 PARAMETER Experiment Name: Zm_Drought_P Parameter: Plant Line Value: 35A19
  misc_feature: MA Experiment 20000480 PARAMETER Experiment Name: Zm_Drought_P Parameter: Timepoint (hr) Value: 72
  misc_feature: MA Experiment 20000480 PARAMETER Experiment Name: Zm_Drought_P Parameter: Tissue Value: Aerial
  misc_feature: MA Experiment 20000480 PARAMETER Experiment Name: Zm_Drought_P Parameter: Treatment Value: Drought vs. No Drought
tcgaaaaacccccacgccccaccccaccaaacaatggcgccggcggcgacttccacagcctctgcgccctcctccttccactccaccggtaggcatagggccagggtcggggcccggccatcgctcgtctctctccgcgtcagagcagccaatcccaacgttaccgccgatcccgcaccggccttccagtccgtcacggccttcgcgccagccaccgtcgccaacctcggcccgggcttcgacttcctcggatgcgccgtcgccgacgcctccctctccctgggtgacaccgtcaccgcaaccctggacccgtcactcccgcccgccaccgtctccatcgcctccgtcacatccccgtcccgccccaacctcgccgagcgcctctctagggacccgctccgcaactgcgcgggcgtcgccgccatcgccgcgctccgcgccctcggcgtccgctcccacgccgtgtccatccacctcaccaagggcctgccgctcggctcggggctcggctcctccgcggcctccgccgccgccgccgccaaggccgtcgacgccctcttcggctcgcgcctcggccgcgacgacctcgtcctcgcggggctcgagtcggagaaggccgtcagcggcttccacgccgacaacatcgcccccgccatcctcggcggcttcgtcctcgtccgcagctacgacccctttcacctcgtcccgctttccttcccgccagcgctccgcctccacttcgtcctggtcacccccgacttcgaggcgcccacgagcaagatgcgcgccgcgctgcccaggcaggtcgacgtccagcagcacgtgcgcaactccagccaggcagcggcgctcgtggcggcggtgctgcagggggacgcgggcctcatcggctccgcgatgtcgtccgacggcatcgtggagcccaccagggcacccctcatacctggcatggcggccgtaaaggcggcggccctgcaagctggagcgctgggctgcacaattagcggcgcgggccccacagtggtggccgtcatccaaggggaggaaaggggggaggaggttgcccgcaggatggtggacgcgttctggagcgcaggcaagctcaaggcgacagcaaccgtcgcgcagctcgatacccttggtgccagggtcatcgccacgtcatccttgaactagcaaaagattcggaaagtggtactgcaattgtatcaccaaacaaggaagaatgaaggggaaccccatggatttgtatgttttctcttctttcttgcatctttaggtggttaattggctttggaataagtgagatggaggacatcgctagaacaattctgttccgtgggctgtaatttcaatttgggctggtttcttcatcatgccatggataattatgaataaatttgaggtagtttgtt

SEQ ID NO: 20181 - protein, 391 aa, Zea mays subsp. mays
  peptide (1)..(391): Ceres Seq. ID no. 12435622
  misc_feature (59)..(361): Homolog of NCBI NO: 14194907 NR Description: HOMOSERINE KINASE (HK)
  misc_feature (68)..(87): Homolog of NCBI NO: 18977426 NR Description: homoserine kinase [Pyrococcus furiosus DSM 3638]
  misc_feature (135)..(366): Homolog of NCBI NO: 18977426 NR Description: homoserine kinase [Pyrococcus furiosus DSM 3638]
  misc_feature (64)..(87): Homolog of NCBI NO: 20093771 NR Description: Homoserine kinase [Methanopyrus kandleri AV19]
  misc_feature (131)..(360): Homolog of NCBI NO: 20093771 NR Description: Homoserine kinase [Methanopyrus kandleri AV19]
  misc_feature (63)..(389): Homolog of NCBI NO: 21674844 NR Description: homoserine kinase [Chlorobium tepidum TLS]
  misc_feature (64)..(385): Homolog of NCBI NO: 23136657 NR Description: hypothetical protein [Cytophaga hutchinsonii]
  misc_feature (12)..(389): Homolog of NCBI NO: 4927412 NR Description: homoserine kinase [Arabidopsis thaliana]
  misc_feature (12)..(389): Homolog of NCBI NO: 39104572 NR Description: putative homoserine kinase HSK [Arabidopsis
  misc_feature (12)..(389): Homolog of NCBI NO: 15227800 NR Description: 3-hydroxy-3-methylglutaryl-coenzyme A reductase 2
SKNPHAPPHQTMAPAATSTASAPSSFHSTGRHRARVGARPSLVSLRVRAANPNVTADPAPAFQSVTAFAPATVANLGPGFDFLGCAVADASLSLGDTVTATLDPSLPPATVSIASVTSPSRPNLAERLSRDPLRNCAGVAAIAALRALGVRSHAVSIHLTKGLPLGSGLGSSAASAAAAAKAVDALFGSRLGRDDLVLAGLESEKAVSGFHADNIAPAILGGFVLVRSYDPFHLVPLSFPPALRLHFVLVTPDFEAPTSKMRAALPRQVDVQQHVRNSSQAAALVAAVLQGDAGLIGSAMSSDGIVEPTRAPLIPGMAAVKAAALQAGALGCTISGAGPTVVAVIQGEERGEEVARRMVDAFWSAGKLKATATVAQLDTLGARVIATSSLN

SEQ ID NO: 20182 - protein, 380 aa, Zea mays subsp. mays
  peptide (1)..(380): Ceres Seq. ID no. 12435623
  misc_feature (48)..(350): Homolog of NCBI NO: 14194907 NR Description: HOMOSERINE KINASE (HK)
  misc_feature (57)..(76): Homolog of NCBI NO: 18977426 NR Description: homoserine kinase [Pyrococcus furiosus DSM 3638]
  misc_feature (124)..(355): Homolog of NCBI NO: 18977426 NR Description: homoserine kinase [Pyrococcus furiosus DSM 3638]
  misc_feature (53)..(76): Homolog of NCBI NO: 20093771 NR Description: Homoserine kinase [Methanopyrus kandleri AV19]
  misc_feature (120)..(349): Homolog of NCBI NO: 20093771 NR Description: Homoserine kinase [Methanopyrus kandleri AV19]
  misc_feature (52)..(378): Homolog of NCBI NO: 21674844 NR Description: homoserine kinase [Chlorobium tepidum TLS]
  misc_feature (53)..(374): Homolog of NCBI NO: 23136657 NR Description: hypothetical protein [Cytophaga hutchinsonii]
  misc_feature (1)..(378): Homolog of NCBI NO: 4927412 NR Description: homoserine kinase [Arabidopsis thaliana]
  misc_feature (1)..(378): Homolog of NCBI NO: 39104572 NR Description: putative homoserine kinase HSK [Arabidopsis
  misc_feature (1)..(378): Homolog of NCBI NO: 15227800 NR Description: 3-hydroxy-3-methylglutaryl-coenzyme A reductase 2
MAPAATSTASAPSSFHSTGRHRARVGARPSLVSLRVRAANPNVTADPAPAFQSVTAFAPATVANLGPGFDFLGCAVADASLSLGDTVTATLDPSLPPATVSIASVTSPSRPNLAERLSRDPLRNCAGVAAIAALRALGVRSHAVSIHLTKGLPLGSGLGSSAASAAAAAKAVDALFGSRLGRDDLVLAGLESEKAVSGFHADNIAPAILGGFVLVRSYDPFHLVPLSFPPALRLHFVLVTPDFEAPTSKMRAALPRQVDVQQHVRNSSQAAALVAAVLQGDAGLIGSAMSSDGIVEPTRAPLIPGMAAVKAAALQAGALGCTISGAGPTVVAVIQGEERGEEVARRMVDAFWSAGKLKATATVAQLDTLGARVIATSSLN

SEQ ID NO: 20183 - protein, 319 aa, Zea mays subsp. mays
  peptide (1)..(319): Ceres Seq. ID no. 12435624
  misc_feature (4)..(304): Pfam Name: Formin Homology 2 Domain Pfam Description: Formin Homology 2 Domain
  misc_feature (18)..(272): Homolog of NCBI NO: 20138131 NR Description: Vegetative cell wall protein gp1 precursor
  misc_feature (18)..(313): Homolog of NCBI NO: 20138131 NR Description: Vegetative cell wall protein gp1 precursor
  misc_feature (4)..(263): Homolog of NCBI NO: 20138131 NR Description: Vegetative cell wall protein gp1 precursor
  misc_feature (18)..(313): Homolog of NCBI NO: 20138131 NR Description: Vegetative cell wall protein gp1 precursor
  misc_feature (4)..(319): Homolog of NCBI NO: 6523547 NR Description: hydroxyproline-rich glycoprotein DZ-HRGP
  misc_feature (18)..(279): Homolog of NCBI NO: 20138131 NR Description: Vegetative cell wall protein gp1 precursor
  misc_feature (4)..(279): Homolog of NCBI NO: 20138131 NR Description: Vegetative cell wall protein gp1 precursor
  misc_feature (18)..(266): Homolog of NCBI NO: 6523547 NR Description: hydroxyproline-rich glycoprotein DZ-HRGP
  misc_feature (18)..(279): Homolog of NCBI NO: 20138131 NR Description: Vegetative cell wall protein gp1 precursor
  misc_feature (18)..(319): Homolog of NCBI NO: 20138131 NR Description: Vegetative cell wall protein gp1 precursor
RKTPTPHPTKQWRRRRLPQPLRPPPSTPPVGIGPGSGPGHRSSLSASEQPIPTLPPIPHRPSSPSRPSRQPPSPTSARASTSSDAPSPTPPSPWVTPSPQPWTRHSRPPPSPSPPSHPRPAPTSPSASLGTRSATARASPPSPRSAPSASAPTPCPSTSPRACRSARGSAPPRPPPPPPPRPSTPSSARASAATTSSSRGSSRRRPSAASTPTTSPPPSSAASSSSAATTPFTSSRFPSRQRSASTSSWSPPTSRRPRARCAPRCPGRSTSSSTCATPARQRRSWRRCCRGTRASSAPRCRPTASWSPPGHPSYLAWRP

SEQ ID NO: 20184 - DNA, 2177 bp, Zea mays subsp. mays; identical to SEQ ID NO: 16780
  misc_feature (1)..(2177): Ceres Seq. ID no. 13492553
  misc_feature: MA Experiment ID: 108522 Result: Down-regulated in Transcription
  misc_feature: MA Experiment 108522 PARAMETER Experiment Name: Zm_42deg_Heat_P Parameter: Age (day) Value: 8
  misc_feature: MA Experiment 108522 PARAMETER Experiment Name: Zm_42deg_Heat_P Parameter: Organism Value: Zea mays
  misc_feature: MA Experiment 108522 PARAMETER Experiment Name: Zm_42deg_Heat_P Parameter: Plant Line Value: 35A19
  misc_feature: MA Experiment 108522 PARAMETER Experiment Name: Zm_42deg_Heat_P Parameter: Temperature (deg C) Value: 42 vs. 22
  misc_feature: MA Experiment 108522 PARAMETER Experiment Name: Zm_42deg_Heat_P Parameter: Timepoint (hr) Value: 1
  misc_feature: MA Experiment 108522 PARAMETER Experiment Name: Zm_42deg_Heat_P Parameter: Tissue Value: Aerial
  misc_feature: MA Experiment ID: 108535 Result: Down-regulated in Transcription
  misc_feature: MA Experiment 108535 PARAMETER Experiment Name: Zm_Meristem_P Parameter: Age (day) Value: 8
  misc_feature: MA Experiment 108535 PARAMETER Experiment Name: Zm_Meristem_P Parameter: Organism Value: Zea mays
  misc_feature: MA Experiment 108535 PARAMETER Experiment Name: Zm_Meristem_P Parameter: Plant Line Value: 35A19
  misc_feature: MA Experiment 108535 PARAMETER Experiment Name: Zm_Meristem_P Parameter: Tissue Value: Root Meristem vs. Above Root Meristem
  misc_feature: MA Experiment ID: 20000535 Result: Down-regulated in Transcription
  misc_feature: MA Experiment 20000535 PARAMETER Experiment Name: Zm_Hybrid_Seed_Dev_P Parameter: DAP Value: 30 vs. 12
  misc_feature: MA Experiment 20000535 PARAMETER Experiment Name: Zm_Hybrid_Seed_Dev_P Parameter: Organism Value: Zea mays
  misc_feature: MA Experiment 20000535 PARAMETER Experiment Name: Zm_Hybrid_Seed_Dev_P Parameter: Plant Line Value: 35A19
  misc_feature: MA Experiment 20000535 PARAMETER Experiment Name: Zm_Hybrid_Seed_Dev_P Parameter: Tissue Value: Embryo vs. Unfert Floret

SEQ ID NO: 20185 - protein, 394 aa, Zea mays subsp. mays; identical to SEQ ID NO: 16781
  peptide (1)..(394): Ceres Seq. ID no. 13492554
  misc_feature (31)..(349): Pfam Name: Glycosyl hydrolases family 17 Pfam Description: Glycosyl hydrolases family 17
  misc_feature (31)..(349): Pfam Name: Glycosyl hydrolases family 17 Pfam Description: Glycosyl hydrolases family 17
  misc_feature (92)..(369): Homolog of NCBI NO: 30683187 NR Description: glycosyl hydrolase family 17 [Arabidopsis
  misc_feature (30)..(366): Homolog of NCBI NO: 25316425 NR Description: probable beta-1,3-glucanase [imported] -
  misc_feature (30)..(366): Homolog of NCBI NO: 18401444 NR Description: glycosyl hydrolase family 17 [Arabidopsis
  misc_feature (92)..(369): Homolog of NCBI NO: 26452328 NR Description: putative beta-1,3-glucanase [Arabidopsis
  misc_feature (29)..(362): Homolog of NCBI NO: 15209173 NR Description: putative elicitor inducible chitinase [Solanum
  misc_feature (92)..(369): Homolog of NCBI NO: 30683187 NR Description: glycosyl hydrolase family 17 [Arabidopsis
  misc_feature (30)..(366): Homolog of NCBI NO: 18401444 NR Description: glycosyl hydrolase family 17 [Arabidopsis
  misc_feature (29)..(362): Homolog of NCBI NO: 15209173 NR Description: putative elicitor inducible chitinase [Solanum
  misc_feature (26)..(369): Homolog of NCBI NO: 18401187 NR Description: glycosyl hydrolase family 17 [Arabidopsis
  misc_feature (26)..(369): Homolog of NCBI NO: 21618052 NR Description: putative beta-1,3-glucanase [Arabidopsis thaliana]
  misc_feature (26)..(366): Homolog of NCBI NO: 7447981 NR Description: probable beta-1,3-glucanase At2g26600
  misc_feature (13)..(389): Homolog of NCBI NO: 15232696 NR Description: glycosyl hydrolase family 17 [Arabidopsis
  misc_feature (26)..(389): Homolog of NCBI NO: 11994352 NR Description: beta-1,3-glucanase-like protein [Arabidopsis
  misc_feature (92)..(369): Homolog of NCBI NO: 26452328 NR Description: putative beta-1,3-glucanase [Arabidopsis
  misc_feature (30)..(366): Homolog of NCBI NO: 25316425 NR Description: probable beta-1,3-glucanase [imported] -
  misc_feature (26)..(389): Homolog of NCBI NO: 11994352 NR Description: beta-1,3-glucanase-like protein [Arabidopsis
  misc_feature (13)..(389): Homolog of NCBI NO: 15232696 NR Description: glycosyl hydrolase family 17 [Arabidopsis
  misc_feature (26)..(366): Homolog of NCBI NO: 7447981 NR Description: probable beta-1,3-glucanase At2g26600
  misc_feature (26)..(369): Homolog of NCBI NO: 21618052 NR Description: putative beta-1,3-glucanase [Arabidopsis thaliana]
  misc_feature (26)..(369): Homolog of NCBI NO: 18401187 NR Description: glycosyl hydrolase family 17 [Arabidopsis

SEQ ID NO: 20186 - protein, 390 aa, Zea mays subsp. mays; identical to SEQ ID NO: 16782
  peptide (1)..(390): Ceres Seq. ID no. 13492555
  misc_feature (27)..(345): Pfam Name: Glycosyl hydrolases family 17 Pfam Description: Glycosyl hydrolases family 17
  misc_feature (27)..(345): Pfam Name: Glycosyl hydrolases family 17 Pfam Description: Glycosyl hydrolases family 17
  misc_feature (88)..(365): Homolog of NCBI NO: 30683187 NR Description: glycosyl hydrolase family 17 [Arabidopsis
  misc_feature (26)..(362): Homolog of NCBI NO: 25316425 NR Description: probable beta-1,3-glucanase [imported] -
  misc_feature (26)..(362): Homolog of NCBI NO: 18401444 NR Description: glycosyl hydrolase family 17 [Arabidopsis
  misc_feature (88)..(365): Homolog of NCBI NO: 26452328 NR Description: putative beta-1,3-glucanase [Arabidopsis
  misc_feature (25)..(358): Homolog of NCBI NO: 15209173 NR Description: putative elicitor inducible chitinase [Solanum
  misc_feature (88)..(365): Homolog of NCBI NO: 26452328 NR Description: putative beta-1,3-glucanase [Arabidopsis
  misc_feature (22)..(385): Homolog of NCBI NO: 11994352 NR Description: beta-1,3-glucanase-like protein [Arabidopsis
  misc_feature (22)..(362): Homolog of NCBI NO: 7447981 NR Description: probable beta-1,3-glucanase At2g26600
  misc_feature (26)..(362): Homolog of NCBI NO: 18401444 NR Description: glycosyl hydrolase family 17 [Arabidopsis
  misc_feature (26)..(362): Homolog of NCBI NO: 25316425 NR Description: probable beta-1,3-glucanase [imported] -
  misc_feature (88)..(365): Homolog of NCBI NO: 30683187 NR Description: glycosyl hydrolase family 17 [Arabidopsis
  misc_feature (22)..(365): Homolog of NCBI NO: 18401187 NR Description: glycosyl hydrolase family 17 [Arabidopsis
  misc_feature (22)..(365): Homolog of NCBI NO: 21618052 NR Description: putative beta-1,3-glucanase [Arabidopsis thaliana]
  misc_feature (9)..(385): Homolog of NCBI NO: 15232696 NR Description: glycosyl hydrolase family 17 [Arabidopsis
  misc_feature (25)..(358): Homolog of NCBI NO: 15209173 NR Description: putative elicitor inducible chitinase [Solanum
  misc_feature (22)..(385): Homolog of NCBI NO: 11994352 NR Description: beta-1,3-glucanase-like protein [Arabidopsis
  misc_feature (9)..(385): Homolog of NCBI NO: 15232696 NR Description: glycosyl hydrolase family 17 [Arabidopsis
  misc_feature (22)..(362): Homolog of NCBI NO: 7447981 NR Description: probable beta-1,3-glucanase At2g26600
  misc_feature (22)..(365): Homolog of NCBI NO: 21618052 NR Description: putative beta-1,3-glucanase [Arabidopsis thaliana]
  misc_feature (22)..(365): Homolog of NCBI NO: 18401187 NR Description: glycosyl hydrolase family 17 [Arabidopsis

SEQ ID NO: 20187 - protein, 303 aa, Zea mays subsp. mays; identical to SEQ ID NO: 16783
  peptide (1)..(303): Ceres Seq. ID no. 13492556
  misc_feature (1)..(258): Pfam Name: Glycosyl hydrolases family 17 Pfam Description: Glycosyl hydrolases family 17
  misc_feature (1)..(258): Pfam Name: Glycosyl hydrolases family 17 Pfam Description: Glycosyl hydrolases family 17
  misc_feature (1)..(278): Homolog of NCBI NO: 30683187 NR Description: glycosyl hydrolase family 17 [Arabidopsis
  misc_feature (1)..(275): Homolog of NCBI NO: 25316425 NR Description: probable beta-1,3-glucanase [imported] -
  misc_feature (1)..(275): Homolog of NCBI NO: 18401444 NR Description: glycosyl hydrolase family 17 [Arabidopsis
  misc_feature (1)..(278): Homolog of NCBI NO: 26452328 NR Description: putative beta-1,3-glucanase [Arabidopsis
  misc_feature (1)..(271): Homolog of NCBI NO: 15209173 NR Description: putative elicitor inducible chitinase [Solanum
  misc_feature (1)..(278): Homolog of NCBI NO: 30683187 NR Description: glycosyl hydrolase family 17 [Arabidopsis
  misc_feature (1)..(275): Homolog of NCBI NO: 18401444 NR Description: glycosyl hydrolase family 17 [Arabidopsis
  misc_feature (1)..(271): Homolog of NCBI NO: 15209173 NR Description: putative elicitor inducible chitinase [Solanum
  misc_feature (1)..(278): Homolog of NCBI NO: 18401187 NR Description: glycosyl hydrolase family 17 [Arabidopsis
  misc_feature (1)..(278): Homolog of NCBI NO: 21618052 NR Description: putative beta-1,3-glucanase [Arabidopsis thaliana]
  misc_feature (1)..(275): Homolog of NCBI NO: 7447981 NR Description: probable beta-1,3-glucanase At2g26600
  misc_feature (1)..(298): Homolog of NCBI NO: 15232696 NR Description: glycosyl hydrolase family 17 [Arabidopsis
  misc_feature (1)..(298): Homolog of NCBI NO: 11994352 NR Description: beta-1,3-glucanase-like protein [Arabidopsis
  misc_feature (1)..(278): Homolog of NCBI NO: 26452328 NR Description: putative beta-1,3-glucanase [Arabidopsis
  misc_feature (1)..(275): Homolog of NCBI NO: 25316425 NR Description: probable beta-1,3-glucanase [imported] -
  misc_feature (1)..(298): Homolog of NCBI NO: 11994352 NR Description: beta-1,3-glucanase-like protein [Arabidopsis
  misc_feature (1)..(298): Homolog of NCBI NO: 15232696 NR Description: glycosyl hydrolase family 17 [Arabidopsis
  misc_feature (1)..(275): Homolog of NCBI NO: 7447981 NR Description: probable beta-1,3-glucanase At2g26600
  misc_feature (1)..(278): Homolog of NCBI NO: 21618052 NR Description: putative beta-1,3-glucanase [Arabidopsis thaliana]
  misc_feature (1)..(278): Homolog of NCBI NO: 18401187 NR Description: glycosyl hydrolase family 17 [Arabidopsis

SEQ ID NO: 20188 - DNA, 476 bp, Zea mays subsp. mays
  misc_feature (1)..(476): Ceres Seq. ID no. 11028215
  misc_feature: MA Experiment ID: 108527 Result: Down-regulated in Transcription
  misc_feature: MA Experiment 108527 PARAMETER Experiment Name: Zm_5mM_NO_P Parameter: Age (day) Value: 8
  misc_feature: MA Experiment 108527 PARAMETER Experiment Name: Zm_5mM_NO_P Parameter: Organism Value: Zea mays
  misc_feature: MA Experiment 108527 PARAMETER Experiment Name: Zm_5mM_NO_P Parameter: Plant Line Value: 35A19
  misc_feature: MA Experiment 108527 PARAMETER Experiment Name: Zm_5mM_NO_P Parameter: Timepoint (hr) Value: 6
  misc_feature: MA Experiment 108527 PARAMETER Experiment Name: Zm_5mM_NO_P Parameter: Tissue Value: Aerial
  misc_feature: MA Experiment 108527 PARAMETER Experiment Name: Zm_5mM_NO_P Parameter: Treatment Value: 5mM NO vs. No Treatment
aatatttttagccgcttttcggttggtggtgcctggcatctaccgtgcggagggggaagagggagaggccaggagaggaaagcctgcagccaccatggattccgacctctggatctcgcgtctcacggccgccnggcggcagtttgcgctgcagcgcgcgcagcgccagcacgccgccccggcatcccatcacgatcgatttgggtatgatgatatcgaacctgaggatgatttgcactcagacttcccatgcccttactgttatgaagatcatgatgttgcttctctctgcgcccatttggaggacgagcaccctttcgagtctaaaattgtgaaacatcaaagagtacgcagagttactggtaatggcaaccacaatctctcctatgcagggagagatcttcaactgcaagagacctacttaaaggtgcttcttggaaatagcagtcgaagcagcagtacaatgcatcaagtac

SEQ ID NO: 20189 - protein, 158 aa, Zea mays subsp. mays
  peptide (1)..(158): Ceres Seq. ID no. 11028216
  misc_feature (68)..(109): Homolog of NCBI NO: 15028023 NR Description: unknown protein [Arabidopsis thaliana]
  misc_feature (68)..(109): Homolog of NCBI NO: 1076316 NR Description: drought-induced protein Di19 - Arabidopsis
  misc_feature (32)..(141): Homolog of NCBI NO: 26452595 NR Description: unknown protein [Arabidopsis thaliana]
  misc_feature (32)..(117): Homolog of NCBI NO: 15217855 NR Description: hypothetical protein; protein id: At1g02750.1
  misc_feature (68)..(109): Homolog of NCBI NO: 18377875 NR Description: AT3g06760/F3E22_10 [Arabidopsis thaliana]
  misc_feature (68)..(109): Homolog of NCBI NO: 15230782 NR Description: unknown protein; protein id: At3g06760.1
  misc_feature (32)..(109): Homolog of NCBI NO: 28393233 NR Description: unknown protein [Arabidopsis thaliana]
  misc_feature (32)..(109): Homolog of NCBI NO: 15230036 NR Description: unknown protein; protein id: At3g05700.1
  misc_feature (32)..(109): Homolog of NCBI NO: 15240426 NR Description: drought-induced protein - like; protein id:
  misc_feature (32)..(109): Homolog of NCBI NO: 25992529 NR Description: fiber protein Fb2 [Gossypium barbadense]
  misc_feature (45)..(45): Xaa is any aa, unknown or other
IFLAAFRLVVPGIYRAEGEEGEARRGKPAATMDSDLWISRLTAAXRQFALQRAQRQHAAPASHHDRFGYDDIEPEDDLHSDFPCPYCYEDHDVASLCAHLEDEHPFESKIVKHQRVRRVTGNGNHNLSYAGRDLQLQETYLKVLLGNSSRSSSTMHQV

SEQ ID NO: 20190 - protein, 127 aa, Zea mays subsp. mays
  peptide (1)..(127): Ceres Seq. ID no. 11028217
  misc_feature (37)..(78): Homolog of NCBI NO: 15028023 NR Description: unknown protein [Arabidopsis thaliana]
  misc_feature (37)..(78): Homolog of NCBI NO: 1076316 NR Description: drought-induced protein Di19 - Arabidopsis
  misc_feature (1)..(110): Homolog of NCBI NO: 26452595 NR Description: unknown protein [Arabidopsis thaliana]
  misc_feature (1)..(86): Homolog of NCBI NO: 15217855 NR Description: hypothetical protein; protein id: At1g02750.1
  misc_feature (37)..(78): Homolog of NCBI NO: 18377875 NR Description: AT3g06760/F3E22_10 [Arabidopsis thaliana]
  misc_feature (37)..(78): Homolog of NCBI NO: 15230782 NR Description: unknown protein; protein id: At3g06760.1
  misc_feature (1)..(78): Homolog of NCBI NO: 28393233 NR Description: unknown protein [Arabidopsis thaliana]
  misc_feature (1)..(78): Homolog of NCBI NO: 15230036 NR Description: unknown protein; protein id: At3g05700.1
  misc_feature (1)..(78): Homolog of NCBI NO: 15240426 NR Description: drought-induced protein - like; protein id:
  misc_feature (1)..(78): Homolog of NCBI NO: 25992529 NR Description: fiber protein Fb2 [Gossypium barbadense]
  misc_feature (14)..(14): Xaa is any aa, unknown or other
MDSDLWISRLTAAXRQFALQRAQRQHAAPASHHDRFGYDDIEPEDDLHSDFPCPYCYEDHDVASLCAHLEDEHPFESKIVKHQRVRRVTGNGNHNLSYAGRDLQLQETYLKVLLGNSSRSSSTMHQV

SEQ ID NO: 20191 - DNA, 1466 bp, Zea mays subsp. mays; identical to SEQ ID NO: 6124
  misc_feature (1)..(1466): Ceres Seq. ID no. 13577847
  misc_feature: MA Experiment ID: 108534 Result: Up-regulated in Transcription
  misc_feature: MA Experiment 108534 PARAMETER Experiment Name: Zm_4deg_Cold_P Parameter: Age (hr) Value: 8
  misc_feature: MA Experiment 108534 PARAMETER Experiment Name: Zm_4deg_Cold_P Parameter: Organism Value: Zea mays
  misc_feature: MA Experiment 108534 PARAMETER Experiment Name: Zm_4deg_Cold_P Parameter: Plant Line Value: 35A19
  misc_feature: MA Experiment 108534 PARAMETER Experiment Name: Zm_4deg_Cold_P Parameter: Temperature (deg C) Value: 4 vs. 22
  misc_feature: MA Experiment 108534 PARAMETER Experiment Name: Zm_4deg_Cold_P Parameter: Timepoint (hr) Value: 6
  misc_feature: MA Experiment 108534 PARAMETER Experiment Name: Zm_4deg_Cold_P Parameter: Tissue Value: Aerial
  misc_feature: MA Experiment ID: 108687 Result: Up-regulated in Transcription
  misc_feature: MA Experiment 108687 PARAMETER Experiment Name: Zm_Embryos-Flowers__P Parameter: Tissue Value: Embryo vs. Aerial+

SEQ ID NO: 20192 - protein, 393 aa, Zea mays subsp. mays; identical to SEQ ID NO: 6125
  peptide (1)..(393): Ceres Seq. ID no. 13577848
  misc_feature (98)..(254): Pfam Name: TCP family transcription factor Pfam Description: TCP family transcription factor
  misc_feature (44)..(393): Homolog of NCBI NO: 7489534 NR Description: probable DNA binding protein PCF2 - rice
  misc_feature (85)..(359): Homolog of NCBI NO: 15225538 NR Description: TCP family transcription factor, putative
  misc_feature (81)..(276): Homolog of NCBI NO: 15242216 NR Description: TCP family transcription factor, putative thaliana] >gi|30696122|ref|NP_851173.1| TCP family transcription putative [Arabidopsis thaliana] >gi|8809685|dbj|BAA97226.1|
  misc_feature (94)..(276): Homolog of NCBI NO: 21592496 NR Description: unknown [Arabidopsis thaliana]
  misc_feature (98)..(391): Homolog of NCBI NO: 15219640 NR Description: TCP family transcription factor, putative
  misc_feature (96)..(358): Homolog of NCBI NO: 15218305 NR Description: TCP family transcription factor, putative
  misc_feature (102)..(258): Homolog of NCBI NO: 18409345 NR Description: TCP family transcription factor, putative
  misc_feature (103)..(212): Homolog of NCBI NO: 5731257 NR Description: auxin-induced basic helix-loop-helix
  misc_feature (97)..(237): Homolog of NCBI NO: 15237274 NR Description: TCP family transcription factor, putative thaliana] >gi|10177817|dbj|BAB11183.1| gene_id:MKD15.14~unknown
  misc_feature (97)..(237): Homolog of NCBI NO: 26452377 NR Description: unknown protein [Arabidopsis thaliana]

SEQ ID NO: 20193 - protein, 350 aa, Zea mays subsp. mays; identical to SEQ ID NO: 6126
  peptide (1)..(350): Ceres Seq. ID no. 13577849
  misc_feature (55)..(211): Pfam Name: TCP family transcription factor Pfam Description: TCP family transcription factor
  misc_feature (1)..(350): Homolog of NCBI NO: 7489534 NR Description: probable DNA binding protein PCF2 - rice
  misc_feature (42)..(316): Homolog of NCBI NO: 15225538 NR Description: TCP family transcription factor, putative
  misc_feature (38)..(233): Homolog of NCBI NO: 15242216 NR Description: TCP family transcription factor, putative thaliana] >gi|30696122|ref|NP_851173.1| TCP family transcription putative [Arabidopsis thaliana] >gi|8809685|dbj|BAA97226.1|
  misc_feature (51)..(233): Homolog of NCBI NO: 21592496 NR Description: unknown [Arabidopsis thaliana]
  misc_feature (55)..(348): Homolog of NCBI NO: 15219640 NR Description: TCP family transcription factor, putative
  misc_feature (53)..(315): Homolog of NCBI NO: 15218305 NR Description: TCP family transcription factor, putative
  misc_feature (59)..(215): Homolog of NCBI NO: 18409345 NR Description: TCP family transcription factor, putative
  misc_feature (60)..(169): Homolog of NCBI NO: 5731257 NR Description: auxin-induced basic helix-loop-helix
  misc_feature (54)..(194): Homolog of NCBI NO: 15237274 NR Description: TCP family transcription factor, putative thaliana] >gi|10177817|dbj|BAB11183.1| gene_id:MKD15.14~unknown
  misc_feature (54)..(194): Homolog of NCBI NO: 26452377 NR Description: unknown protein [Arabidopsis thaliana]

SEQ ID NO: 20194 - protein, 322 aa, Zea mays subsp. mays; identical to SEQ ID NO: 6127
  peptide (1)..(322): Ceres Seq. ID no. 13577850
  misc_feature (27)..(183): Pfam Name: TCP family transcription factor Pfam Description: TCP family transcription factor
  misc_feature (1)..(322): Homolog of NCBI NO: 7489534 NR Description: probable DNA binding protein PCF2 - rice
  misc_feature (14)..(288): Homolog of NCBI NO: 15225538 NR Description: TCP family transcription factor, putative
  misc_feature (10)..(205): Homolog of NCBI NO: 15242216 NR Description: TCP family transcription factor, putative thaliana] >gi|30696122|ref|NP_851173.1| TCP family transcription putative [Arabidopsis thaliana] >gi|8809685|dbj|BAA97226.1|
  misc_feature (23)..(205): Homolog of NCBI NO: 21592496 NR Description: unknown [Arabidopsis thaliana]
  misc_feature (27)..(320): Homolog of NCBI NO: 15219640 NR Description: TCP family transcription factor, putative
  misc_feature (25)..(287): Homolog of NCBI NO: 15218305 NR Description: TCP family transcription factor, putative
  misc_feature (31)..(187): Homolog of NCBI NO: 18409345 NR Description: TCP family transcription factor, putative
  misc_feature (32)..(141): Homolog of NCBI NO: 5731257 NR Description: auxin-induced basic helix-loop-helix
  misc_feature (26)..(166): Homolog of NCBI NO: 15237274 NR Description: TCP family transcription factor, putative thaliana] >gi|10177817|dbj|BAB11183.1| gene_id:MKD15.14~unknown
  misc_feature (26)..(166): Homolog of NCBI NO: 26452377 NR Description: unknown protein [Arabidopsis thaliana]

SEQ ID NO: 20195 - DNA, 1520 bp, Zea mays subsp. mays
  misc_feature (1)..(1520): Ceres Seq. ID no. 12378208
  misc_feature: MA Experiment ID: 108527 Result: Down-regulated in Transcription
  misc_feature: MA Experiment 108527 PARAMETER Experiment Name: Zm_5mM_NO_P Parameter: Age (day) Value: 8
  misc_feature: MA Experiment 108527 PARAMETER Experiment Name: Zm_5mM_NO_P Parameter: Organism Value: Zea mays
  misc_feature: MA Experiment 108527 PARAMETER Experiment Name: Zm_5mM_NO_P Parameter: Plant Line Value: 35A19
  misc_feature: MA Experiment 108527 PARAMETER Experiment Name: Zm_5mM_NO_P Parameter: Timepoint (hr) Value: 6
  misc_feature: MA Experiment 108527 PARAMETER Experiment Name: Zm_5mM_NO_P Parameter: Tissue Value: Aerial
  misc_feature: MA Experiment 108527 PARAMETER Experiment Name: Zm_5mM_NO_P Parameter: Treatment Value: 5mM NO vs. No Treatment
  misc_feature: MA Experiment ID: 108528 Result: Up-regulated in Transcription
  misc_feature: MA Experiment 108528 PARAMETER Experiment Name: Zm_Imbibed_Seeds_P Parameter: Age (day) Value: 5 vs. 2
  misc_feature: MA Experiment 108528 PARAMETER Experiment Name: Zm_Imbibed_Seeds_P Parameter: Organism Value: Zea mays
  misc_feature: MA Experiment 108528 PARAMETER Experiment Name: Zm_Imbibed_Seeds_P Parameter: Plant Line Value: 35A19
  misc_feature: MA Experiment 108528 PARAMETER Experiment Name: Zm_Imbibed_Seeds_P Parameter: Tissue Value: Aerial vs. Embryo
  misc_feature: MA Experiment ID: 108530 Result: Up-regulated in Transcription
  misc_feature: MA Experiment 108530 PARAMETER Experiment Name: Zm_Imbibed_Seeds_P Parameter: Age (day) Value: 6 vs. 2
  misc_feature: MA Experiment 108530 PARAMETER Experiment Name: Zm_Imbibed_Seeds_P Parameter: Organism Value: Zea mays
  misc_feature: MA Experiment 108530 PARAMETER Experiment Name: Zm_Imbibed_Seeds_P Parameter: Plant Line Value: 35A19
  misc_feature: MA Experiment 108530 PARAMETER Experiment Name: Zm_Imbibed_Seeds_P Parameter: Tissue Value: Aerial vs. Embryo
  misc_feature: MA Experiment ID: 108535 Result: Down-regulated in Transcription
  misc_feature: MA Experiment 108535 PARAMETER Experiment Name: Zm_Meristem_P Parameter: Age (day) Value: 8
  misc_feature: MA Experiment 108535 PARAMETER Experiment Name: Zm_Meristem_P Parameter: Organism Value: Zea mays
  misc_feature: MA Experiment 108535 PARAMETER Experiment Name: Zm_Meristem_P Parameter: Plant Line Value: 35A19
  misc_feature: MA Experiment 108535 PARAMETER Experiment Name: Zm_Meristem_P Parameter: Tissue Value: Root Meristem vs. Above Root Meristem
  misc_feature: MA Experiment ID: 108544 Result: Up-regulated in Transcription
  misc_feature: MA Experiment ID: 108547 Result: Up-regulated in Transcription
  misc_feature: MA Experiment 108547 PARAMETER Experiment Name: Zm_Imbibed_Seeds_P Parameter: Age (day) Value: 4 vs. 2
  misc_feature: MA Experiment 108547 PARAMETER Experiment Name: Zm_Imbibed_Seeds_P Parameter: Organism Value: Zea mays
  misc_feature: MA Experiment 108547 PARAMETER Experiment Name: Zm_Imbibed_Seeds_P Parameter: Plant Line Value: 35A19
  misc_feature: MA Experiment 108547 PARAMETER Experiment Name: Zm_Imbibed_Seeds_P Parameter: Tissue Value: Aerial vs. Embryo
  misc_feature: MA Experiment ID: 108687 Result: Down-regulated in Transcription
  misc_feature: MA Experiment 108687 PARAMETER Experiment Name: Zm_Embryos-Flowers__P Parameter: Tissue Value: Embryo vs. Aerial+
gcacgagaccattacctagaacatcctaatcgaaaagttccgtttcggtccgtcctccggtaacgcgctcgcctgctccgcttggctcatggattttcctccagggagcctccaatcgtggggtccaggtcgatgaggcggccctctccgctgaatctggcgatggtccgcggcggcagtcgccgatcaaacaccgtcaaaactttgcaggcccctggggcgtccacttccggtgccgagagcagcgccgtggagatgggcaccgagaagtccgaagtgtacagcactaacatgacgcaggctatgggagcagcgttgacatatagacatgaactcgggatgaactacaatttcatacgcccagacttgattgtaggatcctgcttacagagtccacttgatgttgataagcttcggaagattggtgtcaaaactgtattctgcttgcagcaagattcagatcttgaatattttggagtcgacatccgtgccattcaagattattctctacaattcaaagatattgtgcactgccgtgcggaaattagggattttgatgcttttgatttgcgattgaggcttcctgctgtggttagcaaattgcacaaacttatcaactgtaatggtggtgtaacatatatacattgtactgctggacttggaagagctcctgctgttgcattggcttatatgttctggattcttgggtacagtctcaatgaaggacatcggctgctacagagtaaaagggctttgctttccgaagttggaagccattaagttggcaactgctgacattcttgacaggattatccaaaaacacaatcactttgaagtgggaagctgatggttcttcctctgttgaaatttctgggctcgacattggctggggtcagagaattcctttgacatatgatgaggagaaaggagcttggtttcttgagaaagagttgcctgaaggacggtatgaatacaaatacgtagtggatggcaaatggctatgcaacgagcatgagctgataacgaaaccgaatgctgacggccacgtgaacaactatgttcaggtctccagagacggcacgagcgatgaagagaaggagcttagggagcggttgactggtcgggaccctgatctcacggaccaggagaggctgatgatcagagagtacttggaacagtacgcggatgccgccgagcgctaggagaagaatgatgatgactgaggaagagaagagacacaccatgagacgacggaccgaagccgacctgaccgcaccttcctttacggagaggtcgggcttcccctctcttgtcaatcaaatactcgtagcttaaccgtgcaaaagggcacgttctgctcgcatacttggagaatgatgatgaaggagcaaactgtacgtattgttgaacagcagctgtgcagaaataacaaaggtagtagcgtaaaactactgtactgaccataatgttactactgtatgctccttcttggctatgaataataataataataataaaag

SEQ ID NO: 20196 - protein, 215 aa, Zea mays subsp. mays
  peptide (1)..(215): Ceres Seq. ID no. 12378209
  misc_feature (138)..(209): Pfam Name: Dual specificity phosphatase, catalytic domain Pfam Description: Dual specificity phosphatase, catalytic domain
  misc_feature (37)..(206): Homolog of NCBI NO: 18399058 NR Description: expressed protein
  misc_feature (1)..(206): Homolog of NCBI NO: 21592631 NR Description: unknown [Arabidopsis thaliana]
  misc_feature (113)..(207): Homolog of NCBI NO: 11544661 NR Description: PTPKIS1 (truncated form) [Arabidopsis thaliana]
  misc_feature (184)..(207): Homolog of NCBI NO: 34902388 NR Description: Unknown protein [Oryza sativa (japonica
  misc_feature (11)..(60): Homolog of NCBI NO: 34902388 NR Description: Unknown protein [Oryza sativa (japonica
  misc_feature (1)..(207): Homolog of NCBI NO: 11288831 NR Description: hypothetical protein F4F15.290 - Arabidopsis
  misc_feature (1)..(207): Homolog of NCBI NO: 16612246 NR Description: AT3g52180/F4F15_290 [Arabidopsis thaliana]
  misc_feature (1)..(207): Homolog of NCBI NO: 21536905 NR Description: unknown [Arabidopsis thaliana]
  misc_feature (1)..(207): Homolog of NCBI NO: 18409505 NR Description: putative protein
  misc_feature (33)..(207): Homolog of NCBI NO: 14970762 NR Description: protein tyrosine phosphatase [Lycopersicon
MRRPSPLNLAMVRGGSRRSNTVKTLQAPGASTSGAESSAVEMGTEKSEVYSTNMTQAMGAALTYRHELGMNYNFIRPDLIVGSCLQSPLDVDKLRKIGVKTVFCLQQDSDLEYFGVDIRAIQDYSLQFKDIVHCRAEIRDFDAFDLRLRLPAVVSKLHKLINCNGGVTYIHCTAGLGRAPAVALAYMFWILGYSLNEGHRLLQSKRALLSEVGSH

SEQ ID NO: 20197 - protein, 205 aa, Zea mays subsp. mays
  peptide (1)..(205): Ceres Seq. ID no. 12378210
  misc_feature (128)..(199): Pfam Name: Dual specificity phosphatase, catalytic domain Pfam Description: Dual specificity phosphatase, catalytic domain
  misc_feature (27)..(196): Homolog of NCBI NO: 18399058 NR Description: expressed protein
  misc_feature (1)..(196): Homolog of NCBI NO: 21592631 NR Description: unknown [Arabidopsis thaliana]
  misc_feature (103)..(197): Homolog of NCBI NO: 11544661 NR Description: PTPKIS1 (truncated form) [Arabidopsis thaliana]
  misc_feature (174)..(197): Homolog of NCBI NO: 34902388 NR Description: Unknown protein [Oryza sativa (japonica
  misc_feature (1)..(50): Homolog of NCBI NO: 34902388 NR Description: Unknown protein [Oryza sativa (japonica
  misc_feature (1)..(197): Homolog of NCBI NO: 11288831 NR Description: hypothetical protein F4F15.290 - Arabidopsis
  misc_feature (1)..(197): Homolog of NCBI NO: 16612246 NR Description: AT3g52180/F4F15_290 [Arabidopsis thaliana]
  misc_feature (1)..(197): Homolog of NCBI NO: 21536905 NR Description: unknown [Arabidopsis thaliana]
  misc_feature (1)..(197): Homolog of NCBI NO: 18409505 NR Description: putative protein
  misc_feature (23)..(197): Homolog of NCBI NO: 14970762 NR Description: protein tyrosine phosphatase [Lycopersicon
MVRGGSRRSNTVKTLQAPGASTSGAESSAVEMGTEKSEVYSTNMTQAMGAALTYRHELGMNYNFIRPDLIVGSCLQSPLDVDKLRKIGVKTVFCLQQDSDLEYFGVDIRAIQDYSLQFKDIVHCRAEIRDFDAFDLRLRLPAVVSKLHKLINCNGGVTYIHCTAGLGRAPAVALAYMFWILGYSLNEGHRLLQSKRALLSEVGSH

SEQ ID NO: 20198 - protein, 174 aa, Zea mays subsp. mays
  peptide (1)..(174): Ceres Seq. ID no. 12378211
  misc_feature (97)..(168): Pfam Name: Dual specificity phosphatase, catalytic domain Pfam Description: Dual specificity phosphatase, catalytic domain
  misc_feature (1)..(19): Homolog of NCBI NO: 34902388 NR Description: Unknown protein [Oryza sativa (japonica
  misc_feature (1)..(166): Homolog of NCBI NO: 11288831 NR Description: hypothetical protein F4F15.290 - Arabidopsis
  misc_feature (1)..(166): Homolog of NCBI NO: 16612246 NR Description: AT3g52180/F4F15_290 [Arabidopsis thaliana]
  misc_feature (1)..(165): Homolog of NCBI NO: 18399058 NR Description: expressed protein
  misc_feature (72)..(166): Homolog of NCBI NO: 11544661 NR Description: PTPKIS1 (truncated form) [Arabidopsis thaliana]
  misc_feature (143)..(166): Homolog of NCBI NO: 34902388 NR Description: Unknown protein [Oryza sativa (japonica
  misc_feature (1)..(165): Homolog of NCBI NO: 21592631 NR Description: unknown [Arabidopsis thaliana]
  misc_feature (1)..(166): Homolog of NCBI NO: 21536905 NR Description: unknown [Arabidopsis thaliana]
  misc_feature (1)..(166): Homolog of NCBI NO: 18409505 NR Description: putative protein
  misc_feature (1)..(166): Homolog of NCBI NO: 14970762 NR Description: protein tyrosine phosphatase [Lycopersicon
MGTEKSEVYSTNMTQAMGAALTYRHELGMNYNFIRPDLIVGSCLQSPLDVDKLRKIGVKTVFCLQQDSDLEYFGVDIRAIQDYSLQFKDIVHCRAEIRDFDAFDLRLRLPAVVSKLHKLINCNGGVTYIHCTAGLGRAPAVALAYMFWILGYSLNEGHRLLQSKRALLSEVGSH

SEQ ID NO: 20199 - DNA, 1091 bp, Zea mays subsp. mays
  misc_feature (1)..(1091): Ceres Seq. ID no. 12566444
  misc_feature: MA Experiment ID: 108527 Result: Up-regulated in Transcription
  misc_feature: MA Experiment 108527 PARAMETER Experiment Name: Zm_5mM_NO_P Parameter: Age (day) Value: 8
  misc_feature: MA Experiment 108527 PARAMETER Experiment Name: Zm_5mM_NO_P Parameter: Organism Value: Zea mays
  misc_feature: MA Experiment 108527 PARAMETER Experiment Name: Zm_5mM_NO_P Parameter: Plant Line Value: 35A19
  misc_feature: MA Experiment 108527 PARAMETER Experiment Name: Zm_5mM_NO_P Parameter: Timepoint (hr) Value: 6
  misc_feature: MA Experiment 108527 PARAMETER Experiment Name: Zm_5mM_NO_P Parameter: Tissue Value: Aerial
  misc_feature: MA Experiment 108527 PARAMETER Experiment Name: Zm_5mM_NO_P Parameter: Treatment Value: 5mM NO vs. No Treatment
  misc_feature: MA Experiment ID: 108543 Result: Up-regulated in Transcription
aaaacagatcccaagtgctgccggcgagccagccggcctccatcttgtagcgaccgttcgtgacgtcgatgggtgacttcgtgggccacgtgctgccgggcacgctgctgctggcggtgggcctgtggcgggtgtgggcgtcagtggcgcgcttcggggccgacccggcggcgttccgcgtccgctcctggaaccccgtcccggcggcggggccgcggctgctggagctgcacgtggtggccggcggcgcgttcctggacatgtgcgtggagctctactacgccaacccgctccgcgtcctcaccggcggcggggtcgacccgggccacctcggcggcctcgagcacgccagcatgctcctcatgttcttcctcttcggcgcgctcgccctcgtctccgagaagaccaggtacctgcctttatcggacggcgcgctgagcctggtgttcgcgagcgcattcacggcagagttcctgctcttctacttccactccaccacgcacgcggggctggagggctactaccaccgcctcctcctcgccgtcctcgccctctgcatcgccgcgctcgtcgccggcgcgctcctgcccgccagcttccccgccgacctcggcgccggcgtcctcatcgccgtccagggcctgtggttctaccaggccgcgctcacgctgtacggccccatgctccccgcgggctgcgtccgccacttcgactcccctcactccgacgcccgcatcgagtgccacggcggcgccgcgcaggagcgcgccgagcagctggccaacttccagctgttcgggctcgtgttcctcgcgttcttctacgcgctcgggtgctacgccgtgactgcggcaaggtatgggaataacctggagctgacgacggtccatcacacacatgtggctgcgactgccatgtagaaggagaacaaagtgcacgatctagtggccacggatctctttttttcttcttgttcagttcagagtacgtagggcaggcgagtacatgaatggctgggctgttcaaaagaagctcgagtgtgatcttacttaccgcatggacctgtcactgtaaaatgtcaagttcgagcc

SEQ ID NO: 20200 - protein, 283 aa, Zea mays subsp. mays
  peptide (1)..(283): Ceres Seq. ID no. 12566445
  misc_feature (114)..(266): Pfam Name: Family of unknown function (DUF716) Pfam Description: Family of unknown function (DUF716)
  misc_feature (1)..(269): Homolog of NCBI NO: 15222675 NR Description: unknown protein; protein id: At1g55230.1
  misc_feature (1)..(269): Homolog of NCBI NO: 15241195 NR Description: putative protein; protein id: At5g19870.1
  misc_feature (1)..(277): Homolog of NCBI NO: 30695897 NR Description: expressed protein [Arabidopsis thaliana]
  misc_feature (1)..(265): Homolog of NCBI NO: 15222573 NR Description: hypothetical protein; protein id: At1g32120.1
  misc_feature (1)..(266): Homolog of NCBI NO: 32470632 NR Description: putative plant viral-response family protein
  misc_feature (6)..(280): Homolog of NCBI NO: 4680346 NR Description: hypothetical protein [Oryza sativa subsp. indica]
  misc_feature (1)..(280): Homolog of NCBI NO: 4680337 NR Description: hypothetical protein [Oryza sativa subsp. indica]
  misc_feature (1)..(280): Homolog of NCBI NO: 4680504 NR Description: hypothetical protein [Oryza sativa]
  misc_feature (1)..(283): Homolog of NCBI NO: 4416307 NR Description: hypothetical protein [Zea mays]
  misc_feature (1)..(280): Homolog of NCBI NO: 22208473 NR Description: hypothetical protein [Sorghum bicolor]
MGDFVGHVLPGTLLLAVGLWRVWASVARFGADPAAFRVRSWNPVPAAGPRLLELHVVAGGAFLDMCVELYYANPLRVLTGGGVDPGHLGGLEHASMLLMFFLFGALALVSEKTRYLPLSDGALSLVFASAFTAEFLLFYFHSTTHAGLEGYYHRLLLAVLALCIAALVAGALLPASFPADLGAGVLIAVQGLWFYQAALTLYGPMLPAGCVRHFDSPHSDARIECHGGAAQERAEQLANFQLFGLVFLAFFYALGCYAVTAARYGNNLELTTVHHTHVAATAM

SEQ ID NO: 20201 - protein, 219 aa, Zea mays subsp. mays
  peptide (1)..(219): Ceres Seq. ID no. 12566446
  misc_feature (50)..(202): Pfam Name: Family of unknown function (DUF716) Pfam Description: Family of unknown function (DUF716)
  misc_feature (1)..(205): Homolog of NCBI NO: 15222675 NR Description: unknown protein; protein id: At1g55230.1
  misc_feature (1)..(205): Homolog of NCBI NO: 15241195 NR Description: putative protein; protein id: At5g19870.1
  misc_feature (1)..(213): Homolog of NCBI NO: 30695897 NR Description: expressed protein [Arabidopsis thaliana]
  misc_feature (1)..(201): Homolog of NCBI NO: 15222573 NR Description: hypothetical protein; protein id: At1g32120.1
  misc_feature (1)..(202): Homolog of NCBI NO: 32470632 NR Description: putative plant viral-response family protein
  misc_feature (1)..(216): Homolog of NCBI NO: 4680346 NR Description: hypothetical protein [Oryza sativa subsp. indica]
  misc_feature (1)..(216): Homolog of NCBI NO: 4680337 NR Description: hypothetical protein [Oryza sativa subsp. indica]
  misc_feature (1)..(216): Homolog of NCBI NO: 4680504 NR Description: hypothetical protein [Oryza sativa]
  misc_feature (1)..(219): Homolog of NCBI NO: 4416307 NR Description: hypothetical protein [Zea mays]
  misc_feature (1)..(216): Homolog of NCBI NO: 22208473 NR Description: hypothetical protein [Sorghum bicolor]
MCVELYYANPLRVLTGGGVDPGHLGGLEHASMLLMFFLFGALALVSEKTRYLPLSDGALSLVFASAFTAEFLLFYFHSTTHAGLEGYYHRLLLAVLALCIAALVAGALLPASFPADLGAGVLIAVQGLWFYQAALTLYGPMLPAGCVRHFDSPHSDARIECHGGAAQERAEQLANFQLFGLVFLAFFYALGCYAVTAARYGNNLELTTVHHTHVAATAM

SEQ ID NO: 20202 - protein, 188 aa, Zea mays subsp. mays
  peptide (1)..(188): Ceres Seq. ID no. 12566447
  misc_feature (19)..(171): Pfam Name: Family of unknown function (DUF716) Pfam Description: Family of unknown function (DUF716)
  misc_feature (1)..(174): Homolog of NCBI NO: 15222675 NR Description: unknown protein; protein id: At1g55230.1
  misc_feature (1)..(174): Homolog of NCBI NO: 15241195 NR Description: putative protein; protein id: At5g19870.1
  misc_feature (1)..(182): Homolog of NCBI NO: 30695897 NR Description: expressed protein [Arabidopsis thaliana]
  misc_feature (1)..(170): Homolog of NCBI NO: 15222573 NR Description: hypothetical protein; protein id: At1g32120.1
  misc_feature (1)..(171): Homolog of NCBI NO: 32470632 NR Description: putative plant viral-response family protein
  misc_feature (1)..(185): Homolog of NCBI NO: 4680346 NR Description: hypothetical protein [Oryza sativa subsp. indica]
  misc_feature (1)..(185): Homolog of NCBI NO: 4680337 NR Description: hypothetical protein [Oryza sativa subsp. indica]
  misc_feature (1)..(185): Homolog of NCBI NO: 4680504 NR Description: hypothetical protein [Oryza sativa]
  misc_feature (1)..(188): Homolog of NCBI NO: 4416307 NR Description: hypothetical protein [Zea mays]
  misc_feature (1)..(185): Homolog of NCBI NO: 22208473 NR Description: hypothetical protein [Sorghum bicolor]
MLLMFFLFGALALVSEKTRYLPLSDGALSLVFASAFTAEFLLFYFHSTTHAGLEGYYHRLLLAVLALCIAALVAGALLPASFPADLGAGVLIAVQGLWFYQAALTLYGPMLPAGCVRHFDSPHSDARIECHGGAAQERAEQLANFQLFGLVFLAFFYALGCYAVTAARYGNNLELTTVHHTHVAATAM

SEQ ID NO: 20203 - DNA, 1814 bp, Zea mays subsp. mays
  misc_feature (1)..(1814): Ceres Seq. ID no. 12443273
  misc_feature: MA Experiment ID: 108556 Result: Down-regulated in Transcription
  misc_feature: MA Experiment 108556 PARAMETER Experiment Name: Zm_Drought_P Parameter: Age (day) Value: 9
  misc_feature: MA Experiment 108556 PARAMETER Experiment Name: Zm_Drought_P Parameter: Organism Value: Zea mays
  misc_feature: MA Experiment 108556 PARAMETER Experiment Name: Zm_Drought_P Parameter: Plant Line Value: 35A19
  misc_feature: MA Experiment 108556 PARAMETER Experiment Name: Zm_Drought_P Parameter: Timepoint (hr) Value: 24
  misc_feature: MA Experiment 108556 PARAMETER Experiment Name: Zm_Drought_P Parameter: Tissue Value: Aerial
  misc_feature: MA Experiment 108556 PARAMETER Experiment Name: Zm_Drought_P Parameter: Treatment Value: Drought vs. No Drought
aggacccctattcttggctcagcaaatcctctcctcggcgcaaaggcatggagcgaatgctcatcccacctgaccacattttcccccacagagatcacatttaccgcgcacaaagcaccaacaacgatccacagcctgtttgcgagatctttagcacaaggagggaggcaggcatatagactcccacccgtgctctcattgtcagcacaacgaggcctgcggatcggtctgtgcgttctagagagaggggacgaggtttacccactgcgagagcggagaggggcagagaagagatccaaggttctggtacgtacagctgggagaagatgagctgcttcggatgcttcaagcccgacaagaaggtgccacccaggaggacggaatccagggaggtcacggtcgtcaacaaggcccccagccagaacgaagcgcctcccagggaatctgggtccatcaggccaccaccagttgcttcgaagcacaagcacagggccatcatctgaaacagcagcaagcatcgaacctcctaaaggaagttgttctgttgccaaaaccgcaaaagcattcacgttccgtgagctagccacggccacgaaaaacttccgctctgactgccttctcggagaagggggattcggcagggtatacaagggcaggcttgaaaacggacagcttgttgctgtcaagcaactagacctgaatgggtatcaaggcaacagagagttcctagttgaggtcctgatgctcagcctattgcaccatccaaacctagtcaatttggtgggctattgtgcagatggagatcaaaggcttctggtttatgagtacatggcacttggctcacttgcagatcacctgcttgatagcactcctgatcaagtgccactgagttggtatctcaggatgaagatagcttatggaactgcaaaagggcttgaatacctccatgagaaggcgaacccacctgtcatttaccgggatctcaagtcccccaacatccttctcgatgagaagtacaaccctaagctctcagattttgggctcgcaaagcttggcccagttgagggaaagacacacatctccactcgggtgatgggaacgtatgggtactgcgctccggaatacataagaacaggccagctaactgttaagaccgacgtgtacagttttggggttttcctactggagttgatcacaggaagaagagcagtggatacctccaggccagcaagtgaacagatcctggttaactgggtcaagcccatgctgagagacaggaagcgatacaatgagctagtagaccctcatcttagaggtgagtacccagaaaaagacttgagccaggctgtgggtgtggcagcaatgtgcctacaagaggaagcctcagtccggccttacatgagtgatgctgttgtggcactgggattccttgcagaaatgcctgctggctataaacacaaatctggacccatactccaaatgaaacaagttggagatccctcacgaactggtagcactaagcaagataaggatgcgtacaatcgtcaaaaagctgtagctgaggccattgagtggggctcactgaggcagaaacagaaggctcaaaatccagaaaagaaagctctaagtcaaggtatatcccctccagaagccagcagactgtgaaacacctctgctgtgcactaggttaccttctgacttgtaaccctccaattttgtgtaagacttagggccaaattgtcccacatagctgagagtttgtaaatgaaattcgtctctcataaagatgtaaggggtatatagtatttgctgtt

SEQ ID NO: 20204 - protein, 307 aa, Zea mays subsp. mays
  peptide (1)..(307): Ceres Seq. ID no. 12443274
  misc_feature (1)..(231): Homolog of NCBI NO: 34394036 NR Description: putative protein serine/threonine kinase BNK1
  misc_feature (1)..(230): Homolog of NCBI NO: 15230190 NR Description: protein kinase, putative; protein id: At3g24790.1
  misc_feature (1)..(230): Homolog of NCBI NO: 11994661 NR Description: receptor protein kinase-like protein [Arabidopsis
  misc_feature (1)..(305): Homolog of NCBI NO: 34899302 NR Description: putative protein serine/threonine kinase
  misc_feature (1)..(305): Homolog of NCBI NO: 34395193 NR Description: putative protein serine/threonine kinase
  misc_feature (1)..(298): Homolog of NCBI NO: 15238886 NR Description: protein kinase -like protein; protein id:
  misc_feature (249)..(289): Homolog of NCBI NO: 34907210 NR Description: putative serine/threonine kinase PBS1 protein
  misc_feature (1)..(231): Homolog of NCBI NO: 34907210 NR Description: putative serine/threonine kinase PBS1 protein
  misc_feature (1)..(290): Homolog of NCBI NO: 28416685 NR Description: At3g07070 [Arabidopsis thaliana]
  misc_feature (1)..(290): Homolog of NCBI NO: 18397825 NR Description: putative protein kinase; protein id: At3g07070.1
MLSLLHHPNLVNLVGYCADGDQRLLVYEYMALGSLADHLLDSTPDQVPLSWYLRMKIAYGTAKGLEYLHEKANPPVIYRDLKSPNILLDEKYNPKLSDFGLAKLGPVEGKTHISTRVMGTYGYCAPEYIRTGQLTVKTDVYSFGVFLLELITGRRAVDTSRPASEQILVNWVKPMLRDRKRYNELVDPHLRGEYPEKDLSQAVGVAAMCLQEEASVRPYMSDAVVALGFLAEMPAGYKHKSGPILQMKQVGDPSRTGSTKQDKDAYNRQKAVAEAIEWGSLRQKQKAQNPEKKALSQGISPPEASRL

SEQ ID NO: 20205 - protein, 278 aa, Zea mays subsp. mays
  peptide (1)..(278): Ceres Seq. ID no. 12443275
  misc_feature (1)..(202): Homolog of NCBI NO: 34394036 NR Description: putative protein serine/threonine kinase BNK1
  misc_feature (1)..(201): Homolog of NCBI NO: 15230190 NR Description: protein kinase, putative; protein id: At3g24790.1
  misc_feature (1)..(201): Homolog of NCBI NO: 11994661 NR Description: receptor protein kinase-like protein [Arabidopsis
  misc_feature (1)..(276): Homolog of NCBI NO: 34899302 NR Description: putative protein serine/threonine kinase
  misc_feature (1)..(276): Homolog of NCBI NO: 34395193 NR Description: putative protein serine/threonine kinase
  misc_feature (1)..(269): Homolog of NCBI NO: 15238886 NR Description: protein kinase -like protein; protein id:
  misc_feature (220)..(260): Homolog of NCBI NO: 34907210 NR Description: putative serine/threonine kinase PBS1 protein
  misc_feature (1)..(202): Homolog of NCBI NO: 34907210 NR Description: putative serine/threonine kinase PBS1 protein
  misc_feature (1)..(261): Homolog of NCBI NO: 28416685 NR Description: At3g07070 [Arabidopsis thaliana]
  misc_feature (1)..(261): Homolog of NCBI NO: 18397825 NR Description: putative protein kinase; protein id: At3g07070.1
MALGSLADHLLDSTPDQVPLSWYLRMKIAYGTAKGLEYLHEKANPPVIYRDLKSPNILLDEKYNPKLSDFGLAKLGPVEGKTHISTRVMGTYGYCAPEYIRTGQLTVKTDVYSFGVFLLELITGRRAVDTSRPASEQILVNWVKPMLRDRKRYNELVDPHLRGEYPEKDLSQAVGVAAMCLQEEASVRPYMSDAVVALGFLAEMPAGYKHKSGPILQMKQVGDPSRTGSTKQDKDAYNRQKAVAEAIEWGSLRQKQKAQNPEKKALSQGISPPEASRL

SEQ ID NO: 20206 - protein, 253 aa, Zea mays subsp. mays
  peptide (1)..(253): Ceres Seq. ID no. 12443276
  misc_feature (1)..(177): Homolog of NCBI NO: 34394036 NR Description: putative protein serine/threonine kinase BNK1
  misc_feature (1)..(176): Homolog of NCBI NO: 15230190 NR Description: protein kinase, putative; protein id: At3g24790.1
  misc_feature (1)..(176): Homolog of NCBI NO: 11994661 NR Description: receptor protein kinase-like protein [Arabidopsis
  misc_feature (1)..(251): Homolog of NCBI NO: 34899302 NR Description: putative protein serine/threonine kinase
  misc_feature (1)..(251): Homolog of NCBI NO: 34395193 NR Description: putative protein serine/threonine kinase
  misc_feature (1)..(244): Homolog of NCBI NO: 15238886 NR Description: protein kinase -like protein; protein id:
  misc_feature (195)..(235): Homolog of NCBI NO: 34907210 NR Description: putative serine/threonine kinase PBS1 protein
  misc_feature (1)..(177): Homolog of NCBI NO: 34907210 NR Description: putative serine/threonine kinase PBS1 protein
  misc_feature (1)..(236): Homolog of NCBI NO: 28416685 NR Description: At3g07070 [Arabidopsis thaliana]
  misc_feature (1)..(236): Homolog of NCBI NO: 18397825 NR Description: putative protein kinase; protein id: At3g07070.1
MKIAYGTAKGLEYLHEKANPPVIYRDLKSPNILLDEKYNPKLSDFGLAKLGPVEGKTHISTRVMGTYGYCAPEYIRTGQLTVKTDVYSFGVFLLELITGRRAVDTSRPASEQILVNWVKPMLRDRKRYNELVDPHLRGEYPEKDLSQAVGVAAMCLQEEASVRPYMSDAVVALGFLAEMPAGYKHKSGPILQMKQVGDPSRTGSTKQDKDAYNRQKAVAEAIEWGSLRQKQKAQNPEKKALSQGISPPEASRL

SEQ ID NO: 20207 - DNA, 1782 bp, Zea mays subsp. mays
  misc_feature (1)..(1782): Ceres Seq. ID no. 12376897
  misc_feature: MA Experiment ID: 20000492 Result: Down-regulated in Transcription
  misc_feature: MA Experiment 20000492 PARAMETER Experiment Name: Zm_Hybrid_Seed_Dev_P Parameter: DAP Value: 12
  misc_feature: MA Experiment 20000492 PARAMETER Experiment Name: Zm_Hybrid_Seed_Dev_P Parameter: Organism Value: Zea mays
  misc_feature: MA Experiment 20000492 PARAMETER Experiment Name: Zm_Hybrid_Seed_Dev_P Parameter: Plant Line Value: 35A19
  misc_feature: MA Experiment 20000492 PARAMETER Experiment Name: Zm_Hybrid_Seed_Dev_P Parameter: Tissue Value: Fert Kernel vs. Unfert Floret
  misc_feature: MA Experiment ID: 20000626 Result: Down-regulated in Transcription
  misc_feature: MA Experiment 20000626 PARAMETER Experiment Name: Zm_Herbicide-Treatments_P Parameter: Timepoint (hr) Value: 12
  misc_feature: MA Experiment 20000626 PARAMETER Experiment Name: Zm_Herbicide-Treatments_P Parameter: Tissue Value: Aerial
  misc_feature: MA Experiment 20000626 PARAMETER Experiment Name: Zm_Herbicide-Treatments_P Parameter: Treatment Value: Roundup vs. No Treatment
gcacgagaccattacctagaacatcctaatcgaaaaatacgttcccacttctagcgcccccttgctccttcttccccgagccgcgtgcccgcgtcaagtaaccaaacctgtcataggctgatagctctcctctccactcctctttcctcgttgattcctcataccatctcctgcgccaccgacggcgaatccgcgtggcggcgccccgaatctgcgctctccgcgctcagatctcccgcctccgcgcttccggatgagccgcccccatttgcccaaggacccggccttcccgcgcaccaacgggtccttggacggcggggcccgcggccgcggcgagatcgaggaggttggcgctgcggccaccgtaggacgtcgaacagtcccccctgcagtcctcgtctccgtcggcatcgtcgccaccggcggcgatgtcatcgtgcgggcaatacatgctacaccgggtgcgcaagctggacaccctagcgggcgttgccatcaagtacggtgtcgaggtagccgacattaagaggctgaacggcctctcagctgacctccagatgtttgctcacaagacactgcagattccactcccggggaggcatcctccgtcatcataccagcagaatggctcatatgagagtgacgacagggaatgtactccacaccgcattcacgatgatatcttggattcaatattgaaaacaccaaagcccaaagtttcgccagctatgagtcttctgcagggatactatggccttgcaccacctccaaagagagatcaaacaagcgaaggcactgagatggcagtttacagtaaaggcaaatctgcttttctggatgttgagccgtggctggagccgccaaattccgacccattccctctccagaataggaaaaccaaaagcttgacgataggttctcttgatggtgatactgatgagaatggtgacagtgaaaggttcgtaaggcggcgccagaaagctgatggtgagctgttaccgagggaggaaaatggcggtgactttctggcaagcgccggaaaaggcttggcactgaggccaaagtctagcagtcgaccagacatgaacaagagccagcagaatctttttgcaatggcggagcctttgtttggcagcggcgtgcaaactgtaaggaaatcatccagcactccagagttccaggagccagagaccagcaccagttcatccatatggtcagcaagcaagtggagcataaatacagatgcttttgctcttcctctccccatccctcgttttgacaacattccgaagcccattgctgcttggagaaacaaggcggctcgcgattaataaactgctatataatcttggttatgtgcatgatttttcctgaactccaggaggcccagaacgtgtaattaggttggcaccagcctttacagctttggaagcagagcagagcagagcaggaccgtaattggctcctgcgagctagaacattctgaagatcagacgcatgtcgtccatgtttccagatggtatctagattaggtttacatgattctcatgttatattgggcatgttgcgccaagagtagcaacgttaatattcggtcatataaattatagatgctagatgacatagaggagacttgatatttgcggagggtattcttttgtacacaatgagataatgtagagcatcaaaggaatccacaatgagatatgtgttgtatgtgtgatcccatacccaaacatggaggaggattgctttatttaactacagattttgtttttcttc

SEQ ID NO: 20208 - protein, 300 aa, Zea mays subsp. mays
  peptide (1)..(300): Ceres Seq. ID no. 12376898
  misc_feature (10)..(53): Pfam Name: LysM domain Pfam Description: LysM domain
  misc_feature (123)..(300): Homolog of NCBI NO: 30682281 NR Description: expressed protein [Arabidopsis thaliana]
  misc_feature (123)..(300): Homolog of NCBI NO: 11291586 NR Description: hypothetical protein T22D6.140 - Arabidopsis
  misc_feature (81)..(226): Homolog of NCBI NO: 24431595 NR Description: Hypothetical protein [Oryza sativa (japonica
  misc_feature (1)..(215): Homolog of NCBI NO: 30682281 NR Description: expressed protein [Arabidopsis thaliana]
  misc_feature (1)..(215): Homolog of NCBI NO: 11291586 NR Description: hypothetical protein T22D6.140 - Arabidopsis
  misc_feature (1)..(215): Homolog of NCBI NO: 9759371 NR Description: gene_id:MYJ24.12~unknown protein [Arabidopsis
  misc_feature (1)..(215): Homolog of NCBI NO: 22327003 NR Description: unknown protein
  misc_feature (1)..(55): Homolog of NCBI NO: 24431595 NR Description: Hypothetical protein [Oryza sativa (japonica
  misc_feature (153)..(300): Homolog of NCBI NO: 24431595 NR Description: Hypothetical protein [Oryza sativa (japonica
  misc_feature (1)..(300): Homolog of NCBI NO: 37535512 NR Description: unknown protein [Oryza sativa (japonica
MSSCGQYMLHRVRKLDTLAGVAIKYGVEVADIKRLNGLSADLQMFAHKTLQIPLPGRHPPSSYQQNGSYESDDRECTPHRIHDDILDSILKTPKPKVSPAMSLLQGYYGLAPPPKRDQTSEGTEMAVYSKGKSAFLDVEPWLEPPNSDPFPLQNRKTKSLTIGSLDGDTDENGDSERFVRRRQKADGELLPREENGGDFLASAGKGLALRPKSSSRPDMNKSQQNLFAMAEPLFGSGVQTVRKSSSTPEFQEPETSTSSSIWSASKWSINTDAFALPLPIPRFDNIPKPIAAWRNKAARD

SEQ ID NO: 20209 - protein, 293 aa, Zea mays subsp. mays
  peptide (1)..(293): Ceres Seq. ID no. 12376899
  misc_feature (3)..(46): Pfam Name: LysM domain Pfam Description: LysM domain
  misc_feature (116)..(293): Homolog of NCBI NO: 30682281 NR Description: expressed protein [Arabidopsis thaliana]
  misc_feature (116)..(293): Homolog of NCBI NO: 11291586 NR Description: hypothetical protein T22D6.140 - Arabidopsis
  misc_feature (74)..(219): Homolog of NCBI NO: 24431595 NR Description: Hypothetical protein [Oryza sativa (japonica
  misc_feature (1)..(208): Homolog of NCBI NO: 30682281 NR Description: expressed protein [Arabidopsis thaliana]
  misc_feature (1)..(208): Homolog of NCBI NO: 11291586 NR Description: hypothetical protein T22D6.140 - Arabidopsis
  misc_feature (1)..(208): Homolog of NCBI NO: 9759371 NR Description: gene_id:MYJ24.12~unknown protein [Arabidopsis
  misc_feature (1)..(208): Homolog of NCBI NO: 22327003 NR Description: unknown protein
  misc_feature (1)..(48): Homolog of NCBI NO: 24431595 NR Description: Hypothetical protein [Oryza sativa (japonica
  misc_feature (146)..(293): Homolog of NCBI NO: 24431595 NR Description: Hypothetical protein [Oryza sativa (japonica
  misc_feature (1)..(293): Homolog of NCBI NO: 37535512 NR Description: unknown protein [Oryza sativa (japonica
MLHRVRKLDTLAGVAIKYGVEVADIKRLNGLSADLQMFAHKTLQIPLPGRHPPSSYQQNGSYESDDRECTPHRIHDDILDSILKTPKPKVSPAMSLLQGYYGLAPPPKRDQTSEGTEMAVYSKGKSAFLDVEPWLEPPNSDPFPLQNRKTKSLTIGSLDGDTDENGDSERFVRRRQKADGELLPREENGGDFLASAGKGLALRPKSSSRPDMNKSQQNLFAMAEPLFGSGVQTVRKSSSTPEFQEPETSTSSSIWSASKWSINTDAFALPLPIPRFDNIPKPIAAWRNKAARD

SEQ ID NO: 20210 - protein, 257 aa, Zea mays subsp. mays
  peptide (1)..(257): Ceres Seq. ID no. 12376900
  misc_feature (80)..(257): Homolog of NCBI NO: 30682281 NR Description: expressed protein [Arabidopsis thaliana]
  misc_feature (80)..(257): Homolog of NCBI NO: 11291586 NR Description: hypothetical protein T22D6.140 - Arabidopsis
  misc_feature (38)..(183): Homolog of NCBI NO: 24431595 NR Description: Hypothetical protein [Oryza sativa (japonica
  misc_feature (1)..(172): Homolog of NCBI NO: 30682281 NR Description: expressed protein [Arabidopsis thaliana]
  misc_feature (1)..(172): Homolog of NCBI NO: 11291586 NR Description: hypothetical protein T22D6.140 - Arabidopsis
  misc_feature (1)..(172): Homolog of NCBI NO: 9759371 NR Description: gene_id:MYJ24.12~unknown protein [Arabidopsis
  misc_feature (1)..(172): Homolog of NCBI NO: 22327003 NR Description: unknown protein
  misc_feature (1)..(12): Homolog of NCBI NO: 24431595 NR Description: Hypothetical protein [Oryza sativa (japonica
  misc_feature (110)..(257): Homolog of NCBI NO: 24431595 NR Description: Hypothetical protein [Oryza sativa (japonica
  misc_feature (1)..(257): Homolog of NCBI NO: 37535512 NR Description: unknown protein [Oryza sativa (japonica
MFAHKTLQIPLPGRHPPSSYQQNGSYESDDRECTPHRIHDDILDSILKTPKPKVSPAMSLLQGYYGLAPPPKRDQTSEGTEMAVYSKGKSAFLDVEPWLEPPNSDPFPLQNRKTKSLTIGSLDGDTDENGDSERFVRRRQKADGELLPREENGGDFLASAGKGLALRPKSSSRPDMNKSQQNLFAMAEPLFGSGVQTVRKSSSTPEFQEPETSTSSSIWSASKWSINTDAFALPLPIPRFDNIPKPIAAWRNKAARD

SEQ ID NO: 20211 - DNA, 1248 bp, Zea mays subsp. mays
  misc_feature (1)..(1248): Ceres Seq. ID no. 12390236
  misc_feature: MA Experiment ID: 108536 Result: Up-regulated in Transcription
  misc_feature: MA Experiment 108536 PARAMETER Experiment Name: Zm_Meristem_P Parameter: Age (day) Value: 8
  misc_feature: MA Experiment 108536 PARAMETER Experiment Name: Zm_Meristem_P Parameter: Organism Value: Zea mays
  misc_feature: MA Experiment 108536 PARAMETER Experiment Name: Zm_Meristem_P Parameter: Plant Line Value: 35A19
  misc_feature: MA Experiment 108536 PARAMETER Experiment Name: Zm_Meristem_P Parameter: Tissue Value: Shoot Meristem vs. Above Shoot Meristem
  misc_feature: MA Experiment ID: 108543 Result: Up-regulated in Transcription
  misc_feature: MA Experiment ID: 108687 Result: Down-regulated in Transcription
  misc_feature: MA Experiment 108687 PARAMETER Experiment Name: Zm_Embryos-Flowers__P Parameter: Tissue Value: Embryo vs. Aerial+
aatcgaaaagagctcacttcctcatctaatctacatgtctagaattatatgttgatggtttcttatggtattgactggctgtcttgtaattgctggctatagaatgcaggtgatcaacaaacagaaggttcatctcagccagaaaggaattcaatggaggaggggaacagaaagatttcgcccaaaatacaaagcaaggaagattcttctgatggtgatggtactaaagaggactatgttcatatccgggcaaagcgaggtcaagccactaacagccacagcctcgcagaaagactgaggagaaaaaagataagtgagagaatgaagcttcttcaagatcttgttcctggatgcagtaagatcactggcaaggcagtcatgctcgatgagattatcaactatgtacagtcattgcaacgacaagtggagttcttgtcaatgaaactttcaactgttaaccctgaacttggctttgacattgagcagatcatatccaaacaaatgatgctttcacaagacagacatcttgctttctatggagtcgatccaggatcaagcagccttactgctccattcaaccaaggaatcgtgcagccagcaatgatgtgcaacatttctaatcctgccgatgttttgcacggaactattcatgacgtgtcaacaatgaaccagataccttccatgtgggaaggacttcagagcatgcctcagatgaacttcaaccctggtgtggcagctgatagcggcaccaacaactctggctccatgaagatcgaacagtgagctgctgtatagtagcttcgaaattgttgtgtgaatcactgaatcatcgtaaagcgctctcgagatgaagctttttttgtatagctggaggcctgaccattatgctggattcctgcggttgctcccatactgtgcggcacattgtttatggtatggcatatggatcgtgtacagctggagctgaagaactgattccactgtaaatttctgttgtgctttggcctgcgaaaattgggatggaaacctagtagcatccatgaaattcaaggacagaagcttgttgggattgggacttgggaccacgtgctgaatactgatgggcctaaacgtactagacgagtactaatagaatcgtagttgtaggtaaaaaaatgcagagtttgaaaccagtggttttgtcagaaattccatggagtttgctatatttatttatgatatcaaaacagaaactgaatggccgctggc

SEQ ID NO: 20212 - protein, 209 aa, Zea mays subsp. mays
  peptide (1)..(209): Ceres Seq. ID no. 12390237
  misc_feature (38)..(88): Pfam Name: Helix-loop-helix DNA-binding domain Pfam Description: Helix-loop-helix DNA-binding domain
  misc_feature (1)..(208): Homolog of NCBI NO: 15221563 NR Description: putative DNA-binding protein; protein id:
  misc_feature (1)..(208): Homolog of NCBI NO: 20127044 NR Description: putative bHLH transcription factor [Arabidopsis
  misc_feature (1)..(186): Homolog of NCBI NO: 15231450 NR Description: bHLH protein
  misc_feature (1)..(166): Homolog of NCBI NO: 34898690 NR Description: hypothetical protein [Oryza sativa (japonica
  misc_feature (1)..(160): Homolog of NCBI NO: 27311243 NR Description: Hypothetical protein [Oryza sativa (japonica
  misc_feature (1)..(132): Homolog of NCBI NO: 30681559 NR Description: expressed protein [Arabidopsis thaliana]
  misc_feature (1)..(202): Homolog of NCBI NO: 22331295 NR Description: bHLH protein
  misc_feature (1)..(166): Homolog of NCBI NO: 34906952 NR Description: DNA-binding protein-like protein
  misc_feature (1)..(208): Homolog of NCBI NO: 30697769 NR Description: DNA-binding protein -related [Arabidopsis
  misc_feature (1)..(209): Homolog of NCBI NO: 28273388 NR Description: putative Helix-loop-helix DNA-binding domain
MEEGNRKISPKIQSKEDSSDGDGTKEDYVHIRAKRGQATNSHSLAERLRRKKISERMKLLQDLVPGCSKITGKAVMLDEIINYVQSLQRQVEFLSMKLSTVNPELGFDIEQIISKQMMLSQDRHLAFYGVDPGSSSLTAPFNQGIVQPAMMCNISNPADVLHGTIHDVSTMNQIPSMWEGLQSMPQMNFNPGVAADSGTNNSGSMKIEQ

SEQ ID NO: 20213 - protein, 153 aa, Zea mays subsp. mays
  peptide (1)..(153): Ceres Seq. ID no. 12390238
  misc_feature (1)..(130): Homolog of NCBI NO: 15231450 NR Description: bHLH protein
  misc_feature (1)..(110): Homolog of NCBI NO: 34906952 NR Description: DNA-binding protein-like protein
  misc_feature (1)..(110): Homolog of NCBI NO: 34898690 NR Description: hypothetical protein [Oryza sativa (japonica
  misc_feature (1)..(146): Homolog of NCBI NO: 22331295 NR Description: bHLH protein
  misc_feature (1)..(104): Homolog of NCBI NO: 27311243 NR Description: Hypothetical protein [Oryza sativa (japonica
  misc_feature (1)..(76): Homolog of NCBI NO: 30681559 NR Description: expressed protein [Arabidopsis thaliana]
  misc_feature (1)..(152): Homolog of NCBI NO: 20127044 NR Description: putative bHLH transcription factor [Arabidopsis
  misc_feature (1)..(152): Homolog of NCBI NO: 30697769 NR Description: DNA-binding protein -related [Arabidopsis
  misc_feature (1)..(152): Homolog of NCBI NO: 15221563 NR Description: putative DNA-binding protein; protein id:
  misc_feature (1)..(153): Homolog of NCBI NO: 28273388 NR Description: putative Helix-loop-helix DNA-binding domain
MKLLQDLVPGCSKITGKAVMLDEIINYVQSLQRQVEFLSMKLSTVNPELGFDIEQIISKQMMLSQDRHLAFYGVDPGSSSLTAPFNQGIVQPAMMCNISNPADVLHGTIHDVSTMNQIPSMWEGLQSMPQMNFNPGVAADSGTNNSGSMKIEQ

SEQ ID NO: 20214 - protein, 134 aa, Zea mays subsp. mays
  peptide (1)..(134): Ceres Seq. ID no. 12390239
  misc_feature (1)..(111): Homolog of NCBI NO: 15231450 NR Description: bHLH protein
  misc_feature (1)..(91): Homolog of NCBI NO: 34906952 NR Description: DNA-binding protein-like protein
  misc_feature (1)..(91): Homolog of NCBI NO: 34898690 NR Description: hypothetical protein [Oryza sativa (japonica
  misc_feature (1)..(127): Homolog of NCBI NO: 22331295 NR Description: bHLH protein
  misc_feature (1)..(85): Homolog of NCBI NO: 27311243 NR Description: Hypothetical protein [Oryza sativa (japonica
  misc_feature (1)..(57): Homolog of NCBI NO: 30681559 NR Description: expressed protein [Arabidopsis thaliana]
  misc_feature (1)..(133): Homolog of NCBI NO: 20127044 NR Description: putative bHLH transcription factor [Arabidopsis
  misc_feature (1)..(133): Homolog of NCBI NO: 30697769 NR Description: DNA-binding protein -related [Arabidopsis
  misc_feature (1)..(133): Homolog of NCBI NO: 15221563 NR Description: putative DNA-binding protein; protein id:
  misc_feature (1)..(134): Homolog of NCBI NO: 28273388 NR Description: putative Helix-loop-helix DNA-binding domain
MLDEIINYVQSLQRQVEFLSMKLSTVNPELGFDIEQIISKQMMLSQDRHLAFYGVDPGSSSLTAPFNQGIVQPAMMCNISNPADVLHGTIHDVSTMNQIPSMWEGLQSMPQMNFNPGVAADSGTNNSGSMKIEQ

SEQ ID NO: 20215 - DNA, 1656 bp, Zea mays subsp. mays
  misc_feature (1)..(1656): Ceres Seq. ID no. 12454875
  misc_feature: MA Experiment ID: 20000492 Result: Down-regulated in Transcription
  misc_feature: MA Experiment 20000492 PARAMETER Experiment Name: Zm_Hybrid_Seed_Dev_P Parameter: DAP Value: 12
  misc_feature: MA Experiment 20000492 PARAMETER Experiment Name: Zm_Hybrid_Seed_Dev_P Parameter: Organism Value: Zea mays
  misc_feature: MA Experiment 20000492 PARAMETER Experiment Name: Zm_Hybrid_Seed_Dev_P Parameter: Plant Line Value: 35A19
  misc_feature: MA Experiment 20000492 PARAMETER Experiment Name: Zm_Hybrid_Seed_Dev_P Parameter: Tissue Value: Fert Kernel vs. Unfert Floret
  misc_feature: MA Experiment ID: 20000535 Result: Down-regulated in Transcription
  misc_feature: MA Experiment 20000535 PARAMETER Experiment Name: Zm_Hybrid_Seed_Dev_P Parameter: DAP Value: 30 vs. 12
  misc_feature: MA Experiment 20000535 PARAMETER Experiment Name: Zm_Hybrid_Seed_Dev_P Parameter: Organism Value: Zea mays
  misc_feature: MA Experiment 20000535 PARAMETER Experiment Name: Zm_Hybrid_Seed_Dev_P Parameter: Plant Line Value: 35A19
  misc_feature: MA Experiment 20000535 PARAMETER Experiment Name: Zm_Hybrid_Seed_Dev_P Parameter: Tissue Value: Embryo vs. Unfert Floret
atctcctctcctgccaggtcacggcctaattcgtggaattttgtttggtggtgcatatctccagtcaagtcttggccaagattttagctatctccggtcaaaaggctttaccgattcttggattggtggcttcttgggggcgagaagccggttcctgtttcgtctcttgtgctccagcatgttctgtagcacaccggttccccatctccagtgaaggtgttcgtgtgctcttggttttgtgcctcccggaatcgttcccggaaagctacttttggccgctgcggcgatggcgtcgagcaccagcgagatggccgaggggaaggagaagctgaagaggtccggcagcttgggaagcaacgatacgtatgtgcgtgcagacaagattgatcttacgagcctcgacatccagctggagaaccagctcaccaagacctggggcaaagccaatctcaaatcccaggggccaaaggaggagtgggagatcgaccttgcaaagctggagatccgctatgtcatcgctcaggggacgtatggcacggtctaccggggcacctacgatggacaggacgtcgcagtgaagcttttggattggggagaagatggttttgccacagaggctgaaactgctgctttacgaacatcatttaagacggaggttgctgtttggcataagctcagccaccctaatgttacaaagtttgttggtgcatctatggggaccacagaccttaagattccatcaaacaattccaatggtgctgcacgtacaaatttgccagcaagagcatgttgtgttgtggtagagtatcttgctggaggaactttgaagcaatatttgataaagaatagccgacggaagcttgcttataaagttgtggtccagcttgcattggatttggccagaggattgagctatctgcactccagaaagattgtacatcgggatgtgaaaagcgaaaacatgctgcttactccacagagaaaccttaagattgccgatttcggtgttgctcgtgttgaggctcagaatccaaaggacatgactggtgcaacaggcacacttggttatatggctccagaggttcttgatggtaagccatacaacaggaagtgtgatgtttatagttttggcatttgtttatgggaaatctattgctgtgacatgccttacccagacctaagttttgccgatgtctcatctgccgttgttcaccagaatttgcgcccagacattcctcgctgctgcccaagcgcatttgcgaatgttatgcggaaatgctgggatgcaaaccctgataaacgccctgatatggatgaagtggtgcagcttttagaggctctggacacgagcaaaggcggtggcatgatacctgatggccaatcatcaggatgcttatgcttcacaaaggctcgtggtccatagatacttttcatggtactcccttcccttggcaacactttccccgtgtaaatgactgggccacagcatgcttctctttgcacgacctgtgcagtcgtcgcttacagttctccatagctgccttgcgatcattgcgtgtcaacctgtagctctcatacgatttttgctgtcctctgtcgacaatcttttcatatactagtgtgctgctgtaattgtggttctaaaagagatttggc

SEQ ID NO: 20216 - protein, 378 aa, Zea mays subsp. mays
  peptide (1)..(378): Ceres Seq. ID no. 12454876
  misc_feature (63)..(378): Homolog of NCBI NO: 15240597 NR Description: protein kinase
  misc_feature (58)..(378): Homolog of NCBI NO: 34911620 NR Description: protein kinase -like [Oryza sativa (japonica
  misc_feature (22)..(63): Homolog of NCBI NO: 29367399 NR Description: putative protein kinase [Oryza sativa (japonica
  misc_feature (61)..(378): Homolog of NCBI NO: 29367399 NR Description: putative protein kinase [Oryza sativa (japonica
  misc_feature (2)..(378): Homolog of NCBI NO: 21554375 NR Description: ATMRK1 [Arabidopsis thaliana]
  misc_feature (2)..(378): Homolog of NCBI NO: 15229398 NR Description: ATMRK1
  misc_feature (12)..(63): Homolog of NCBI NO: 15232131 NR Description: putative protein kinase
  misc_feature (61)..(378): Homolog of NCBI NO: 15232131 NR Description: putative protein kinase
  misc_feature (12)..(378): Homolog of NCBI NO: 15233574 NR Description: kinase like protein; protein id: At4g14780.1
  misc_feature (1)..(378): Homolog of NCBI NO: 18403507 NR Description: expressed protein
MASSTSEMAEGKEKLKRSGSLGSNDTYVRADKIDLTSLDIQLENQLTKTWGKANLKSQGPKEEWEIDLAKLEIRYVIAQGTYGTVYRGTYDGQDVAVKLLDWGEDGFATEAETAALRTSFKTEVAVWHKLSHPNVTKFVGASMGTTDLKIPSNNSNGAARTNLPARACCVVVEYLAGGTLKQYLIKNSRRKLAYKVVVQLALDLARGLSYLHSRKIVHRDVKSENMLLTPQRNLKIADFGVARVEAQNPKDMTGATGTLGYMAPEVLDGKPYNRKCDVYSFGICLWEIYCCDMPYPDLSFADVSSAVVHQNLRPDIPRCCPSAFANVMRKCWDANPDKRPDMDEVVQLLEALDTSKGGGMIPDGQSSGCLCFTKARGP

SEQ ID NO: 20217 - protein, 371 aa, Zea mays subsp. mays
  peptide (1)..(371): Ceres Seq. ID no. 12454877
  misc_feature (56)..(371): Homolog of NCBI NO: 15240597 NR Description: protein kinase
  misc_feature (51)..(371): Homolog of NCBI NO: 34911620 NR Description: protein kinase -like [Oryza sativa (japonica
  misc_feature (15)..(56): Homolog of NCBI NO: 29367399 NR Description: putative protein kinase [Oryza sativa (japonica
  misc_feature (54)..(371): Homolog of NCBI NO: 29367399 NR Description: putative protein kinase [Oryza sativa (japonica
  misc_feature (1)..(371): Homolog of NCBI NO: 21554375 NR Description: ATMRK1 [Arabidopsis thaliana]
  misc_feature (1)..(371): Homolog of NCBI NO: 15229398 NR Description: ATMRK1
  misc_feature (5)..(56): Homolog of NCBI NO: 15232131 NR Description: putative protein kinase
  misc_feature (54)..(371): Homolog of NCBI NO: 15232131 NR Description: putative protein kinase
  misc_feature (5)..(371): Homolog of NCBI NO: 15233574 NR Description: kinase like protein; protein id: At4g14780.1
  misc_feature (1)..(371): Homolog of NCBI NO: 18403507 NR Description: expressed protein
MAEGKEKLKRSGSLGSNDTYVRADKIDLTSLDIQLENQLTKTWGKANLKSQGPKEEWEIDLAKLEIRYVIAQGTYGTVYRGTYDGQDVAVKLLDWGEDGFATEAETAALRTSFKTEVAVWHKLSHPNVTKFVGASMGTTDLKIPSNNSNGAARTNLPARACCVVVEYLAGGTLKQYLIKNSRRKLAYKVVVQLALDLARGLSYLHSRKIVHRDVKSENMLLTPQRNLKIADFGVARVEAQNPKDMTGATGTLGYMAPEVLDGKPYNRKCDVYSFGICLWEIYCCDMPYPDLSFADVSSAVVHQNLRPDIPRCCPSAFANVMRKCWDANPDKRPDMDEVVQLLEALDTSKGGGMIPDGQSSGCLCFTKARGP

SEQ ID NO: 20218 - protein, 236 aa, Zea mays subsp. mays
  peptide (1)..(236): Ceres Seq. ID no. 12454878
  misc_feature (1)..(235): Homolog of NCBI NO: 14626298 NR Description: putative protein kinase [Oryza sativa (japonica
  misc_feature (1)..(236): Homolog of NCBI NO: 21553402 NR Description: protein kinase [Arabidopsis thaliana]
  misc_feature (1)..(236): Homolog of NCBI NO: 15240597 NR Description: protein kinase
  misc_feature (1)..(236): Homolog of NCBI NO: 34911620 NR Description: protein kinase -like [Oryza sativa (japonica
  misc_feature (1)..(236): Homolog of NCBI NO: 29367399 NR Description: putative protein kinase [Oryza sativa (japonica
  misc_feature (1)..(236): Homolog of NCBI NO: 21554375 NR Description: ATMRK1 [Arabidopsis thaliana]
  misc_feature (1)..(236): Homolog of NCBI NO: 15229398 NR Description: ATMRK1
  misc_feature (1)..(236): Homolog of NCBI NO: 15232131 NR Description: putative protein kinase
  misc_feature (1)..(236): Homolog of NCBI NO: 15233574 NR Description: kinase like protein; protein id: At4g14780.1
  misc_feature (1)..(236): Homolog of NCBI NO: 18403507 NR Description: expressed protein
MGTTDLKIPSNNSNGAARTNLPARACCVVVEYLAGGTLKQYLIKNSRRKLAYKVVVQLALDLARGLSYLHSRKIVHRDVKSENMLLTPQRNLKIADFGVARVEAQNPKDMTGATGTLGYMAPEVLDGKPYNRKCDVYSFGICLWEIYCCDMPYPDLSFADVSSAVVHQNLRPDIPRCCPSAFANVMRKCWDANPDKRPDMDEVVQLLEALDTSKGGGMIPDGQSSGCLCFTKARGP

SEQ ID NO: 20219 - DNA, 427 bp, Zea mays subsp. mays
  misc_feature (1)..(427): Ceres Seq. ID no. 2788106
  misc_feature: MA Experiment ID: 108515 Result: Up-regulated in Transcription
  misc_feature: MA Experiment 108515 PARAMETER Experiment Name: Zm_2mM_SA_P Parameter: Age (day) Value: 8
  misc_feature: MA Experiment 108515 PARAMETER Experiment Name: Zm_2mM_SA_P Parameter: Organism Value: Zea mays
  misc_feature: MA Experiment 108515 PARAMETER Experiment Name: Zm_2mM_SA_P Parameter: Plant Line Value: 35A19
  misc_feature: MA Experiment 108515 PARAMETER Experiment Name: Zm_2mM_SA_P Parameter: Timepoint (hr) Value: 12
  misc_feature: MA Experiment 108515 PARAMETER Experiment Name: Zm_2mM_SA_P Parameter: Tissue Value: Aerial
  misc_feature: MA Experiment 108515 PARAMETER Experiment Name: Zm_2mM_SA_P Parameter: Treatment Value: 2mM SA vs. No Treatment
  misc_feature: MA Experiment ID: 108526 Result: Up-regulated in Transcription
  misc_feature: MA Experiment 108526 PARAMETER Experiment Name: Zm_5mM_NO_P Parameter: Age (day) Value: 8
  misc_feature: MA Experiment 108526 PARAMETER Experiment Name: Zm_5mM_NO_P Parameter: Organism Value: Zea mays
  misc_feature: MA Experiment 108526 PARAMETER Experiment Name: Zm_5mM_NO_P Parameter: Plant Line Value: 35A19
  misc_feature: MA Experiment 108526 PARAMETER Experiment Name: Zm_5mM_NO_P Parameter: Timepoint (hr) Value: 1
  misc_feature: MA Experiment 108526 PARAMETER Experiment Name: Zm_5mM_NO_P Parameter: Tissue Value: Aerial
  misc_feature: MA Experiment 108526 PARAMETER Experiment Name: Zm_5mM_NO_P Parameter: Treatment Value: 5mM NO vs. No Treatment
  misc_feature: MA Experiment ID: 108527 Result: Up-regulated in Transcription
  misc_feature: MA Experiment 108527 PARAMETER Experiment Name: Zm_5mM_NO_P Parameter: Age (day) Value: 8
  misc_feature: MA Experiment 108527 PARAMETER Experiment Name: Zm_5mM_NO_P Parameter: Organism Value: Zea mays
  misc_feature: MA Experiment 108527 PARAMETER Experiment Name: Zm_5mM_NO_P Parameter: Plant Line Value: 35A19
  misc_feature: MA Experiment 108527 PARAMETER Experiment Name: Zm_5mM_NO_P Parameter: Timepoint (hr) Value: 6
  misc_feature: MA Experiment 108527 PARAMETER Experiment Name: Zm_5mM_NO_P Parameter: Tissue Value: Aerial
  misc_feature: MA Experiment 108527 PARAMETER Experiment Name: Zm_5mM_NO_P Parameter: Treatment Value: 5mM NO vs. No Treatment
  misc_feature: MA Experiment ID: 108559 Result: Up-regulated in Transcription
  misc_feature: MA Experiment 108559 PARAMETER Experiment Name: Zm_5mM_NO_P Parameter: Age (day) Value: 8
  misc_feature: MA Experiment 108559 PARAMETER Experiment Name: Zm_5mM_NO_P Parameter: Organism Value: Zea mays
  misc_feature: MA Experiment 108559 PARAMETER Experiment Name: Zm_5mM_NO_P Parameter: Plant Line Value: 35A19
  misc_feature: MA Experiment 108559 PARAMETER Experiment Name: Zm_5mM_NO_P Parameter: Timepoint (hr) Value: 12
  misc_feature: MA Experiment 108559 PARAMETER Experiment Name: Zm_5mM_NO_P Parameter: Tissue Value: Aerial
  misc_feature: MA Experiment 108559 PARAMETER Experiment Name: Zm_5mM_NO_P Parameter: Treatment Value: 5mM NO vs. No Treatment
  misc_feature: MA Experiment ID: 108689 Result: Up-regulated in Transcription
  misc_feature: MA Experiment 108689 PARAMETER Experiment Name: Zm_Drought_Roots_P Parameter: Age (day) Value: 9
  misc_feature: MA Experiment 108689 PARAMETER Experiment Name: Zm_Drought_Roots_P Parameter: Organism Value: Zea mays
  misc_feature: MA Experiment 108689 PARAMETER Experiment Name: Zm_Drought_Roots_P Parameter: Plant Line Value: 35A19
  misc_feature: MA Experiment 108689 PARAMETER Experiment Name: Zm_Drought_Roots_P Parameter: Timepoint (hr) Value: 24
  misc_feature: MA Experiment 108689 PARAMETER Experiment Name: Zm_Drought_Roots_P Parameter: Tissue Value: Roots
  misc_feature: MA Experiment 108689 PARAMETER Experiment Name: Zm_Drought_Roots_P Parameter: Treatment Value: Drought vs. No Drought
  misc_feature: MA Experiment ID: 20000477 Result: Up-regulated in Transcription
  misc_feature: MA Experiment 20000477 PARAMETER Experiment Name: Zm_5mM_SA_P Parameter: Age (day) Value: 10
  misc_feature: MA Experiment 20000477 PARAMETER Experiment Name: Zm_5mM_SA_P Parameter: Organism Value: Zea mays
  misc_feature: MA Experiment 20000477 PARAMETER Experiment Name: Zm_5mM_SA_P Parameter: Plant Line Value: 35A19
  misc_feature: MA Experiment 20000477 PARAMETER Experiment Name: Zm_5mM_SA_P Parameter: Timepoint (hr) Value: 48
  misc_feature: MA Experiment 20000477 PARAMETER Experiment Name: Zm_5mM_SA_P Parameter: Tissue Value: Aerial
  misc_feature: MA Experiment 20000477 PARAMETER Experiment Name: Zm_5mM_SA_P Parameter: Treatment Value: 5mM SA vs. No Treatment
  misc_feature: MA Experiment ID: 20000478 Result: Up-regulated in Transcription
  misc_feature: MA Experiment 20000478 PARAMETER Experiment Name: Zm_5mM_SA_P Parameter: Age (day) Value: 11
  misc_feature: MA Experiment 20000478 PARAMETER Experiment Name: Zm_5mM_SA_P Parameter: Organism Value: Zea mays
  misc_feature: MA Experiment 20000478 PARAMETER Experiment Name: Zm_5mM_SA_P Parameter: Plant Line Value: 35A19
  misc_feature: MA Experiment 20000478 PARAMETER Experiment Name: Zm_5mM_SA_P Parameter: Timepoint (hr) Value: 72
  misc_feature: MA Experiment 20000478 PARAMETER Experiment Name: Zm_5mM_SA_P Parameter: Tissue Value: Aerial
  misc_feature: MA Experiment 20000478 PARAMETER Experiment Name: Zm_5mM_SA_P Parameter: Treatment Value: 5mM SA vs. No Treatment
  misc_feature: MA Experiment ID: 20000479 Result: Up-regulated in Transcription
  misc_feature: MA Experiment 20000479 PARAMETER Experiment Name: Zm_Drought_P Parameter: Age (day) Value: 10
  misc_feature: MA Experiment 20000479 PARAMETER Experiment Name: Zm_Drought_P Parameter: Organism Value: Zea mays
  misc_feature: MA Experiment 20000479 PARAMETER Experiment Name: Zm_Drought_P Parameter: Plant Line Value: 35A19
  misc_feature: MA Experiment 20000479 PARAMETER Experiment Name: Zm_Drought_P Parameter: Timepoint (hr) Value: 48
  misc_feature: MA Experiment 20000479 PARAMETER Experiment Name: Zm_Drought_P Parameter: Tissue Value: Aerial
  misc_feature: MA Experiment 20000479 PARAMETER Experiment Name: Zm_Drought_P Parameter: Treatment Value: Drought vs. No Drought
  misc_feature: MA Experiment ID: 20000480 Result: Up-regulated in Transcription
  misc_feature: MA Experiment 20000480 PARAMETER Experiment Name: Zm_Drought_P Parameter: Age (day) Value: 11
  misc_feature: MA Experiment 20000480 PARAMETER Experiment Name: Zm_Drought_P Parameter: Organism Value: Zea mays
  misc_feature: MA Experiment 20000480 PARAMETER Experiment Name: Zm_Drought_P Parameter: Plant Line Value: 35A19
  misc_feature: MA Experiment 20000480 PARAMETER Experiment Name: Zm_Drought_P Parameter: Timepoint (hr) Value: 72
  misc_feature: MA Experiment 20000480 PARAMETER Experiment Name: Zm_Drought_P Parameter: Tissue Value: Aerial
  misc_feature: MA Experiment 20000480 PARAMETER Experiment Name: Zm_Drought_P Parameter: Treatment Value: Drought vs. No Drought
  misc_feature: MA Experiment ID: 20000626 Result: Up-regulated in Transcription
  misc_feature: MA Experiment 20000626 PARAMETER Experiment Name: Zm_Herbicide-Treatments_P Parameter: Timepoint (hr) Value: 12
  misc_feature: MA Experiment 20000626 PARAMETER Experiment Name: Zm_Herbicide-Treatments_P Parameter: Tissue Value: Aerial
  misc_feature: MA Experiment 20000626 PARAMETER Experiment Name: Zm_Herbicide-Treatments_P Parameter: Treatment Value: Roundup vs. No Treatment
  misc_feature: MA Experiment ID: 20000627 Result: Up-regulated in Transcription
  misc_feature: MA Experiment 20000627 PARAMETER Experiment Name: Zm_Herbicide-Treatments_P Parameter: Timepoint (hr) Value: 12
  misc_feature: MA Experiment 20000627 PARAMETER Experiment Name: Zm_Herbicide-Treatments_P Parameter: Tissue Value: Aerial
  misc_feature: MA Experiment 20000627 PARAMETER Experiment Name: Zm_Herbicide-Treatments_P Parameter: Treatment Value: Finale vs. No Treatment
  misc_feature: MA Experiment ID: 20000630 Result: Up-regulated in Transcription
  misc_feature: MA Experiment 20000630 PARAMETER Experiment Name: Zm_Herbicide-Treatments_P Parameter: Timepoint (hr) Value: 4
  misc_feature: MA Experiment 20000630 PARAMETER Experiment Name: Zm_Herbicide-Treatments_P Parameter: Tissue Value: Aerial
  misc_feature: MA Experiment 20000630 PARAMETER Experiment Name: Zm_Herbicide-Treatments_P Parameter: Treatment Value: Roundup vs. No Treatment
gatcaagttcgcttctgccagtctgcctgcgtgctctgctggacagctggagagctagatggcgatgccgtccgggtggaggggtatcctgggcttccactacggcatcgtgcaggcgccgttgggccccgacatctccggccccgagctcgtcgccgccgtagcgaacgccggcgccatcggcctcctccgcctccccgactggccggcgccggatcacgtcagagaactgatccggaagaccaggagcctcacgtccaagccgttcggggcggccatcgtgctggccttcccgcacgaggagaatctcagggtcgtccctggaggagaagctcgccgtgctgcaggtctacyggggggacttccccaaccaccgggtccaaagaggcgcatcgcgcccggggttaaggtcttgcatcaggtcggc

SEQ ID NO: 20220 - protein, 135 aa, Zea mays subsp. mays
  peptide (1)..(135): Ceres Seq. ID no. 2788107
  misc_feature (118)..(118): Xaa is any aa, unknown or other
DQVRFCQSACVLCWTAGELDGDAVRVEGYPGLPLRHRAGAVGPRHLRPRARRRRSERRRHRPPPPPRLAGAGSRQRTDPEDQEPHVQAVRGGHRAGLPARGESQGRPWRRSSPCCRSXGGTSPTTGSKEAHRARG

SEQ ID NO: 20221 - protein, 123 aa, Zea mays subsp. mays
  peptide (1)..(123): Ceres Seq. ID no. 2788108
  misc_feature (8)..(122): Pfam Name: 2-nitropropane dioxygenase Pfam Description: 2-nitropropane dioxygenase
  misc_feature (10)..(104): Homolog of NCBI NO: 29346965 NR Description: dioxygenase, related to 2-nitropropane
  misc_feature (10)..(84): Homolog of NCBI NO: 28209899 NR Description: enoyl-
  misc_feature (10)..(119): Homolog of NCBI NO: 16127609 NR Description: conserved hypothetical protein [Caulobacter
  misc_feature (10)..(87): Homolog of NCBI NO: 20807921 NR Description: Dioxygenases related to 2-nitropropane
  misc_feature (8)..(119): Homolog of NCBI NO: 23015687 NR Description: hypothetical protein [Magnetospirillum
  misc_feature (1)..(76): Homolog of NCBI NO: 30019518 NR Description: Nitropropane dioxygenase / Trans-enoyl-CoA
  misc_feature (52)..(122): Homolog of NCBI NO: 30697978 NR Description: 2-nitropropane dioxygenase-related protein
  misc_feature (8)..(122): Homolog of NCBI NO: 30697982 NR Description: 2-nitropropane dioxygenase-related protein
  misc_feature (99)..(99): Xaa is any aa, unknown or other
MAMPSGWRGILGFHYGIVQAPLGPDISGPELVAAVANAGAIGLLRLPDWPAPDHVRELIRKTRSLTSKPFGAAIVLAFPHEENLRVVPGGEARRAAGLXGGLPQPPGPKRRIAPGVKVLHQVG

SEQ ID NO: 20222 - protein, 121 aa, Zea mays subsp. mays
  peptide (1)..(121): Ceres Seq. ID no. 2788109
  misc_feature (6)..(120): Pfam Name: 2-nitropropane dioxygenase Pfam Description: 2-nitropropane dioxygenase
  misc_feature (8)..(102): Homolog of NCBI NO: 29346965 NR Description: dioxygenase, related to 2-nitropropane
  misc_feature (8)..(82): Homolog of NCBI NO: 28209899 NR Description: enoyl-
  misc_feature (8)..(117): Homolog of NCBI NO: 16127609 NR Description: conserved hypothetical protein [Caulobacter
  misc_feature (8)..(85): Homolog of NCBI NO: 20807921 NR Description: Dioxygenases related to 2-nitropropane
  misc_feature (6)..(117): Homolog of NCBI NO: 23015687 NR Description: hypothetical protein [Magnetospirillum
  misc_feature (1)..(74): Homolog of NCBI NO: 30019518 NR Description: Nitropropane dioxygenase / Trans-enoyl-CoA
  misc_feature (50)..(120): Homolog of NCBI NO: 30697978 NR Description: 2-nitropropane dioxygenase-related protein
  misc_feature (6)..(120): Homolog of NCBI NO: 30697982 NR Description: 2-nitropropane dioxygenase-related protein
  misc_feature (97)..(97): Xaa is any aa, unknown or other
MPSGWRGILGFHYGIVQAPLGPDISGPELVAAVANAGAIGLLRLPDWPAPDHVRELIRKTRSLTSKPFGAAIVLAFPHEENLRVVPGGEARRAAGLXGGLPQPPGPKRRIAPGVKVLHQVG

SEQ ID NO: 20223 - DNA, 443 bp, Zea mays subsp. mays
  misc_feature (1)..(443): Ceres Seq. ID no. 2787343
  misc_feature: MA Experiment ID: 108528 Result: Down-regulated in Transcription
  misc_feature: MA Experiment 108528 PARAMETER Experiment Name: Zm_Imbibed_Seeds_P Parameter: Age (day) Value: 5 vs. 2
  misc_feature: MA Experiment 108528 PARAMETER Experiment Name: Zm_Imbibed_Seeds_P Parameter: Organism Value: Zea mays
  misc_feature: MA Experiment 108528 PARAMETER Experiment Name: Zm_Imbibed_Seeds_P Parameter: Plant Line Value: 35A19
  misc_feature: MA Experiment 108528 PARAMETER Experiment Name: Zm_Imbibed_Seeds_P Parameter: Tissue Value: Aerial vs. Embryo
  misc_feature: MA Experiment ID: 108530 Result: Down-regulated in Transcription
  misc_feature: MA Experiment 108530 PARAMETER Experiment Name: Zm_Imbibed_Seeds_P Parameter: Age (day) Value: 6 vs. 2
  misc_feature: MA Experiment 108530 PARAMETER Experiment Name: Zm_Imbibed_Seeds_P Parameter: Organism Value: Zea mays
  misc_feature: MA Experiment 108530 PARAMETER Experiment Name: Zm_Imbibed_Seeds_P Parameter: Plant Line Value: 35A19
  misc_feature: MA Experiment 108530 PARAMETER Experiment Name: Zm_Imbibed_Seeds_P Parameter: Tissue Value: Aerial vs. Embryo
  misc_feature: MA Experiment ID: 108543 Result: Up-regulated in Transcription
  misc_feature: MA Experiment ID: 108545 Result: Down-regulated in Transcription
  misc_feature: MA Experiment 108545 PARAMETER Experiment Name: Zm_Imbibed_Seeds_P Parameter: Age (day) Value: 3 vs. 2
  misc_feature: MA Experiment 108545 PARAMETER Experiment Name: Zm_Imbibed_Seeds_P Parameter: Organism Value: Zea mays
  misc_feature: MA Experiment 108545 PARAMETER Experiment Name: Zm_Imbibed_Seeds_P Parameter: Plant Line Value: 35A19
  misc_feature: MA Experiment 108545 PARAMETER Experiment Name: Zm_Imbibed_Seeds_P Parameter: Tissue Value: Aerial vs. Embryo
  misc_feature: MA Experiment ID: 108546 Result: Up-regulated in Transcription
  misc_feature: MA Experiment 108546 PARAMETER Experiment Name: Zm_Imbibed_Seeds_P Parameter: Age (day) Value: 3 vs. 2
  misc_feature: MA Experiment 108546 PARAMETER Experiment Name: Zm_Imbibed_Seeds_P Parameter: Organism Value: Zea mays
  misc_feature: MA Experiment 108546 PARAMETER Experiment Name: Zm_Imbibed_Seeds_P Parameter: Plant Line Value: 35A19
  misc_feature: MA Experiment 108546 PARAMETER Experiment Name: Zm_Imbibed_Seeds_P Parameter: Tissue Value: Roots vs. Embryo
  misc_feature: MA Experiment ID: 108547 Result: Down-regulated in Transcription
  misc_feature: MA Experiment 108547 PARAMETER Experiment Name: Zm_Imbibed_Seeds_P Parameter: Age (day) Value: 4 vs. 2
  misc_feature: MA Experiment 108547 PARAMETER Experiment Name: Zm_Imbibed_Seeds_P Parameter: Organism Value: Zea mays
  misc_feature: MA Experiment 108547 PARAMETER Experiment Name: Zm_Imbibed_Seeds_P Parameter: Plant Line Value: 35A19
  misc_feature: MA Experiment 108547 PARAMETER Experiment Name: Zm_Imbibed_Seeds_P Parameter: Tissue Value: Aerial vs. Embryo
agagcccagcgtccgtctcttgctcatcagcatcagctagccacccgaccaggcttcagaaaacaaaaaaatgaagctctctgcggcagtcctctgcgcgcttgtggctgttcaggcggcggtgcttctcgccaccgtgccgacggcgcaggccagcgagctggaggtcgggtactacagcaagaaatgcaagggcgtggagaacgtggtgaagtggcacgtcatcaaggcgatcaaggccaaccgccgcaccggcgccgctctcgtccgccttatcttccatgactgcttcgtcaggggttgcgacggttctgtccttctggacgcttcctacgacaaccctcacccggagaaggaagcgccggtgaacatcgggctcgcagccttcgacgtactggangagatcaargccgctgtcgagaagagtgccccggcgtggtctc

SEQ ID NO: 20224 - protein, 124 aa, Zea mays subsp. mays
  peptide (1)..(124): Ceres Seq. ID no. 2787344
  misc_feature (47)..(121): Pfam Name: Peroxidase Pfam Description: Peroxidase
  misc_feature (1)..(121): Homolog of NCBI NO: 34894394 NR Description: putative peroxidase [Oryza sativa (japonica
  misc_feature (1)..(121): Homolog of NCBI NO: 12039354 NR Description: putative peroxidase [Oryza sativa]
  misc_feature (2)..(121): Homolog of NCBI NO: 34896944 NR Description: putative peroxidase [Oryza sativa]
  misc_feature (24)..(121): Homolog of NCBI NO: 27261097 NR Description: putative peroxidase [Oryza sativa (japonica
  misc_feature (3)..(121): Homolog of NCBI NO: 12039346 NR Description: putative peroxidase [Oryza sativa]
  misc_feature (11)..(121): Homolog of NCBI NO: 34894398 NR Description: putative peroxidase [Oryza sativa (japonica
  misc_feature (10)..(121): Homolog of NCBI NO: 27261094 NR Description: putative peroxidase [Oryza sativa (japonica
  misc_feature (1)..(121): Homolog of NCBI NO: 12039335 NR Description: putative peroxidase [Oryza sativa]
  misc_feature (2)..(121): Homolog of NCBI NO: 34896266 NR Description: putative peroxidase [Oryza sativa]
  misc_feature (1)..(121): Homolog of NCBI NO: 34894404 NR Description: putative peroxidase [Oryza sativa (japonica
  misc_feature (110)..(110): Xaa is any aa, unknown or other
  misc_feature (113)..(113): Xaa is any aa, unknown or other
MKLSAAVLCALVAVQAAVLLATVPTAQASELEVGYYSKKCKGVENVVKWHVIKAIKANRRTGAALVRLIFHDCFVRGCDGSVLLDASYDNPHPEKEAPVNIGLAAFDVLXEIXAAVEKSAPAWS

SEQ ID NO: 20225 - protein, 94 aa, Zea mays subsp. mays
  peptide (1)..(94): Ceres Seq. ID no. 2787345
RAQRPSLAHQHQLATRPGFRKQKNEALCGSPLRACGCSGGGASRHRADGAGQRAGGRVLQQEMQGRGERGEVARHQGDQGQPPHRRRSRPPYLP

SEQ ID NO: 20226 - DNA, 1618 bp, Zea mays subsp. mays
  misc_feature (1)..(1618): Ceres Seq. ID no. 12380103
  misc_feature: MA Experiment ID: 20000492 Result: Down-regulated in Transcription
  misc_feature: MA Experiment 20000492 PARAMETER Experiment Name: Zm_Hybrid_Seed_Dev_P Parameter: DAP Value: 12
  misc_feature: MA Experiment 20000492 PARAMETER Experiment Name: Zm_Hybrid_Seed_Dev_P Parameter: Organism Value: Zea mays
  misc_feature: MA Experiment 20000492 PARAMETER Experiment Name: Zm_Hybrid_Seed_Dev_P Parameter: Plant Line Value: 35A19
  misc_feature: MA Experiment 20000492 PARAMETER Experiment Name: Zm_Hybrid_Seed_Dev_P Parameter: Tissue Value: Fert Kernel vs. Unfert Floret
ataaaaaaatggcgaaatgaaattcacggtaccagggtcaaccgagcacggacgcgtaaagccaacaaggggggaccgggggagcacgaggaaaccgaggagactgacccaacccgtgcttgcggcggcgctgcgctggtgccggccacggccatgatcggcggcgggcgggcagcggatagccacccggcgtcctgctcgtcctcgtcctcgtcttcctcctcgccgtcaggcccgtcgacggggggctcccgccttcaccgcagcaagaggcgtcccgacatcctcaacatgctcatgagtgcagcatgtctcagttcatcatcttctgatactggaaaaggacaaagcaagttttcaagcaacaaagtaacacacggatttcacttagtggaaggaagatctggccatgatatggaagactaccatgtagcagagtatagatatgaaaatgatcacgaacttggtctttttgctatttatgatggacatctgggagatagtgtggccagttatttgaaagctaatctttttgacaacatactgaaagagcctctcttttggtcagaccctcaagaagcaattaaaaacgcatacagctctacaaacaaatatattctggaaaacactaggcaactaggaccaggggggtcaacagcagtcactgctattgtagttgatggtacagatatgtggattgcaaatgtaggtgattcaagagctgttttgtctgaaactggtactgccagccaggttactgttgatcacgaacctcataccactaatgaacgaaagaggatagaagaaaaaggtggttttgtctctacgttccccggtaagcatctagttgcctagctctcaggtcattgttctctccaatagctatggaatttgtcccaatgcattttctagttgctgataggtgacgttcctcgtgtaaacggccaacttgcggttgcaagagcatttggtgatcagagcctcaaggcacacttgagctcagagcctgatgttaagcatataaagataaattcaagcacagagtttgtcatacttgccagtgacgggttatggaaggtatgtgtcttccttgcgtatttcactttacgttgccgtcgccttccctatatagttcaagatttcgatatccaatctgaatcgttttctcttagttctctcttttctcgttgttcatattcactcttttaccctgtttctggtgaaggtaatgaagaaccaggaagccgttgatctggtgaagtcaaccaaggacccgcaaacagcggcgaagcgactgacgtccgaggccctgggaaggatgagcaaggacgatatctcatgcattgtcatccgttttcgatgctgactcttgggtaatccagctcatccattgccctaagctgcctgtgtgcatcagcagaactgtttcctccgtatcgtagctggtagcgtctggatctgtttgcagctcaggatcagattggtgattggactggacaggttattgaccaaagaatagaagaatgctgggtttgggtgttttcagcgtctgcaggctgttctttttttcttcttctgtgcatatatacacgttggaatcaaatatataccgtcggac

SEQ ID NO: 20227 - protein, 284 aa, Zea mays subsp. mays
  peptide (1)..(284): Ceres Seq. ID no. 12380104
  misc_feature (124)..(279): Pfam Name: Protein phosphatase 2C Pfam Description: Protein phosphatase 2C
  misc_feature (81)..(279): Homolog of NCBI NO: 21539551 NR Description: putative protein phosphatase type 2C [Arabidopsis
  misc_feature (81)..(279): Homolog of NCBI NO: 15232538 NR Description: protein phosphatase 2C (PP2C); protein id:
  misc_feature (108)..(279): Homolog of NCBI NO: 15218759 NR Description: protein phosphatase 2C (PP2C)
  misc_feature (94)..(279): Homolog of NCBI NO: 4336436 NR Description: protein phosphatase type 2C [Lotus japonicus]
  misc_feature (108)..(279): Homolog of NCBI NO: 21537096 NR Description: protein phosphatase type 2C, putative
  misc_feature (108)..(279): Homolog of NCBI NO: 18395099 NR Description: protein phosphatase 2C (PP2C), putative
  misc_feature (124)..(279): Homolog of NCBI NO: 7488280 NR Description: protein phosphatase 2C homolog F20O9.80 -
  misc_feature (94)..(279): Homolog of NCBI NO: 18417190 NR Description: protein phosphatase 2C (PP2C)
  misc_feature (106)..(279): Homolog of NCBI NO: 23307574 NR Description: putative protein phosphatase 2C homolog
  misc_feature (139)..(279): Homolog of NCBI NO: 38567903 NR Description: OSJNBa0060N03.23 [Oryza sativa (japonica
IKKWRNEIHGTRVNRARTRKANKGGPGEHEETEETDPTRACGGAALVPATAMIGGGRAADSHPASCSSSSSSSSSPSGPSTGGSRLHRSKRRPDILNMLMSAACLSSSSSDTGKGQSKFSSNKVTHGFHLVEGRSGHDMEDYHVAEYRYENDHELGLFAIYDGHLGDSVASYLKANLFDNILKEPLFWSDPQEAIKNAYSSTNKYILENTRQLGPGGSTAVTAIVVDGTDMWIANVGDSRAVLSETGTASQVTVDHEPHTTNERKRIEEKGGFVSTFPGKHLVA

SEQ ID NO: 20228 - protein, 233 aa, Zea mays subsp. mays
  peptide (1)..(233): Ceres Seq. ID no. 12380105
  misc_feature (73)..(228): Pfam Name: Protein phosphatase 2C Pfam Description: Protein phosphatase 2C
  misc_feature (30)..(228): Homolog of NCBI NO: 21539551 NR Description: putative protein phosphatase type 2C [Arabidopsis
  misc_feature (30)..(228): Homolog of NCBI NO: 15232538 NR Description: protein phosphatase 2C (PP2C); protein id:
  misc_feature (57)..(228): Homolog of NCBI NO: 15218759 NR Description: protein phosphatase 2C (PP2C)
  misc_feature (43)..(228): Homolog of NCBI NO: 4336436 NR Description: protein phosphatase type 2C [Lotus japonicus]
  misc_feature (57)..(228): Homolog of NCBI NO: 21537096 NR Description: protein phosphatase type 2C, putative
  misc_feature (57)..(228): Homolog of NCBI NO: 18395099 NR Description: protein phosphatase 2C (PP2C), putative
  misc_feature (73)..(228): Homolog of NCBI NO: 7488280 NR Description: protein phosphatase 2C homolog F20O9.80 -
  misc_feature (43)..(228): Homolog of NCBI NO: 18417190 NR Description: protein phosphatase 2C (PP2C)
  misc_feature (55)..(228): Homolog of NCBI NO: 23307574 NR Description: putative protein phosphatase 2C homolog
  misc_feature (88)..(228): Homolog of NCBI NO: 38567903 NR Description: OSJNBa0060N03.23 [Oryza sativa (japonica
MIGGGRAADSHPASCSSSSSSSSSPSGPSTGGSRLHRSKRRPDILNMLMSAACLSSSSSDTGKGQSKFSSNKVTHGFHLVEGRSGHDMEDYHVAEYRYENDHELGLFAIYDGHLGDSVASYLKANLFDNILKEPLFWSDPQEAIKNAYSSTNKYILENTRQLGPGGSTAVTAIVVDGTDMWIANVGDSRAVLSETGTASQVTVDHEPHTTNERKRIEEKGGFVSTFPGKHLVA

SEQ ID NO: 20229 - protein, 187 aa, Zea mays subsp. mays
  peptide (1)..(187): Ceres Seq. ID no. 12380106
  misc_feature (27)..(182): Pfam Name: Protein phosphatase 2C Pfam Description: Protein phosphatase 2C
  misc_feature (1)..(182): Homolog of NCBI NO: 21539551 NR Description: putative protein phosphatase type 2C [Arabidopsis
  misc_feature (1)..(182): Homolog of NCBI NO: 15232538 NR Description: protein phosphatase 2C (PP2C); protein id:
  misc_feature (11)..(182): Homolog of NCBI NO: 15218759 NR Description: protein phosphatase 2C (PP2C)
  misc_feature (1)..(182): Homolog of NCBI NO: 4336436 NR Description: protein phosphatase type 2C [Lotus japonicus]
  misc_feature (11)..(182): Homolog of NCBI NO: 21537096 NR Description: protein phosphatase type 2C, putative
  misc_feature (11)..(182): Homolog of NCBI NO: 18395099 NR Description: protein phosphatase 2C (PP2C), putative
  misc_feature (27)..(182): Homolog of NCBI NO: 7488280 NR Description: protein phosphatase 2C homolog F20O9.80 -
  misc_feature (1)..(182): Homolog of NCBI NO: 18417190 NR Description: protein phosphatase 2C (PP2C)
  misc_feature (9)..(182): Homolog of NCBI NO: 23307574 NR Description: putative protein phosphatase 2C homolog
  misc_feature (42)..(182): Homolog of NCBI NO: 38567903 NR Description: OSJNBa0060N03.23 [Oryza sativa (japonica
MLMSAACLSSSSSDTGKGQSKFSSNKVTHGFHLVEGRSGHDMEDYHVAEYRYENDHELGLFAIYDGHLGDSVASYLKANLFDNILKEPLFWSDPQEAIKNAYSSTNKYILENTRQLGPGGSTAVTAIVVDGTDMWIANVGDSRAVLSETGTASQVTVDHEPHTTNERKRIEEKGGFVSTFPGKHLVA

SEQ ID NO: 20230 - DNA, 1777 bp, Zea mays subsp. mays
  misc_feature (1)..(1777): Ceres Seq. ID no. 12384320
  misc_feature: MA Experiment ID: 108522 Result: Up-regulated in Transcription
  misc_feature: MA Experiment 108522 PARAMETER Experiment Name: Zm_42deg_Heat_P Parameter: Age (day) Value: 8
  misc_feature: MA Experiment 108522 PARAMETER Experiment Name: Zm_42deg_Heat_P Parameter: Organism Value: Zea mays
  misc_feature: MA Experiment 108522 PARAMETER Experiment Name: Zm_42deg_Heat_P Parameter: Plant Line Value: 35A19
  misc_feature: MA Experiment 108522 PARAMETER Experiment Name: Zm_42deg_Heat_P Parameter: Temperature (deg C) Value: 42 vs. 22
  misc_feature: MA Experiment 108522 PARAMETER Experiment Name: Zm_42deg_Heat_P Parameter: Timepoint (hr) Value: 1
  misc_feature: MA Experiment 108522 PARAMETER Experiment Name: Zm_42deg_Heat_P Parameter: Tissue Value: Aerial
gcacgagaccattacctagaacatcctaatcaaaaaaagcaaaaacatattcctgtaataatagactgcctactccgtcttcctccgtatctctccctctctctgcttcctgtgtgcttctgttctgttagataggttaacatttggtatcagaagtccgtcgatccttggatctcgcatggcgaccacaggcgcagttgatgcccagctcaccctcgcgttggaatctcaaacgcgctccctgctgtctgaattggacaagcgcatccatgccatcgactccaagtgggcaaaccgcgtgggaatcctggagactcaagtggccgattccaccaggcgtttggagtcgttctccagggggatccatgaagacctggaggcccgtttggtgacagccgatgaagctgtggatgatcggatccgctatctggaggcgagtacgatctcccgtgtcgcggcgctcgagtcgtcttctcaagccgttgagctctggcggccccaaatcgatgcgtcgattgacgggctctatgccaacatccagacgattcgcgccgacatcgcgcagatcgtgacccaacaacctcccaacagccgttccggcgggttcggcgcagccggcatcctcggaacccccagatcggtgattgggcgttcccctgctaccttcgacaacaccgattgctcacgttttgggcccggcgctgcaatttttcaccgggacagtggtattgggtataatcaacccaatttccgctgcccggtcacgggtgcgtggaacaatccttctccttcgtttacgtttcctactcagtatgatcatagtggccatgttcccttgcaccgtcagttaggggatttgcccaagctttcatttcccaagtttgacggtactagcccaaaattatggcagaaacgatgcgaggattattttgctatgtatgccactgaaatcactgtttgggtcagagtagcgtccatgcactttgagggggttgctgggtgttggtttcagtctattgaaccacaagtgtcttcctggtcatggcaacagttttgtcaagctgtgcacgatcgttttgggcgtgaacaacacgagcttgttattcgcaagctgttccatatccgtcagacatcttcggtccaggattatgttgatcgtttttgtgaacttattgatgtccttgtcacctatgagcacactacagatcctttgtattataccatgaaattcattgatggcctccgtgacgatattaaatctgttatattggttcaacgccccagcactttggatggatactgcctgcgctcttgctttgttacaggaagaggcagattcatcccggcgtcgttagcatcgtgggtcggagggtgcgttcccagggcgttcatatccgaagttacctgctcctcctcctcctaggtgggataaatcgctgggaggggaaactgtcgccaccaagcctgtggtccctcagccgggttcttctactgacaagctcgcatcccttcgtgcttatcgtcatgcctgaggtctgtgtcaatattgcgctgaaaaatgggacaagggtcacaagtgcgctcagacagttcagctgcatgctatccaggaagtatgggatctgttgaatccggaactcaccggatcagaaggtgatttcgaagattccacggatcagttcatgatgttattgtcccgagaggccagttctccaaaaactgcatattctacgttcaaacttcaagggtatatccaaggaattccactgatgatttt

SEQ ID NO: 20231 - protein, 414 aa, Zea mays subsp. mays
  peptide (1)..(414): Ceres Seq. ID no. 12384321
  misc_feature (263)..(357): Pfam Name: Retrotransposon gag protein Pfam Description: Retrotransposon gag protein
  misc_feature (227)..(372): Homolog of NCBI NO: 38345562 NR Description: OSJNBa0032F06.19 [Oryza sativa (japonica
  misc_feature (187)..(375): Homolog of NCBI NO: 38346427 NR Description: OSJNBa0019J05.12 [Oryza sativa (japonica
  misc_feature (179)..(372): Homolog of NCBI NO: 37531486 NR Description: putative retroelement [Oryza sativa (japonica
  misc_feature (204)..(375): Homolog of NCBI NO: 37536012 NR Description: putative gag-pol polyprotein
  misc_feature (199)..(375): Homolog of NCBI NO: 15451606 NR Description: Putative mutator-like transposase [Oryza sativa]
  misc_feature (221)..(375): Homolog of NCBI NO: 38568032 NR Description: OSJNBa0065J03.2 [Oryza sativa (japonica
  misc_feature (94)..(372): Homolog of NCBI NO: 38346992 NR Description: OSJNBb0062H02.17 [Oryza sativa (japonica
  misc_feature (93)..(372): Homolog of NCBI NO: 21671877 NR Description: Putative retroelement [Oryza sativa (japonica
  misc_feature (67)..(375): Homolog of NCBI NO: 32489310 NR Description: OSJNBa0060B20.14 [Oryza sativa (japonica
  misc_feature (55)..(375): Homolog of NCBI NO: 18568269 NR Description: putative gag-pol polyprotein [Zea mays]
MATTGAVDAQLTLALESQTRSLLSELDKRIHAIDSKWANRVGILETQVADSTRRLESFSRGIHEDLEARLVTADEAVDDRIRYLEASTISRVAALESSSQAVELWRPQIDASIDGLYANIQTIRADIAQIVTQQPPNSRSGGFGAAGILGTPRSVIGRSPATFDNTDCSRFGPGAAIFHRDSGIGYNQPNFRCPVTGAWNNPSPSFTFPTQYDHSGHVPLHRQLGDLPKLSFPKFDGTSPKLWQKRCEDYFAMYATEITVWVRVASMHFEGVAGCWFQSIEPQVSSWSWQQFCQAVHDRFGREQHELVIRKLFHIRQTSSVQDYVDRFCELIDVLVTYEHTTDPLYYTMKFIDGLRDDIKSVILVQRPSTLDGYCLRSCFVTGRGRFIPASLASWVGGCVPRAFISEVTCSSSS

SEQ ID NO: 20232 - DNA, 1444 bp, Zea mays subsp. mays
  misc_feature (1)..(1444): Ceres Seq. ID no. 12391561
  misc_feature: MA Experiment ID: 108528 Result: Down-regulated in Transcription
  misc_feature: MA Experiment 108528 PARAMETER Experiment Name: Zm_Imbibed_Seeds_P Parameter: Age (day) Value: 5 vs. 2
  misc_feature: MA Experiment 108528 PARAMETER Experiment Name: Zm_Imbibed_Seeds_P Parameter: Organism Value: Zea mays
  misc_feature: MA Experiment 108528 PARAMETER Experiment Name: Zm_Imbibed_Seeds_P Parameter: Plant Line Value: 35A19
  misc_feature: MA Experiment 108528 PARAMETER Experiment Name: Zm_Imbibed_Seeds_P Parameter: Tissue Value: Aerial vs. Embryo
  misc_feature: MA Experiment ID: 108535 Result: Up-regulated in Transcription
  misc_feature: MA Experiment 108535 PARAMETER Experiment Name: Zm_Meristem_P Parameter: Age (day) Value: 8
  misc_feature: MA Experiment 108535 PARAMETER Experiment Name: Zm_Meristem_P Parameter: Organism Value: Zea mays
  misc_feature: MA Experiment 108535 PARAMETER Experiment Name: Zm_Meristem_P Parameter: Plant Line Value: 35A19
  misc_feature: MA Experiment 108535 PARAMETER Experiment Name: Zm_Meristem_P Parameter: Tissue Value: Root Meristem vs. Above Root Meristem
  misc_feature: MA Experiment ID: 108544 Result: Down-regulated in Transcription
  misc_feature: MA Experiment ID: 108545 Result: Down-regulated in Transcription
  misc_feature: MA Experiment 108545 PARAMETER Experiment Name: Zm_Imbibed_Seeds_P Parameter: Age (day) Value: 3 vs. 2
  misc_feature: MA Experiment 108545 PARAMETER Experiment Name: Zm_Imbibed_Seeds_P Parameter: Organism Value: Zea mays
  misc_feature: MA Experiment 108545 PARAMETER Experiment Name: Zm_Imbibed_Seeds_P Parameter: Plant Line Value: 35A19
  misc_feature: MA Experiment 108545 PARAMETER Experiment Name: Zm_Imbibed_Seeds_P Parameter: Tissue Value: Aerial vs. Embryo
  misc_feature: MA Experiment ID: 108547 Result: Down-regulated in Transcription
  misc_feature: MA Experiment 108547 PARAMETER Experiment Name: Zm_Imbibed_Seeds_P Parameter: Age (day) Value: 4 vs. 2
  misc_feature: MA Experiment 108547 PARAMETER Experiment Name: Zm_Imbibed_Seeds_P Parameter: Organism Value: Zea mays
  misc_feature: MA Experiment 108547 PARAMETER Experiment Name: Zm_Imbibed_Seeds_P Parameter: Plant Line Value: 35A19
  misc_feature: MA Experiment 108547 PARAMETER Experiment Name: Zm_Imbibed_Seeds_P Parameter: Tissue Value: Aerial vs. Embryo
  misc_feature: MA Experiment ID: 108687 Result: Up-regulated in Transcription
  misc_feature: MA Experiment 108687 PARAMETER Experiment Name: Zm_Embryos-Flowers__P Parameter: Tissue Value: Embryo vs. Aerial+
atatagtgtgtcactttgtcccctcctacgcgacttcccctccaattcaggcgctctctctctcgatccatgcatctcaactcaaaggcattcaattaattaattatactagctagctaggaggaggagtactccggccggccggccggcgcccataagaacctctcgtgttgtgtatgcatcgatcgatcgatcgatcgatctccgactccgacgacctcgctatccgccatggctagcagcagcagtcttgtcaagtgcctggcggtcacggtggcggtggcgctcctggcgctgtcgtcgtgtggcgtggttgcctcggcggcggcgtggaggggcaagcctcagaagttgaagcccggggagaagccctccggcaaatccaagttcttcgccctcacccccggaatgttcggccacaagcgcgactaccaggccgcctgctccgacgagggtggcccggcatgctacgtgggttgcccaaaggattgccctaacaaatgcctcgtcttctgcgcctactgcctcagcttctgcatgtgtgatatcttccccggcacctcctgcggcgacccgcgcttcaccggcggcgacggcaacaccttctacttccatggaaacaaggacaaggacttctgcctcgtctccgacgcgggcctccacatcaacgcccacttcatcggcaaccacaacccggccctcaaccgcgacttcacgtgggtgcaggcgctgggggtcaccttcgtcgcaccaggcggcgccggcgaccgccaccgcctctacgtcggcgcccgcagggccgcggagtgggacgaggaggacgaccacatccagctcaccttggacgccgagcccgtcgacgtcgacgccgtcaagaacgcgcgctgggcgtccaaggccctcccggggctctccgtcacgcgcatggacgccgtcaacaccgtcatggtggagctggacggcgtcttcgccatctccgccaacgccgtgcccatcaccgacagggacgaccggatccacggctacggcaagacgggcgccgacagcctcgtgcacctcgacctggccttccagttccataacctcaccgcggacgtccacggcgtcctgggccagacctaccgccctggctacgtcagcaagctcgacatcggcgccaagatgcccgtcatgggcggcgcgcccaagtacctgtccgccggtctcttctccacggactgcgccgtctcccggttccactctttcgcctccgcctaatactaagtcccaagcgcgaccgatcctattcctatccacggcgtgaaataagatttctgtatgtaggctcttatctcatctcatcgtatgaaaatgtacacgtgcgttgctgcattggaagtacgtattgttgcacgatcaactgaataacttgcgtctcgaaaattttatgcactagtacgttcgc

SEQ ID NO: 20233 - protein, 341 aa, Zea mays subsp. mays
  peptide (1)..(341): Ceres Seq. ID no. 12391562
  misc_feature (68)..(341): Homolog of NCBI NO: 7484468 NR Description: late embryonic abundant protein EMB7 - white
  misc_feature (71)..(335): Homolog of NCBI NO: 30685319 NR Description: late embryogenesis abundant protein -related
  misc_feature (71)..(335): Homolog of NCBI NO: 11994465 NR Description: contains similarity to late embryogenesis
  misc_feature (16)..(335): Homolog of NCBI NO: 4514637 NR Description: root cap protein 2 [Zea mays]
  misc_feature (76)..(335): Homolog of NCBI NO: 21741738 NR Description: OSJNBa0073L04.18 [Oryza sativa (japonica
  misc_feature (79)..(335): Homolog of NCBI NO: 4514635 NR Description: root cap protein 1 [Zea mays]
  misc_feature (45)..(340): Homolog of NCBI NO: 34905934 NR Description: similar to root cap protein
  misc_feature (47)..(335): Homolog of NCBI NO: 34905930 NR Description: similar to root cap protein
  misc_feature (13)..(335): Homolog of NCBI NO: 34905936 NR Description: similar to root cap protein
  misc_feature (11)..(336): Homolog of NCBI NO: 34905940 NR Description: similar to root cap protein
MASSSSLVKCLAVTVAVALLALSSCGVVASAAAWRGKPQKLKPGEKPSGKSKFFALTPGMFGHKRDYQAACSDEGGPACYVGCPKDCPNKCLVFCAYCLSFCMCDIFPGTSCGDPRFTGGDGNTFYFHGNKDKDFCLVSDAGLHINAHFIGNHNPALNRDFTWVQALGVTFVAPGGAGDRHRLYVGARRAAEWDEEDDHIQLTLDAEPVDVDAVKNARWASKALPGLSVTRMDAVNTVMVELDGVFAISANAVPITDRDDRIHGYGKTGADSLVHLDLAFQFHNLTADVHGVLGQTYRPGYVSKLDIGAKMPVMGGAPKYLSAGLFSTDCAVSRFHSFASA

SEQ ID NO: 20234 - protein, 282 aa, Zea mays subsp. mays
  peptide (1)..(282): Ceres Seq. ID no. 12391563
  misc_feature (9)..(282): Homolog of NCBI NO: 7484468 NR Description: late embryonic abundant protein EMB7 - white
  misc_feature (12)..(276): Homolog of NCBI NO: 30685319 NR Description: late embryogenesis abundant protein -related
  misc_feature (12)..(276): Homolog of NCBI NO: 11994465 NR Description: contains similarity to late embryogenesis
  misc_feature (1)..(276): Homolog of NCBI NO: 4514637 NR Description: root cap protein 2 [Zea mays]
  misc_feature (17)..(276): Homolog of NCBI NO: 21741738 NR Description: OSJNBa0073L04.18 [Oryza sativa (japonica
  misc_feature (20)..(276): Homolog of NCBI NO: 4514635 NR Description: root cap protein 1 [Zea mays]
  misc_feature (1)..(281): Homolog of NCBI NO: 34905934 NR Description: similar to root cap protein
  misc_feature (1)..(276): Homolog of NCBI NO: 34905930 NR Description: similar to root cap protein
  misc_feature (1)..(276): Homolog of NCBI NO: 34905936 NR Description: similar to root cap protein
  misc_feature (1)..(277): Homolog of NCBI NO: 34905940 NR Description: similar to root cap protein
MFGHKRDYQAACSDEGGPACYVGCPKDCPNKCLVFCAYCLSFCMCDIFPGTSCGDPRFTGGDGNTFYFHGNKDKDFCLVSDAGLHINAHFIGNHNPALNRDFTWVQALGVTFVAPGGAGDRHRLYVGARRAAEWDEEDDHIQLTLDAEPVDVDAVKNARWASKALPGLSVTRMDAVNTVMVELDGVFAISANAVPITDRDDRIHGYGKTGADSLVHLDLAFQFHNLTADVHGVLGQTYRPGYVSKLDIGAKMPVMGGAPKYLSAGLFSTDCAVSRFHSFASA

SEQ ID NO: 20235 - protein, 239 aa, Zea mays subsp. mays
  peptide (1)..(239): Ceres Seq. ID no. 12391564
  misc_feature (1)..(239): Homolog of NCBI NO: 7484468 NR Description: late embryonic abundant protein EMB7 - white
  misc_feature (1)..(233): Homolog of NCBI NO: 30685319 NR Description: late embryogenesis abundant protein -related
  misc_feature (1)..(233): Homolog of NCBI NO: 11994465 NR Description: contains similarity to late embryogenesis
  misc_feature (1)..(233): Homolog of NCBI NO: 4514637 NR Description: root cap protein 2 [Zea mays]
  misc_feature (1)..(233): Homolog of NCBI NO: 21741738 NR Description: OSJNBa0073L04.18 [Oryza sativa (japonica
  misc_feature (1)..(233): Homolog of NCBI NO: 4514635 NR Description: root cap protein 1 [Zea mays]
  misc_feature (1)..(238): Homolog of NCBI NO: 34905934 NR Description: similar to root cap protein
  misc_feature (1)..(233): Homolog of NCBI NO: 34905930 NR Description: similar to root cap protein
  misc_feature (1)..(233): Homolog of NCBI NO: 34905936 NR Description: similar to root cap protein
  misc_feature (1)..(234): Homolog of NCBI NO: 34905940 NR Description: similar to root cap protein
MCDIFPGTSCGDPRFTGGDGNTFYFHGNKDKDFCLVSDAGLHINAHFIGNHNPALNRDFTWVQALGVTFVAPGGAGDRHRLYVGARRAAEWDEEDDHIQLTLDAEPVDVDAVKNARWASKALPGLSVTRMDAVNTVMVELDGVFAISANAVPITDRDDRIHGYGKTGADSLVHLDLAFQFHNLTADVHGVLGQTYRPGYVSKLDIGAKMPVMGGAPKYLSAGLFSTDCAVSRFHSFASA

SEQ ID NO: 20236 - DNA, 1318 bp, Zea mays subsp. mays
  misc_feature (1)..(1318): Ceres Seq. ID no. 12454822
  misc_feature: MA Experiment ID: 108504 Result: Up-regulated in Transcription
  misc_feature: MA Experiment 108504 PARAMETER Experiment Name: Zm_Drought_P Parameter: Age (day) Value: 8
  misc_feature: MA Experiment 108504 PARAMETER Experiment Name: Zm_Drought_P Parameter: Organism Value: Zea mays
  misc_feature: MA Experiment 108504 PARAMETER Experiment Name: Zm_Drought_P Parameter: Plant Line Value: 35A19
  misc_feature: MA Experiment 108504 PARAMETER Experiment Name: Zm_Drought_P Parameter: Timepoint (hr) Value: 12
  misc_feature: MA Experiment 108504 PARAMETER Experiment Name: Zm_Drought_P Parameter: Tissue Value: Aerial
  misc_feature: MA Experiment 108504 PARAMETER Experiment Name: Zm_Drought_P Parameter: Treatment Value: Drought vs. No Drought
  misc_feature: MA Experiment ID: 108523 Result: Up-regulated in Transcription
  misc_feature: MA Experiment 108523 PARAMETER Experiment Name: Zm_42deg_Heat_P Parameter: Age (day) Value: 8
  misc_feature: MA Experiment 108523 PARAMETER Experiment Name: Zm_42deg_Heat_P Parameter: Organism Value: Zea mays
  misc_feature: MA Experiment 108523 PARAMETER Experiment Name: Zm_42deg_Heat_P Parameter: Plant Line Value: 35A19
  misc_feature: MA Experiment 108523 PARAMETER Experiment Name: Zm_42deg_Heat_P Parameter: Temperature (deg C) Value: 42 vs. 22
  misc_feature: MA Experiment 108523 PARAMETER Experiment Name: Zm_42deg_Heat_P Parameter: Timepoint (hr) Value: 6
  misc_feature: MA Experiment 108523 PARAMETER Experiment Name: Zm_42deg_Heat_P Parameter: Tissue Value: Aerial
  misc_feature: MA Experiment ID: 108540 Result: Up-regulated in Transcription
  misc_feature: MA Experiment 108540 PARAMETER Experiment Name: Zm_20percent_PEG_P Parameter: Age (day) Value: 8
  misc_feature: MA Experiment 108540 PARAMETER Experiment Name: Zm_20percent_PEG_P Parameter: Organism Value: Zea mays
  misc_feature: MA Experiment 108540 PARAMETER Experiment Name: Zm_20percent_PEG_P Parameter: Plant Line Value: 35A19
  misc_feature: MA Experiment 108540 PARAMETER Experiment Name: Zm_20percent_PEG_P Parameter: Timepoint (hr) Value: 6
  misc_feature: MA Experiment 108540 PARAMETER Experiment Name: Zm_20percent_PEG_P Parameter: Tissue Value: Aerial
  misc_feature: MA Experiment 108540 PARAMETER Experiment Name: Zm_20percent_PEG_P Parameter: Treatment Value: 20percent PEG vs. No Treatment
  misc_feature: MA Experiment ID: 108556 Result: Up-regulated in Transcription
  misc_feature: MA Experiment 108556 PARAMETER Experiment Name: Zm_Drought_P Parameter: Age (day) Value: 9
  misc_feature: MA Experiment 108556 PARAMETER Experiment Name: Zm_Drought_P Parameter: Organism Value: Zea mays
  misc_feature: MA Experiment 108556 PARAMETER Experiment Name: Zm_Drought_P Parameter: Plant Line Value: 35A19
  misc_feature: MA Experiment 108556 PARAMETER Experiment Name: Zm_Drought_P Parameter: Timepoint (hr) Value: 24
  misc_feature: MA Experiment 108556 PARAMETER Experiment Name: Zm_Drought_P Parameter: Tissue Value: Aerial
  misc_feature: MA Experiment 108556 PARAMETER Experiment Name: Zm_Drought_P Parameter: Treatment Value: Drought vs. No Drought
  misc_feature: MA Experiment ID: 108597 Result: Up-regulated in Transcription
  misc_feature: MA Experiment 108597 PARAMETER Experiment Name: Zm_100uM_ABA_P Parameter: Age (day) Value: 9
  misc_feature: MA Experiment 108597 PARAMETER Experiment Name: Zm_100uM_ABA_P Parameter: Organism Value: Zea mays
  misc_feature: MA Experiment 108597 PARAMETER Experiment Name: Zm_100uM_ABA_P Parameter: Plant Line Value: 35A19
  misc_feature: MA Experiment 108597 PARAMETER Experiment Name: Zm_100uM_ABA_P Parameter: Timepoint (hr) Value: 24
  misc_feature: MA Experiment 108597 PARAMETER Experiment Name: Zm_100uM_ABA_P Parameter: Tissue Value: Aerial
  misc_feature: MA Experiment 108597 PARAMETER Experiment Name: Zm_100uM_ABA_P Parameter: Treatment Value: 100uM ABA vs. No Treatment
  misc_feature: MA Experiment ID: 108689 Result: Up-regulated in Transcription
  misc_feature: MA Experiment 108689 PARAMETER Experiment Name: Zm_Drought_Roots_P Parameter: Age (day) Value: 9
  misc_feature: MA Experiment 108689 PARAMETER Experiment Name: Zm_Drought_Roots_P Parameter: Organism Value: Zea mays
  misc_feature: MA Experiment 108689 PARAMETER Experiment Name: Zm_Drought_Roots_P Parameter: Plant Line Value: 35A19
  misc_feature: MA Experiment 108689 PARAMETER Experiment Name: Zm_Drought_Roots_P Parameter: Timepoint (hr) Value: 24
  misc_feature: MA Experiment 108689 PARAMETER Experiment Name: Zm_Drought_Roots_P Parameter: Tissue Value: Roots
  misc_feature: MA Experiment 108689 PARAMETER Experiment Name: Zm_Drought_Roots_P Parameter: Treatment Value: Drought vs. No Drought
  misc_feature: MA Experiment ID: 20000478 Result: Up-regulated in Transcription
  misc_feature: MA Experiment 20000478 PARAMETER Experiment Name: Zm_5mM_SA_P Parameter: Age (day) Value: 11
  misc_feature: MA Experiment 20000478 PARAMETER Experiment Name: Zm_5mM_SA_P Parameter: Organism Value: Zea mays
  misc_feature: MA Experiment 20000478 PARAMETER Experiment Name: Zm_5mM_SA_P Parameter: Plant Line Value: 35A19
  misc_feature: MA Experiment 20000478 PARAMETER Experiment Name: Zm_5mM_SA_P Parameter: Timepoint (hr) Value: 72
  misc_feature: MA Experiment 20000478 PARAMETER Experiment Name: Zm_5mM_SA_P Parameter: Tissue Value: Aerial
  misc_feature: MA Experiment 20000478 PARAMETER Experiment Name: Zm_5mM_SA_P Parameter: Treatment Value: 5mM SA vs. No Treatment
  misc_feature: MA Experiment ID: 20000479 Result: Up-regulated in Transcription
  misc_feature: MA Experiment 20000479 PARAMETER Experiment Name: Zm_Drought_P Parameter: Age (day) Value: 10
  misc_feature: MA Experiment 20000479 PARAMETER Experiment Name: Zm_Drought_P Parameter: Organism Value: Zea mays
  misc_feature: MA Experiment 20000479 PARAMETER Experiment Name: Zm_Drought_P Parameter: Plant Line Value: 35A19
  misc_feature: MA Experiment 20000479 PARAMETER Experiment Name: Zm_Drought_P Parameter: Timepoint (hr) Value: 48
  misc_feature: MA Experiment 20000479 PARAMETER Experiment Name: Zm_Drought_P Parameter: Tissue Value: Aerial
  misc_feature: MA Experiment 20000479 PARAMETER Experiment Name: Zm_Drought_P Parameter: Treatment Value: Drought vs. No Drought
  misc_feature: MA Experiment ID: 20000480 Result: Up-regulated in Transcription
  misc_feature: MA Experiment 20000480 PARAMETER Experiment Name: Zm_Drought_P Parameter: Age (day) Value: 11
  misc_feature: MA Experiment 20000480 PARAMETER Experiment Name: Zm_Drought_P Parameter: Organism Value: Zea mays
  misc_feature: MA Experiment 20000480 PARAMETER Experiment Name: Zm_Drought_P Parameter: Plant Line Value: 35A19
  misc_feature: MA Experiment 20000480 PARAMETER Experiment Name: Zm_Drought_P Parameter: Timepoint (hr) Value: 72
  misc_feature: MA Experiment 20000480 PARAMETER Experiment Name: Zm_Drought_P Parameter: Tissue Value: Aerial
  misc_feature: MA Experiment 20000480 PARAMETER Experiment Name: Zm_Drought_P Parameter: Treatment Value: Drought vs. No Drought
  misc_feature: MA Experiment ID: 20001608 Result: Down-regulated in Transcription
  misc_feature: MA Experiment 20001608 PARAMETER Experiment Name: Zm_50ppm_KNO3_L-to-H_P Parameter: Age (day) Value: 21
  misc_feature: MA Experiment 20001608 PARAMETER Experiment Name: Zm_50ppm_KNO3_L-to-H_P Parameter: Organism Value: Zea mays
  misc_feature: MA Experiment 20001608 PARAMETER Experiment Name: Zm_50ppm_KNO3_L-to-H_P Parameter: Plant Line Value: 35A19
  misc_feature: MA Experiment 20001608 PARAMETER Experiment Name: Zm_50ppm_KNO3_L-to-H_P Parameter: Timepoint (hr) Value: 48
  misc_feature: MA Experiment 20001608 PARAMETER Experiment Name: Zm_50ppm_KNO3_L-to-H_P Parameter: Tissue Value: Shoots
  misc_feature: MA Experiment 20001608 PARAMETER Experiment Name: Zm_50ppm_KNO3_L-to-H_P Parameter: Treatment Value: 50ppm KNO3 vs. 50ppm KCl
gcacgagaccattacctagaacatcctaatcgaaaaagacacagatagctagaacacgagcagaggatggctaggcctaggccgtcggtcgtcgtcctcgcggtggccgtcgccgtcgccgtggcgtccctcgcgcagcccggcgcggccgacctgaagctggactactacgcgagcacctgccccaacgcggaggccatcgtgcgcggcgtggtgcagcagcgactgcaggccaccatccgggccgtcggctccaccgtccgcctcttcttccacgactgcttcgtcgagggttgcgacggctcggtgctgatcgaatccacgcccggcaaccaggccgagaaggacgcctccgacaacaagtccctcgcgtccgaaggcttcgacaccgtgcggagcgccaaggccgccgtcgaggccgcctgcccggacacggtctcctgcgccgacgtgctcgccattgccgctcgggacgccatctccatgagtggcgggcctttcttcccagtggagctgggcaggctggacggcctgagctccaccgccagcagcgtgccaggccagctgcccgaggccaaccagaccatggaccagctgctggcagtcttcaaggcacacgggctcaacatgtcacgacctcgtcgcgctctcagcggcgcacagcgtggggctggcgcactgcagcaagttcgcgagccggctgtacagctaccagctgccggggcagccgacggacccgacgctgaaccccaagtacgcgcggttcctggagagcaagtgccccgacggcgggcccgacaacctggtgctcatggaccaggcctcgccggcgcagttcgacaaccagtactaccgcaacctccaggacggcggcgggctgctgggctccgaccagctgctctacaccgacaaccggacgcgccccatggtggactcgctggccaacagcaccgccgccttctaccgcgccttagccgacgccgtcgtccggctcggccgcgtcggggtcaagtccggcaggcggggcaacgtccgcaagcagtgcgacgtgttcaactgacagggaaatcgtgttcaacctccggaagattcatttgatttgggtgttttgcttgtaatgcagctgttctctttgattcgttgcatagcacgcggttgctgattcttaaacttgtgtgtggtaattattcagcaattagttgttctacaaagtggtgaataatggttctgcctgctttgtcatagagtaaaaccccaaatagcagccaaaattagatcatacatagatacagttgatttcactgtaatttgaatactc

SEQ ID NO: 20237 - protein, 343 aa, Zea mays subsp. mays
  peptide (1)..(343): Ceres Seq. ID no. 12454823
  misc_feature (46)..(189): Pfam Name: Peroxidase Pfam Description: Peroxidase
  misc_feature (9)..(198): Homolog of NCBI NO: 15229646 NR Description: peroxidase, putative; protein id: At3g49960.1
  misc_feature (28)..(198): Homolog of NCBI NO: 7433086 NR Description: peroxidase (EC 1.11.1.7) pxdD precursor - alfalfa
  misc_feature (9)..(198): Homolog of NCBI NO: 4138647 NR Description: peroxidase [Trifolium repens]
  misc_feature (13)..(198): Homolog of NCBI NO: 17027274 NR Description: putative peroxidase [Oryza sativa (japonica
  misc_feature (8)..(198): Homolog of NCBI NO: 17979440 NR Description: putative peroxidase [Arabidopsis thaliana]
  misc_feature (8)..(198): Homolog of NCBI NO: 15235600 NR Description: peroxidase, putative
  misc_feature (9)..(198): Homolog of NCBI NO: 14485511 NR Description: putative peroxidase [Solanum tuberosum]
  misc_feature (11)..(198): Homolog of NCBI NO: 7433082 NR Description: probable peroxidase (EC 1.11.1.7) (clone PC55) -
  misc_feature (5)..(189): Homolog of NCBI NO: 34915320 NR Description: putative peroxidase [Oryza sativa (japonica
  misc_feature (1)..(198): Homolog of NCBI NO: 17027271 NR Description: putative peroxidase [Oryza sativa (japonica
MARPRPSVVVLAVAVAVAVASLAQPGAADLKLDYYASTCPNAEAIVRGVVQQRLQATIRAVGSTVRLFFHDCFVEGCDGSVLIESTPGNQAEKDASDNKSLASEGFDTVRSAKAAVEAACPDTVSCADVLAIAARDAISMSGGPFFPVELGRLDGLSSTASSVPGQLPEANQTMDQLLAVFKAHGLNMSRPRRALSGAQRGAGALQQVREPAVQLPAAGAADGPDAEPQVRAVPGEQVPRRRARQPGAHGPGLAGAVRQPVLPQPPGRRRAAGLRPAALHRQPDAPHGGLAGQQHRRLLPRLSRRRRPARPRRGQVRQAGQRPQAVRRVQLTGKSCSTSGRFI

SEQ ID NO: 20238 - protein, 204 aa, Zea mays subsp. mays
  peptide (1)..(204): Ceres Seq. ID no. 12454824
  misc_feature (1)..(59): Homolog of NCBI NO: 14485511 NR Description: putative peroxidase [Solanum tuberosum]
  misc_feature (1)..(59): Homolog of NCBI NO: 7433082 NR Description: probable peroxidase (EC 1.11.1.7) (clone PC55) -
  misc_feature (1)..(50): Homolog of NCBI NO: 34915320 NR Description: putative peroxidase [Oryza sativa (japonica
  misc_feature (1)..(59): Homolog of NCBI NO: 17027271 NR Description: putative peroxidase [Oryza sativa (japonica
  misc_feature (1)..(59): Homolog of NCBI NO: 15229646 NR Description: peroxidase, putative; protein id: At3g49960.1
  misc_feature (1)..(59): Homolog of NCBI NO: 7433086 NR Description: peroxidase (EC 1.11.1.7) pxdD precursor - alfalfa
  misc_feature (1)..(59): Homolog of NCBI NO: 4138647 NR Description: peroxidase [Trifolium repens]
  misc_feature (1)..(59): Homolog of NCBI NO: 17027274 NR Description: putative peroxidase [Oryza sativa (japonica
  misc_feature (1)..(59): Homolog of NCBI NO: 17979440 NR Description: putative peroxidase [Arabidopsis thaliana]
  misc_feature (1)..(59): Homolog of NCBI NO: 15235600 NR Description: peroxidase, putative
MSGGPFFPVELGRLDGLSSTASSVPGQLPEANQTMDQLLAVFKAHGLNMSRPRRALSGAQRGAGALQQVREPAVQLPAAGAADGPDAEPQVRAVPGEQVPRRRARQPGAHGPGLAGAVRQPVLPQPPGRRRAAGLRPAALHRQPDAPHGGLAGQQHRRLLPRLSRRRRPARPRRGQVRQAGQRPQAVRRVQLTGKSCSTSGRFI

SEQ ID NO: 20239 - DNA, 1608 bp, Zea mays subsp. mays
  misc_feature (1)..(1608): Ceres Seq. ID no. 12589090
  misc_feature: MA Experiment ID: 108597 Result: Up-regulated in Transcription
  misc_feature: MA Experiment 108597 PARAMETER Experiment Name: Zm_100uM_ABA_P Parameter: Age (day) Value: 9
  misc_feature: MA Experiment 108597 PARAMETER Experiment Name: Zm_100uM_ABA_P Parameter: Organism Value: Zea mays
  misc_feature: MA Experiment 108597 PARAMETER Experiment Name: Zm_100uM_ABA_P Parameter: Plant Line Value: 35A19
  misc_feature: MA Experiment 108597 PARAMETER Experiment Name: Zm_100uM_ABA_P Parameter: Timepoint (hr) Value: 24
  misc_feature: MA Experiment 108597 PARAMETER Experiment Name: Zm_100uM_ABA_P Parameter: Tissue Value: Aerial
  misc_feature: MA Experiment 108597 PARAMETER Experiment Name: Zm_100uM_ABA_P Parameter: Treatment Value: 100uM ABA vs. No Treatment
  misc_feature: MA Experiment ID: 20000477 Result: Up-regulated in Transcription
  misc_feature: MA Experiment 20000477 PARAMETER Experiment Name: Zm_5mM_SA_P Parameter: Age (day) Value: 10
  misc_feature: MA Experiment 20000477 PARAMETER Experiment Name: Zm_5mM_SA_P Parameter: Organism Value: Zea mays
  misc_feature: MA Experiment 20000477 PARAMETER Experiment Name: Zm_5mM_SA_P Parameter: Plant Line Value: 35A19
  misc_feature: MA Experiment 20000477 PARAMETER Experiment Name: Zm_5mM_SA_P Parameter: Timepoint (hr) Value: 48
  misc_feature: MA Experiment 20000477 PARAMETER Experiment Name: Zm_5mM_SA_P Parameter: Tissue Value: Aerial
  misc_feature: MA Experiment 20000477 PARAMETER Experiment Name: Zm_5mM_SA_P Parameter: Treatment Value: 5mM SA vs. No Treatment
  misc_feature: MA Experiment ID: 20000478 Result: Up-regulated in Transcription
  misc_feature: MA Experiment 20000478 PARAMETER Experiment Name: Zm_5mM_SA_P Parameter: Age (day) Value: 11
  misc_feature: MA Experiment 20000478 PARAMETER Experiment Name: Zm_5mM_SA_P Parameter: Organism Value: Zea mays
  misc_feature: MA Experiment 20000478 PARAMETER Experiment Name: Zm_5mM_SA_P Parameter: Plant Line Value: 35A19
  misc_feature: MA Experiment 20000478 PARAMETER Experiment Name: Zm_5mM_SA_P Parameter: Timepoint (hr) Value: 72
  misc_feature: MA Experiment 20000478 PARAMETER Experiment Name: Zm_5mM_SA_P Parameter: Tissue Value: Aerial
  misc_feature: MA Experiment 20000478 PARAMETER Experiment Name: Zm_5mM_SA_P Parameter: Treatment Value: 5mM SA vs. No Treatment
  misc_feature: MA Experiment ID: 20000479 Result: Up-regulated in Transcription
  misc_feature: MA Experiment 20000479 PARAMETER Experiment Name: Zm_Drought_P Parameter: Age (day) Value: 10
  misc_feature: MA Experiment 20000479 PARAMETER Experiment Name: Zm_Drought_P Parameter: Organism Value: Zea mays
  misc_feature: MA Experiment 20000479 PARAMETER Experiment Name: Zm_Drought_P Parameter: Plant Line Value: 35A19
  misc_feature: MA Experiment 20000479 PARAMETER Experiment Name: Zm_Drought_P Parameter: Timepoint (hr) Value: 48
  misc_feature: MA Experiment 20000479 PARAMETER Experiment Name: Zm_Drought_P Parameter: Tissue Value: Aerial
  misc_feature: MA Experiment 20000479 PARAMETER Experiment Name: Zm_Drought_P Parameter: Treatment Value: Drought vs. No Drought
  misc_feature: MA Experiment ID: 20000488 Result: Down-regulated in Transcription
  misc_feature: MA Experiment 20000488 PARAMETER Experiment Name: Zm_50mM_NH4NO3_L_to_H_P Parameter: Organism Value: Zea mays
  misc_feature: MA Experiment 20000488 PARAMETER Experiment Name: Zm_50mM_NH4NO3_L_to_H_P Parameter: Timepoint (hr) Value: 8
  misc_feature: MA Experiment 20000488 PARAMETER Experiment Name: Zm_50mM_NH4NO3_L_to_H_P Parameter: Tissue Value: Leaves
  misc_feature: MA Experiment 20000488 PARAMETER Experiment Name: Zm_50mM_NH4NO3_L_to_H_P Parameter: Treatment Value: 50mM NH4NO3 vs. 100mM Mannitol
  misc_feature: MA Experiment ID: 20000626 Result: Up-regulated in Transcription
  misc_feature: MA Experiment 20000626 PARAMETER Experiment Name: Zm_Herbicide-Treatments_P Parameter: Timepoint (hr) Value: 12
  misc_feature: MA Experiment 20000626 PARAMETER Experiment Name: Zm_Herbicide-Treatments_P Parameter: Tissue Value: Aerial
  misc_feature: MA Experiment 20000626 PARAMETER Experiment Name: Zm_Herbicide-Treatments_P Parameter: Treatment Value: Roundup vs. No Treatment
ctattcattcatccggccaccaccgctctaactactcttcaagagacgacgaccaacaggcacgtcgatcgtcttccggcgagggcgacggaaggatgtccggcggcgagagtggtccggcagcggcggcggcggccgttccgttgctgcaggcgccggaggggaggacgacgaagtactacgagggatgccccgggtgccggctggacgaggccaacaagactaggaccggcgtcccctacctcaatttcttctacatctgggtcgtctgcctcgccgccgcactgccggtccagtcactgttcccttatctatacttcatgatcagggacttgaaagtggcgaaagaggagcaagacattgggttttatgctggttttgttggggctacctatttccttggaagggccatcagcgctgtgccatggggcatgttcgctgacaagtatggaaggaagccatgcattgtgatcagcatcctctcagtgattgtgttcaacacactgtttggacttagcacaacttactgnntggcaattgtgactaggggattacttgggttgctatgtggcatacttggacccatcaaggcctatgcttcagaagtctgcaggaaagagcaccaagctctgggaatctctcttgttacatcttcacgagccatanctcttgttattgggcctgctattggaggcttccttgcacagcctgcacagaagtacccaaatcttttctctgaagagtccatatttggaaggtttccatacttccttccttgctttgtaatatcgttgctagcagcaggatcatgtattgcatgcatttggcttccggaaacgctacactttcatggtgatgacaaagtagaagctattgaagaactggaggcacaagttcgtggctccgaatctacaaaagatctgcataagaattggcaattgatgtcagcaataatcctctactgtgtcttttctatgcatgacacagcttatcttgaggtattttcactgtgggctgtgagcagtagaaaatttcgggggcttagtttgacatcccaggatgttggtactgtgctagccatctcaggttttggtgtacttgtataccaactcgctatttatccttttcttgcgaagtattttggaccaatcaagacatttcggcctgccgcgatcctgtcgatcattctcctcactacgtaccccttcatggccaatttacatggcctggagcttaaaatactcatcaacattgcatctgttttgaagaacatgtttgcggctaccatcactattgcctgcaacatcctacagaacactgcagtgacgcaagagcagagaggcgttgctaatggcatctctgttaccctgatgtccgtgttcaaatctgtagctccagcagcagcaggaattctgttctcgtgggctcagaagcacatcagcggactgttcttaccaggggatcagatcttgttcctagcgataaacatggtgtcggtgattggcctggtgctgacgttcaagccatttttctccctaccgaatccaacgaggcattcataaatctgtgtagatgaagcccgttcctgtgaattgtatcgatgcactg

SEQ ID NO: 20240 - protein, 519 aa, Zea mays subsp. mays
  peptide (1)..(519): Ceres Seq. ID no. 12589091
  misc_feature (85)..(514): Pfam Name: Sugar (and other) transporter Pfam Description: Sugar (and other) transporter
  misc_feature (133)..(511): Homolog of NCBI NO: 30684567 NR Description: transporter-related protein [Arabidopsis thaliana]
  misc_feature (133)..(513): Homolog of NCBI NO: 23452819 NR Description: major facilitator superfamily antiporter [Zea
  misc_feature (73)..(487): Homolog of NCBI NO: 10177340 NR Description: transporter-like protein [Arabidopsis thaliana]
  misc_feature (75)..(511): Homolog of NCBI NO: 20260160 NR Description: transporter-like protein [Arabidopsis thaliana]
  misc_feature (61)..(511): Homolog of NCBI NO: 15229781 NR Description: transporter-like protein; protein id: At3g43790.1
  misc_feature (134)..(518): Homolog of NCBI NO: 34903136 NR Description: unnamed protein product [Oryza sativa (japonica
  misc_feature (59)..(511): Homolog of NCBI NO: 22326785 NR Description: transporter-like protein
  misc_feature (59)..(511): Homolog of NCBI NO: 30684565 NR Description: transporter-related protein [Arabidopsis
  misc_feature (56)..(513): Homolog of NCBI NO: 23452823 NR Description: major facilitator superfamily antiporter
  misc_feature (30)..(514): Homolog of NCBI NO: 23452821 NR Description: major facilitator superfamily antiporter
  misc_feature (176)..(176): Xaa is any aa, unknown or other
  misc_feature (177)..(177): Xaa is any aa, unknown or other
  misc_feature (222)..(222): Xaa is any aa, unknown or other
IHSSGHHRSNYSSRDDDQQARRSSSGEGDGRMSGGESGPAAAAAAVPLLQAPEGRTTKYYEGCPGCRLDEANKTRTGVPYLNFFYIWVVCLAAALPVQSLFPYLYFMIRDLKVAKEEQDIGFYAGFVGATYFLGRAISAVPWGMFADKYGRKPCIVISILSVIVFNTLFGLSTTYXXAIVTRGLLGLLCGILGPIKAYASEVCRKEHQALGISLVTSSRAIXLVIGPAIGGFLAQPAQKYPNLFSEESIFGRFPYFLPCFVISLLAAGSCIACIWLPETLHFHGDDKVEAIEELEAQVRGSESTKDLHKNWQLMSAIILYCVFSMHDTAYLEVFSLWAVSSRKFRGLSLTSQDVGTVLAISGFGVLVYQLAIYPFLAKYFGPIKTFRPAAILSIILLTTYPFMANLHGLELKILINIASVLKNMFAATITIACNILQNTAVTQEQRGVANGISVTLMSVFKSVAPAAAGILFSWAQKHISGLFLPGDQILFLAINMVSVIGLVLTFKPFFSLPNPTRHS

SEQ ID NO: 20241 - protein, 488 aa, Zea mays subsp. mays
  peptide (1)..(488): Ceres Seq. ID no. 12589092
  misc_feature (54)..(483): Pfam Name: Sugar (and other) transporter Pfam Description: Sugar (and other) transporter
  misc_feature (102)..(480): Homolog of NCBI NO: 30684567 NR Description: transporter-related protein [Arabidopsis thaliana]
  misc_feature (102)..(482): Homolog of NCBI NO: 23452819 NR Description: major facilitator superfamily antiporter [Zea
  misc_feature (42)..(456): Homolog of NCBI NO: 10177340 NR Description: transporter-like protein [Arabidopsis thaliana]
  misc_feature (44)..(480): Homolog of NCBI NO: 20260160 NR Description: transporter-like protein [Arabidopsis thaliana]
  misc_feature (30)..(480): Homolog of NCBI NO: 15229781 NR Description: transporter-like protein; protein id: At3g43790.1
  misc_feature (103)..(487): Homolog of NCBI NO: 34903136 NR Description: unnamed protein product [Oryza sativa (japonica
  misc_feature (28)..(480): Homolog of NCBI NO: 22326785 NR Description: transporter-like protein
  misc_feature (28)..(480): Homolog of NCBI NO: 30684565 NR Description: transporter-related protein [Arabidopsis
  misc_feature (25)..(482): Homolog of NCBI NO: 23452823 NR Description: major facilitator superfamily antiporter
  misc_feature (1)..(483): Homolog of NCBI NO: 23452821 NR Description: major facilitator superfamily antiporter
  misc_feature (145)..(145): Xaa is any aa, unknown or other
  misc_feature (146)..(146): Xaa is any aa, unknown or other
  misc_feature (191)..(191): Xaa is any aa, unknown or other
MSGGESGPAAAAAAVPLLQAPEGRTTKYYEGCPGCRLDEANKTRTGVPYLNFFYIWVVCLAAALPVQSLFPYLYFMIRDLKVAKEEQDIGFYAGFVGATYFLGRAISAVPWGMFADKYGRKPCIVISILSVIVFNTLFGLSTTYXXAIVTRGLLGLLCGILGPIKAYASEVCRKEHQALGISLVTSSRAIXLVIGPAIGGFLAQPAQKYPNLFSEESIFGRFPYFLPCFVISLLAAGSCIACIWLPETLHFHGDDKVEAIEELEAQVRGSESTKDLHKNWQLMSAIILYCVFSMHDTAYLEVFSLWAVSSRKFRGLSLTSQDVGTVLAISGFGVLVYQLAIYPFLAKYFGPIKTFRPAAILSIILLTTYPFMANLHGLELKILINIASVLKNMFAATITIACNILQNTAVTQEQRGVANGISVTLMSVFKSVAPAAAGILFSWAQKHISGLFLPGDQILFLAINMVSVIGLVLTFKPFFSLPNPTRHS

SEQ ID NO: 20242 - protein, 413 aa, Zea mays subsp. mays
  peptide (1)..(413): Ceres Seq. ID no. 12589093
  misc_feature (1)..(408): Pfam Name: Sugar (and other) transporter Pfam Description: Sugar (and other) transporter
  misc_feature (27)..(405): Homolog of NCBI NO: 30684567 NR Description: transporter-related protein [Arabidopsis thaliana]
  misc_feature (27)..(407): Homolog of NCBI NO: 23452819 NR Description: major facilitator superfamily antiporter [Zea
  misc_feature (1)..(381): Homolog of NCBI NO: 10177340 NR Description: transporter-like protein [Arabidopsis thaliana]
  misc_feature (1)..(405): Homolog of NCBI NO: 20260160 NR Description: transporter-like protein [Arabidopsis thaliana]
  misc_feature (1)..(405): Homolog of NCBI NO: 15229781 NR Description: transporter-like protein; protein id: At3g43790.1
  misc_feature (28)..(412): Homolog of NCBI NO: 34903136 NR Description: unnamed protein product [Oryza sativa (japonica
  misc_feature (1)..(405): Homolog of NCBI NO: 22326785 NR Description: transporter-like protein
  misc_feature (1)..(405): Homolog of NCBI NO: 30684565 NR Description: transporter-related protein [Arabidopsis
  misc_feature (1)..(407): Homolog of NCBI NO: 23452823 NR Description: major facilitator superfamily antiporter
  misc_feature (1)..(408): Homolog of NCBI NO: 23452821 NR Description: major facilitator superfamily antiporter
  misc_feature (70)..(70): Xaa is any aa, unknown or other
  misc_feature (71)..(71): Xaa is any aa, unknown or other
  misc_feature (116)..(116): Xaa is any aa, unknown or other
MIRDLKVAKEEQDIGFYAGFVGATYFLGRAISAVPWGMFADKYGRKPCIVISILSVIVFNTLFGLSTTYXXAIVTRGLLGLLCGILGPIKAYASEVCRKEHQALGISLVTSSRAIXLVIGPAIGGFLAQPAQKYPNLFSEESIFGRFPYFLPCFVISLLAAGSCIACIWLPETLHFHGDDKVEAIEELEAQVRGSESTKDLHKNWQLMSAIILYCVFSMHDTAYLEVFSLWAVSSRKFRGLSLTSQDVGTVLAISGFGVLVYQLAIYPFLAKYFGPIKTFRPAAILSIILLTTYPFMANLHGLELKILINIASVLKNMFAATITIACNILQNTAVTQEQRGVANGISVTLMSVFKSVAPAAAGILFSWAQKHISGLFLPGDQILFLAINMVSVIGLVLTFKPFFSLPNPTRHS

SEQ ID NO: 20243 - DNA, 1406 bp, Zea mays subsp. mays
  misc_feature (1)..(1406): Ceres Seq. ID no. 12424103
  misc_feature: MA Experiment ID: 108515 Result: Up-regulated in Transcription
  misc_feature: MA Experiment 108515 PARAMETER Experiment Name: Zm_2mM_SA_P Parameter: Age (day) Value: 8
  misc_feature: MA Experiment 108515 PARAMETER Experiment Name: Zm_2mM_SA_P Parameter: Organism Value: Zea mays
  misc_feature: MA Experiment 108515 PARAMETER Experiment Name: Zm_2mM_SA_P Parameter: Plant Line Value: 35A19
  misc_feature: MA Experiment 108515 PARAMETER Experiment Name: Zm_2mM_SA_P Parameter: Timepoint (hr) Value: 12
  misc_feature: MA Experiment 108515 PARAMETER Experiment Name: Zm_2mM_SA_P Parameter: Tissue Value: Aerial
  misc_feature: MA Experiment 108515 PARAMETER Experiment Name: Zm_2mM_SA_P Parameter: Treatment Value: 2mM SA vs. No Treatment
  misc_feature: MA Experiment ID: 108528 Result: Up-regulated in Transcription
  misc_feature: MA Experiment 108528 PARAMETER Experiment Name: Zm_Imbibed_Seeds_P Parameter: Age (day) Value: 5 vs. 2
  misc_feature: MA Experiment 108528 PARAMETER Experiment Name: Zm_Imbibed_Seeds_P Parameter: Organism Value: Zea mays
  misc_feature: MA Experiment 108528 PARAMETER Experiment Name: Zm_Imbibed_Seeds_P Parameter: Plant Line Value: 35A19
  misc_feature: MA Experiment 108528 PARAMETER Experiment Name: Zm_Imbibed_Seeds_P Parameter: Tissue Value: Aerial vs. Embryo
  misc_feature: MA Experiment ID: 108545 Result: Up-regulated in Transcription
  misc_feature: MA Experiment 108545 PARAMETER Experiment Name: Zm_Imbibed_Seeds_P Parameter: Age (day) Value: 3 vs. 2
  misc_feature: MA Experiment 108545 PARAMETER Experiment Name: Zm_Imbibed_Seeds_P Parameter: Organism Value: Zea mays
  misc_feature: MA Experiment 108545 PARAMETER Experiment Name: Zm_Imbibed_Seeds_P Parameter: Plant Line Value: 35A19
  misc_feature: MA Experiment 108545 PARAMETER Experiment Name: Zm_Imbibed_Seeds_P Parameter: Tissue Value: Aerial vs. Embryo
  misc_feature: MA Experiment ID: 108559 Result: Up-regulated in Transcription
  misc_feature: MA Experiment 108559 PARAMETER Experiment Name: Zm_5mM_NO_P Parameter: Age (day) Value: 8
  misc_feature: MA Experiment 108559 PARAMETER Experiment Name: Zm_5mM_NO_P Parameter: Organism Value: Zea mays
  misc_feature: MA Experiment 108559 PARAMETER Experiment Name: Zm_5mM_NO_P Parameter: Plant Line Value: 35A19
  misc_feature: MA Experiment 108559 PARAMETER Experiment Name: Zm_5mM_NO_P Parameter: Timepoint (hr) Value: 12
  misc_feature: MA Experiment 108559 PARAMETER Experiment Name: Zm_5mM_NO_P Parameter: Tissue Value: Aerial
  misc_feature: MA Experiment 108559 PARAMETER Experiment Name: Zm_5mM_NO_P Parameter: Treatment Value: 5mM NO vs. No Treatment
  misc_feature: MA Experiment ID: 108597 Result: Down-regulated in Transcription
  misc_feature: MA Experiment 108597 PARAMETER Experiment Name: Zm_100uM_ABA_P Parameter: Age (day) Value: 9
  misc_feature: MA Experiment 108597 PARAMETER Experiment Name: Zm_100uM_ABA_P Parameter: Organism Value: Zea mays
  misc_feature: MA Experiment 108597 PARAMETER Experiment Name: Zm_100uM_ABA_P Parameter: Plant Line Value: 35A19
  misc_feature: MA Experiment 108597 PARAMETER Experiment Name: Zm_100uM_ABA_P Parameter: Timepoint (hr) Value: 24
  misc_feature: MA Experiment 108597 PARAMETER Experiment Name: Zm_100uM_ABA_P Parameter: Tissue Value: Aerial
  misc_feature: MA Experiment 108597 PARAMETER Experiment Name: Zm_100uM_ABA_P Parameter: Treatment Value: 100uM ABA vs. No Treatment
  misc_feature: MA Experiment ID: 20000534 Result: Up-regulated in Transcription
  misc_feature: MA Experiment 20000534 PARAMETER Experiment Name: Zm_Hybrid_Pollen_P Parameter: Age (day) Value: 8
  misc_feature: MA Experiment 20000534 PARAMETER Experiment Name: Zm_Hybrid_Pollen_P Parameter: Organism Value: Zea mays
  misc_feature: MA Experiment 20000534 PARAMETER Experiment Name: Zm_Hybrid_Pollen_P Parameter: Plant Line Value: 35A19
  misc_feature: MA Experiment 20000534 PARAMETER Experiment Name: Zm_Hybrid_Pollen_P Parameter: Tissue Value: Pollen vs. Aerial
gcacgagaccattaccagaacatcctaatcgaaaaattgtccattttgcaccaccgatcgatcgagctctaggctctagctagcgcgctgcatatgtgaggcaacttttcatttatctgacacacgtacttacggcccacgatggccgccgccgccggcctcccgtggtggctgctgctcctcgccgtggtcccggccgtcaccgctgcggccaccgccggcggagaggggagggcgccggcgctgttcgtgttcggcgactcgctcatcgacagcggcaacaacaacaacctcgcatcgcttgccaaggccaactacttcccctacggcatcggacttcgccggcggccccaccggccgcttctgcaacggctacaccatcgtcgacgagctcgccgagctgcttggactgcccctggtgccaccctactctgaagcctcgtccgtgcagcatgtcctgcagggcgtcaactacccctctgccgccgccgggatcctcnacgacagtggcggcaactttgtcgggcggatcccattcaaccagcagatccagaacttngagacgaccgtggcgcggatcgccggcgcggcgggcgcggcggcggcggcggacctggtggcncgctccgtcctgttcgtggggatgggcagnaacgactacctcaacaactacctgatgcccaactacgacacgcggnggcggtaacggcccgcagcagttcgcggacctgctcgcgcggcagctggccgcgcagctggccaggctgcacggcgccgggggcaggcggttcgtggtggccggcgtggggtccgtgggctgcatcccgagcgtgcgcgcgcagagcctcgcggggcggtgctcgcgcgcggtggacgacctcgtgctccccttcaacgccaacgtgcgggcgctggtcgaccgcctcaacggcaacgctgccgccggccttcccggcgccagcctcacgtacctcgacaacttcgcggtgttcagggccatcctcaccgacccggccgcgttcggcttcgccgtcgtcgaccgcgggtgctgcggcatcggcaggaacgccgggcaggtcacctgcntgcccttcatgccgccgtgcgaccacagggagcgctacgtgttctgggacgcataccaccccacggcggccgtcaacgtcatcgtcgccagggtggggttccacnncggcgctgacgtngtntngcccgtcaacgtccgtgagcttgccggcatgtgacaagatgatcggagcggacatatatnctcctatatatagcaataataatttgtttggtgaattattgtatcagtagattttgtgctacaagcctccatccacaaaccatgcatgtagtagttatttgttactccgatctatttataaattcgctttgcactg

SEQ ID NO: 20244 - protein, 97 aa, Zea mays subsp. mays
  peptide (1)..(97): Ceres Seq. ID no. 12424104
  misc_feature (10)..(64): Homolog of NCBI NO: 15220512 NR Description: lipase/hydrolase, putative
  misc_feature (10)..(64): Homolog of NCBI NO: 21594055 NR Description: lipase/hydrolase, putative [Arabidopsis thaliana]
  misc_feature (7)..(64): Homolog of NCBI NO: 15241626 NR Description: GDSL-motif lipase acylhydrolase-like protein
  misc_feature (11)..(70): Homolog of NCBI NO: 21553940 NR Description: GDSL-motif lipase/hydrolase-like protein
  misc_feature (11)..(70): Homolog of NCBI NO: 15242458 NR Description: GDSL-motif lipase/hydrolase-like protein
  misc_feature (13)..(64): Homolog of NCBI NO: 34909504 NR Description: putative GDSL-motif lipase/hydrolase-like protein
  misc_feature (10)..(64): Homolog of NCBI NO: 15220514 NR Description: lipase/hydrolase, putative
  misc_feature (10)..(64): Homolog of NCBI NO: 21592417 NR Description: lipase/hydrolase, putative [Arabidopsis thaliana]
  misc_feature (10)..(70): Homolog of NCBI NO: 15224005 NR Description: putative GDSL-motif lipase/acylhydrolase; protein
  misc_feature (28)..(70): Homolog of NCBI NO: 18409881 NR Description: hypothetical protein; protein id: At1g71691.1
MAAAAGLPWWLLLLAVVPAVTAAATAGGEGRAPALFVFGDSLIDSGNNNNLASLAKANYFPYGIGLRRRPHRPLLQRLHHRRRARRAAWTAPGATLL

SEQ ID NO: 20245 - protein, 74 aa, Zea mays subsp. mays
  peptide (1)..(74): Ceres Seq. ID no. 12424105
  misc_feature (1)..(74): Pfam Name: Equine herpesvirus glycoprotein gp2 Pfam Description: Equine herpesvirus glycoprotein gp2
  misc_feature (1)..(74): Homolog of NCBI NO: 11278205 NR Description: membrane glycoprotein [imported] - equine
  misc_feature (1)..(73): Homolog of NCBI NO: 13592175 NR Description: ppg3 [Leishmania major]
  misc_feature (1)..(72): Homolog of NCBI NO: 13592175 NR Description: ppg3 [Leishmania major]
  misc_feature (1)..(73): Homolog of NCBI NO: 13592175 NR Description: ppg3 [Leishmania major]
  misc_feature (1)..(72): Homolog of NCBI NO: 13592175 NR Description: ppg3 [Leishmania major]
  misc_feature (16)..(16): Xaa is any aa, unknown or other
  misc_feature (36)..(36): Xaa is any aa, unknown or other
  misc_feature (57)..(57): Xaa is any aa, unknown or other
  misc_feature (67)..(67): Xaa is any aa, unknown or other
MSCRASTTPLPPPGSXTTVAATLSGGSHSTSRSRTXRRPWRGSPARRARRRRRTWWXAPSCSWGWAXTTTSTTT

SEQ ID NO: 20246 - protein, 49 aa, Zea mays subsp. mays
  peptide (1)..(49): Ceres Seq. ID no. 12424106
  misc_feature (1)..(47): Homolog of NCBI NO: 15220512 NR Description: lipase/hydrolase, putative
  misc_feature (1)..(47): Homolog of NCBI NO: 21594055 NR Description: lipase/hydrolase, putative [Arabidopsis thaliana]
  misc_feature (1)..(47): Homolog of NCBI NO: 15241626 NR Description: GDSL-motif lipase acylhydrolase-like protein
  misc_feature (1)..(49): Homolog of NCBI NO: 21553940 NR Description: GDSL-motif lipase/hydrolase-like protein
  misc_feature (1)..(49): Homolog of NCBI NO: 15242458 NR Description: GDSL-motif lipase/hydrolase-like protein
  misc_feature (1)..(47): Homolog of NCBI NO: 34909504 NR Description: putative GDSL-motif lipase/hydrolase-like protein
  misc_feature (1)..(47): Homolog of NCBI NO: 15220514 NR Description: lipase/hydrolase, putative
  misc_feature (1)..(47): Homolog of NCBI NO: 21592417 NR Description: lipase/hydrolase, putative [Arabidopsis thaliana]
  misc_feature (1)..(46): Homolog of NCBI NO: 15224005 NR Description: putative GDSL-motif lipase/acylhydrolase; protein
  misc_feature (1)..(49): Homolog of NCBI NO: 18409881 NR Description: hypothetical protein; protein id: At1g71691.1
  misc_feature (33)..(33): Xaa is any aa, unknown or other
  misc_feature (37)..(37): Xaa is any aa, unknown or other
  misc_feature (38)..(38): Xaa is any aa, unknown or other
  misc_feature (39)..(39): Xaa is any aa, unknown or other
MPPCDHRERYVFWDAYHPTAAVNVIVARVGFHXGADXXXPVNVRELAGM

SEQ ID NO: 20247 - DNA, 1156 bp, Zea mays subsp. mays; identical to SEQ ID NO: 13035
  misc_feature (1)..(1156): Ceres Seq. ID no. 12364587
  misc_feature: MA Experiment ID: 108515 Result: Down-regulated in Transcription
  misc_feature: MA Experiment 108515 PARAMETER Experiment Name: Zm_2mM_SA_P Parameter: Age (day) Value: 8
  misc_feature: MA Experiment 108515 PARAMETER Experiment Name: Zm_2mM_SA_P Parameter: Organism Value: Zea mays
  misc_feature: MA Experiment 108515 PARAMETER Experiment Name: Zm_2mM_SA_P Parameter: Plant Line Value: 35A19
  misc_feature: MA Experiment 108515 PARAMETER Experiment Name: Zm_2mM_SA_P Parameter: Timepoint (hr) Value: 12
  misc_feature: MA Experiment 108515 PARAMETER Experiment Name: Zm_2mM_SA_P Parameter: Tissue Value: Aerial
  misc_feature: MA Experiment 108515 PARAMETER Experiment Name: Zm_2mM_SA_P Parameter: Treatment Value: 2mM SA vs. No Treatment
  misc_feature: MA Experiment ID: 108523 Result: Down-regulated in Transcription
  misc_feature: MA Experiment 108523 PARAMETER Experiment Name: Zm_42deg_Heat_P Parameter: Age (day) Value: 8
  misc_feature: MA Experiment 108523 PARAMETER Experiment Name: Zm_42deg_Heat_P Parameter: Organism Value: Zea mays
  misc_feature: MA Experiment 108523 PARAMETER Experiment Name: Zm_42deg_Heat_P Parameter: Plant Line Value: 35A19
  misc_feature: MA Experiment 108523 PARAMETER Experiment Name: Zm_42deg_Heat_P Parameter: Temperature (deg C) Value: 42 vs. 22
  misc_feature: MA Experiment 108523 PARAMETER Experiment Name: Zm_42deg_Heat_P Parameter: Timepoint (hr) Value: 6
  misc_feature: MA Experiment 108523 PARAMETER Experiment Name: Zm_42deg_Heat_P Parameter: Tissue Value: Aerial
  misc_feature: MA Experiment ID: 108527 Result: Down-regulated in Transcription
  misc_feature: MA Experiment 108527 PARAMETER Experiment Name: Zm_5mM_NO_P Parameter: Age (day) Value: 8
  misc_feature: MA Experiment 108527 PARAMETER Experiment Name: Zm_5mM_NO_P Parameter: Organism Value: Zea mays
  misc_feature: MA Experiment 108527 PARAMETER Experiment Name: Zm_5mM_NO_P Parameter: Plant Line Value: 35A19
  misc_feature: MA Experiment 108527 PARAMETER Experiment Name: Zm_5mM_NO_P Parameter: Timepoint (hr) Value: 6
  misc_feature: MA Experiment 108527 PARAMETER Experiment Name: Zm_5mM_NO_P Parameter: Tissue Value: Aerial
  misc_feature: MA Experiment 108527 PARAMETER Experiment Name: Zm_5mM_NO_P Parameter: Treatment Value: 5mM NO vs. No Treatment
  misc_feature: MA Experiment ID: 108529 Result: Down-regulated in Transcription
  misc_feature: MA Experiment 108529 PARAMETER Experiment Name: Zm_Imbibed_Seeds_P Parameter: Age (day) Value: 5 vs. 2
  misc_feature: MA Experiment 108529 PARAMETER Experiment Name: Zm_Imbibed_Seeds_P Parameter: Organism Value: Zea mays
  misc_feature: MA Experiment 108529 PARAMETER Experiment Name: Zm_Imbibed_Seeds_P Parameter: Plant Line Value: 35A19
  misc_feature: MA Experiment 108529 PARAMETER Experiment Name: Zm_Imbibed_Seeds_P Parameter: Tissue Value: Roots vs. Embryo
  misc_feature: MA Experiment ID: 108530 Result: Down-regulated in Transcription
  misc_feature: MA Experiment 108530 PARAMETER Experiment Name: Zm_Imbibed_Seeds_P Parameter: Age (day) Value: 6 vs. 2
  misc_feature: MA Experiment 108530 PARAMETER Experiment Name: Zm_Imbibed_Seeds_P Parameter: Organism Value: Zea mays
  misc_feature: MA Experiment 108530 PARAMETER Experiment Name: Zm_Imbibed_Seeds_P Parameter: Plant Line Value: 35A19
  misc_feature: MA Experiment 108530 PARAMETER Experiment Name: Zm_Imbibed_Seeds_P Parameter: Tissue Value: Aerial vs. Embryo
  misc_feature: MA Experiment ID: 108534 Result: Down-regulated in Transcription
  misc_feature: MA Experiment 108534 PARAMETER Experiment Name: Zm_4deg_Cold_P Parameter: Age (hr) Value: 8
  misc_feature: MA Experiment 108534 PARAMETER Experiment Name: Zm_4deg_Cold_P Parameter: Organism Value: Zea mays
  misc_feature: MA Experiment 108534 PARAMETER Experiment Name: Zm_4deg_Cold_P Parameter: Plant Line Value: 35A19
  misc_feature: MA Experiment 108534 PARAMETER Experiment Name: Zm_4deg_Cold_P Parameter: Temperature (deg C) Value: 4 vs. 22
  misc_feature: MA Experiment 108534 PARAMETER Experiment Name: Zm_4deg_Cold_P Parameter: Timepoint (hr) Value: 6
  misc_feature: MA Experiment 108534 PARAMETER Experiment Name: Zm_4deg_Cold_P Parameter: Tissue Value: Aerial
  misc_feature: MA Experiment ID: 108535 Result: Down-regulated in Transcription
  misc_feature: MA Experiment 108535 PARAMETER Experiment Name: Zm_Meristem_P Parameter: Age (day) Value: 8
  misc_feature: MA Experiment 108535 PARAMETER Experiment Name: Zm_Meristem_P Parameter: Organism Value: Zea mays
  misc_feature: MA Experiment 108535 PARAMETER Experiment Name: Zm_Meristem_P Parameter: Plant Line Value: 35A19
  misc_feature: MA Experiment 108535 PARAMETER Experiment Name: Zm_Meristem_P Parameter: Tissue Value: Root Meristem vs. Above Root Meristem
  misc_feature: MA Experiment ID: 108543 Result: Up-regulated in Transcription
  misc_feature: MA Experiment ID: 108544 Result: Up-regulated in Transcription
  misc_feature: MA Experiment ID: 108547 Result: Down-regulated in Transcription
  misc_feature: MA Experiment 108547 PARAMETER Experiment Name: Zm_Imbibed_Seeds_P Parameter: Age (day) Value: 4 vs. 2
  misc_feature: MA Experiment 108547 PARAMETER Experiment Name: Zm_Imbibed_Seeds_P Parameter: Organism Value: Zea mays
  misc_feature: MA Experiment 108547 PARAMETER Experiment Name: Zm_Imbibed_Seeds_P Parameter: Plant Line Value: 35A19
  misc_feature: MA Experiment 108547 PARAMETER Experiment Name: Zm_Imbibed_Seeds_P Parameter: Tissue Value: Aerial vs. Embryo
  misc_feature: MA Experiment ID: 108689 Result: Down-regulated in Transcription
  misc_feature: MA Experiment 108689 PARAMETER Experiment Name: Zm_Drought_Roots_P Parameter: Age (day) Value: 9
  misc_feature: MA Experiment 108689 PARAMETER Experiment Name: Zm_Drought_Roots_P Parameter: Organism Value: Zea mays
  misc_feature: MA Experiment 108689 PARAMETER Experiment Name: Zm_Drought_Roots_P Parameter: Plant Line Value: 35A19
  misc_feature: MA Experiment 108689 PARAMETER Experiment Name: Zm_Drought_Roots_P Parameter: Timepoint (hr) Value: 24
  misc_feature: MA Experiment 108689 PARAMETER Experiment Name: Zm_Drought_Roots_P Parameter: Tissue Value: Roots
  misc_feature: MA Experiment 108689 PARAMETER Experiment Name: Zm_Drought_Roots_P Parameter: Treatment Value: Drought vs. No Drought
  misc_feature: MA Experiment ID: 20000478 Result: Down-regulated in Transcription
  misc_feature: MA Experiment 20000478 PARAMETER Experiment Name: Zm_5mM_SA_P Parameter: Age (day) Value: 11
  misc_feature: MA Experiment 20000478 PARAMETER Experiment Name: Zm_5mM_SA_P Parameter: Organism Value: Zea mays
  misc_feature: MA Experiment 20000478 PARAMETER Experiment Name: Zm_5mM_SA_P Parameter: Plant Line Value: 35A19
  misc_feature: MA Experiment 20000478 PARAMETER Experiment Name: Zm_5mM_SA_P Parameter: Timepoint (hr) Value: 72
  misc_feature: MA Experiment 20000478 PARAMETER Experiment Name: Zm_5mM_SA_P Parameter: Tissue Value: Aerial
  misc_feature: MA Experiment 20000478 PARAMETER Experiment Name: Zm_5mM_SA_P Parameter: Treatment Value: 5mM SA vs. No Treatment
  misc_feature: MA Experiment ID: 20000479 Result: Down-regulated in Transcription
  misc_feature: MA Experiment 20000479 PARAMETER Experiment Name: Zm_Drought_P Parameter: Age (day) Value: 10
  misc_feature: MA Experiment 20000479 PARAMETER Experiment Name: Zm_Drought_P Parameter: Organism Value: Zea mays
  misc_feature: MA Experiment 20000479 PARAMETER Experiment Name: Zm_Drought_P Parameter: Plant Line Value: 35A19
  misc_feature: MA Experiment 20000479 PARAMETER Experiment Name: Zm_Drought_P Parameter: Timepoint (hr) Value: 48
  misc_feature: MA Experiment 20000479 PARAMETER Experiment Name: Zm_Drought_P Parameter: Tissue Value: Aerial
  misc_feature: MA Experiment 20000479 PARAMETER Experiment Name: Zm_Drought_P Parameter: Treatment Value: Drought vs. No Drought
  misc_feature: MA Experiment ID: 20000480 Result: Down-regulated in Transcription
  misc_feature: MA Experiment 20000480 PARAMETER Experiment Name: Zm_Drought_P Parameter: Age (day) Value: 11
  misc_feature: MA Experiment 20000480 PARAMETER Experiment Name: Zm_Drought_P Parameter: Organism Value: Zea mays
  misc_feature: MA Experiment 20000480 PARAMETER Experiment Name: Zm_Drought_P Parameter: Plant Line Value: 35A19
  misc_feature: MA Experiment 20000480 PARAMETER Experiment Name: Zm_Drought_P Parameter: Timepoint (hr) Value: 72
  misc_feature: MA Experiment 20000480 PARAMETER Experiment Name: Zm_Drought_P Parameter: Tissue Value: Aerial
  misc_feature: MA Experiment 20000480 PARAMETER Experiment Name: Zm_Drought_P Parameter: Treatment Value: Drought vs. No Drought
  misc_feature: MA Experiment ID: 20000492 Result: Down-regulated in Transcription
  misc_feature: MA Experiment 20000492 PARAMETER Experiment Name: Zm_Hybrid_Seed_Dev_P Parameter: DAP Value: 12
  misc_feature: MA Experiment 20000492 PARAMETER Experiment Name: Zm_Hybrid_Seed_Dev_P Parameter: Organism Value: Zea mays
  misc_feature: MA Experiment 20000492 PARAMETER Experiment Name: Zm_Hybrid_Seed_Dev_P Parameter: Plant Line Value: 35A19
  misc_feature: MA Experiment 20000492 PARAMETER Experiment Name: Zm_Hybrid_Seed_Dev_P Parameter: Tissue Value: Fert Kernel vs. Unfert Floret
  misc_feature: MA Experiment ID: 20000533 Result: Down-regulated in Transcription
  misc_feature: MA Experiment 20000533 PARAMETER Experiment Name: Zm_0.001percent_MeJA_P Parameter: Age (day) Value: 11
  misc_feature: MA Experiment 20000533 PARAMETER Experiment Name: Zm_0.001percent_MeJA_P Parameter: Organism Value: Zea mays
  misc_feature: MA Experiment 20000533 PARAMETER Experiment Name: Zm_0.001percent_MeJA_P Parameter: Plant Line Value: 35A19
  misc_feature: MA Experiment 20000533 PARAMETER Experiment Name: Zm_0.001percent_MeJA_P Parameter: Timepoint (hr) Value: 72
  misc_feature: MA Experiment 20000533 PARAMETER Experiment Name: Zm_0.001percent_MeJA_P Parameter: Tissue Value: Aerial
  misc_feature: MA Experiment 20000533 PARAMETER Experiment Name: Zm_0.001percent_MeJA_P Parameter: Treatment Value: 0.001percent MeJA vs. No Treatment
  misc_feature: MA Experiment ID: 20000535 Result: Down-regulated in Transcription
  misc_feature: MA Experiment 20000535 PARAMETER Experiment Name: Zm_Hybrid_Seed_Dev_P Parameter: DAP Value: 30 vs. 12
  misc_feature: MA Experiment 20000535 PARAMETER Experiment Name: Zm_Hybrid_Seed_Dev_P Parameter: Organism Value: Zea mays
  misc_feature: MA Experiment 20000535 PARAMETER Experiment Name: Zm_Hybrid_Seed_Dev_P Parameter: Plant Line Value: 35A19
  misc_feature: MA Experiment 20000535 PARAMETER Experiment Name: Zm_Hybrid_Seed_Dev_P Parameter: Tissue Value: Embryo vs. Unfert Floret

SEQ ID NO: 20248 - protein, 319 aa, Zea mays subsp. mays; identical to SEQ ID NO: 13036
  peptide (1)..(319): Ceres Seq. ID no. 12364588
  misc_feature (62)..(249): Pfam Name: Glycosyl hydrolases family 16 Pfam Description: Glycosyl hydrolases family 16
  misc_feature (31)..(315): Homolog of NCBI NO: 37536586 NR Description: putative cellulase [Oryza sativa (japonica
  misc_feature (60)..(315): Homolog of NCBI NO: 34902398 NR Description: Putative cellulase [Oryza sativa (japonica
  misc_feature (20)..(315): Homolog of NCBI NO: 34901732 NR Description: putative xyloglucan endo-transglycosylase [Oryza
  misc_feature (25)..(315): Homolog of NCBI NO: 15228047 NR Description: xyloglucan endotransglycosylase, putative; id: At2g36870.1, supported by cDNA: 7831., supported by cDNA:
  misc_feature (27)..(315): Homolog of NCBI NO: 14029149 NR Description: xyloglucan endo-transglycosylase [Carica papaya]
  misc_feature (32)..(315): Homolog of NCBI NO: 17402583 NR Description: Xyloglucan endo-transglycosylase [Vitis labrusca
  misc_feature (28)..(315): Homolog of NCBI NO: 15230574 NR Description: xyloglucan endotransglycosylase, putative; id: At3g44990.1, supported by cDNA: gi_15810248 [Arabidopsis
  misc_feature (28)..(315): Homolog of NCBI NO: 1769907 NR Description: xyloglucan endo-transglycosylase [Arabidopsis
  misc_feature (25)..(315): Homolog of NCBI NO: 1362078 NR Description: xyloglucan endo-1,4-beta-D-glucanase (EC 3.2.1.-)
  misc_feature (127)..(315): Homolog of NCBI NO: 1084391 NR Description: xyloglucan endo-1,4-beta-D-glucanase (EC 3.2.1.-)

SEQ ID NO: 20249 - protein, 297 aa, Zea mays subsp. mays; identical to SEQ ID NO: 13037
  peptide (1)..(297): Ceres Seq. ID no. 12364589
  misc_feature (40)..(227): Pfam Name: Glycosyl hydrolases family 16 Pfam Description: Glycosyl hydrolases family 16
  misc_feature (9)..(293): Homolog of NCBI NO: 37536586 NR Description: putative cellulase [Oryza sativa (japonica
  misc_feature (38)..(293): Homolog of NCBI NO: 34902398 NR Description: Putative cellulase [Oryza sativa (japonica
  misc_feature (1)..(293): Homolog of NCBI NO: 34901732 NR Description: putative xyloglucan endo-transglycosylase [Oryza
  misc_feature (3)..(293): Homolog of NCBI NO: 15228047 NR Description: xyloglucan endotransglycosylase, putative; id: At2g36870.1, supported by cDNA: 7831., supported by cDNA:
  misc_feature (5)..(293): Homolog of NCBI NO: 14029149 NR Description: xyloglucan endo-transglycosylase [Carica papaya]
  misc_feature (10)..(293): Homolog of NCBI NO: 17402583 NR Description: Xyloglucan endo-transglycosylase [Vitis labrusca
  misc_feature (6)..(293): Homolog of NCBI NO: 15230574 NR Description: xyloglucan endotransglycosylase, putative; id: At3g44990.1, supported by cDNA: gi_15810248 [Arabidopsis
  misc_feature (6)..(293): Homolog of NCBI NO: 1769907 NR Description: xyloglucan endo-transglycosylase [Arabidopsis
  misc_feature (3)..(293): Homolog of NCBI NO: 1362078 NR Description: xyloglucan endo-1,4-beta-D-glucanase (EC 3.2.1.-)
  misc_feature (105)..(293): Homolog of NCBI NO: 1084391 NR Description: xyloglucan endo-1,4-beta-D-glucanase (EC 3.2.1.-)

SEQ ID NO: 20250 - protein, 295 aa, Zea mays subsp. mays; identical to SEQ ID NO: 13038
  peptide (1)..(295): Ceres Seq. ID no. 12364590
  misc_feature (38)..(225): Pfam Name: Glycosyl hydrolases family 16 Pfam Description: Glycosyl hydrolases family 16
  misc_feature (7)..(291): Homolog of NCBI NO: 37536586 NR Description: putative cellulase [Oryza sativa (japonica
  misc_feature (36)..(291): Homolog of NCBI NO: 34902398 NR Description: Putative cellulase [Oryza sativa (japonica
  misc_feature (1)..(291): Homolog of NCBI NO: 34901732 NR Description: putative xyloglucan endo-transglycosylase [Oryza
  misc_feature (1)..(291): Homolog of NCBI NO: 15228047 NR Description: xyloglucan endotransglycosylase, putative; id: At2g36870.1, supported by cDNA: 7831., supported by cDNA:
  misc_feature (3)..(291): Homolog of NCBI NO: 14029149 NR Description: xyloglucan endo-transglycosylase [Carica papaya]
  misc_feature (8)..(291): Homolog of NCBI NO: 17402583 NR Description: Xyloglucan endo-transglycosylase [Vitis labrusca
  misc_feature (4)..(291): Homolog of NCBI NO: 15230574 NR Description: xyloglucan endotransglycosylase, putative; id: At3g44990.1, supported by cDNA: gi_15810248 [Arabidopsis
  misc_feature (4)..(291): Homolog of NCBI NO: 1769907 NR Description: xyloglucan endo-transglycosylase [Arabidopsis
  misc_feature (1)..(291): Homolog of NCBI NO: 1362078 NR Description: xyloglucan endo-1,4-beta-D-glucanase (EC 3.2.1.-)
  misc_feature (103)..(291): Homolog of NCBI NO: 1084391 NR Description: xyloglucan endo-1,4-beta-D-glucanase (EC 3.2.1.-)

SEQ ID NO: 20251 - DNA, 461 bp, Zea mays subsp. mays
  misc_feature (1)..(461): Ceres Seq. ID no. 2787617
  misc_feature: MA Experiment ID: 108522 Result: Up-regulated in Transcription
  misc_feature: MA Experiment 108522 PARAMETER Experiment Name: Zm_42deg_Heat_P Parameter: Age (day) Value: 8
  misc_feature: MA Experiment 108522 PARAMETER Experiment Name: Zm_42deg_Heat_P Parameter: Organism Value: Zea mays
  misc_feature: MA Experiment 108522 PARAMETER Experiment Name: Zm_42deg_Heat_P Parameter: Plant Line Value: 35A19
  misc_feature: MA Experiment 108522 PARAMETER Experiment Name: Zm_42deg_Heat_P Parameter: Temperature (deg C) Value: 42 vs. 22
  misc_feature: MA Experiment 108522 PARAMETER Experiment Name: Zm_42deg_Heat_P Parameter: Timepoint (hr) Value: 1
  misc_feature: MA Experiment 108522 PARAMETER Experiment Name: Zm_42deg_Heat_P Parameter: Tissue Value: Aerial
  misc_feature: MA Experiment ID: 108523 Result: Up-regulated in Transcription
  misc_feature: MA Experiment 108523 PARAMETER Experiment Name: Zm_42deg_Heat_P Parameter: Age (day) Value: 8
  misc_feature: MA Experiment 108523 PARAMETER Experiment Name: Zm_42deg_Heat_P Parameter: Organism Value: Zea mays
  misc_feature: MA Experiment 108523 PARAMETER Experiment Name: Zm_42deg_Heat_P Parameter: Plant Line Value: 35A19
  misc_feature: MA Experiment 108523 PARAMETER Experiment Name: Zm_42deg_Heat_P Parameter: Temperature (deg C) Value: 42 vs. 22
  misc_feature: MA Experiment 108523 PARAMETER Experiment Name: Zm_42deg_Heat_P Parameter: Timepoint (hr) Value: 6
  misc_feature: MA Experiment 108523 PARAMETER Experiment Name: Zm_42deg_Heat_P Parameter: Tissue Value: Aerial
  misc_feature: MA Experiment ID: 108689 Result: Up-regulated in Transcription
  misc_feature: MA Experiment 108689 PARAMETER Experiment Name: Zm_Drought_Roots_P Parameter: Age (day) Value: 9
  misc_feature: MA Experiment 108689 PARAMETER Experiment Name: Zm_Drought_Roots_P Parameter: Organism Value: Zea mays
  misc_feature: MA Experiment 108689 PARAMETER Experiment Name: Zm_Drought_Roots_P Parameter: Plant Line Value: 35A19
  misc_feature: MA Experiment 108689 PARAMETER Experiment Name: Zm_Drought_Roots_P Parameter: Timepoint (hr) Value: 24
  misc_feature: MA Experiment 108689 PARAMETER Experiment Name: Zm_Drought_Roots_P Parameter: Tissue Value: Roots
  misc_feature: MA Experiment 108689 PARAMETER Experiment Name: Zm_Drought_Roots_P Parameter: Treatment Value: Drought vs. No Drought
  misc_feature: Pfam Name: LRR_1 Pfam Description: Leucine Rich Repeat
gaaacaaattgcgcattttcttctcctgcggtccttccttcgcttccccgttcttccagaatcctgtcgagacctgaatccaccctcacccagcggtccccatggcctccggcgaaggtgtagctaccagctgcacgatctaagcgaggtggagatcccacccacgctggaggaggtcgacctcaccgccaaccgcctctcttctgttgatcctcgcatcggccaactcccccatctccgcaagctctcattccgccagaacctcctcgacgatgacgccgtcgcgccactcacgtcctgggaggctattgccgggttgaaggagttcgtccttagagataacaaacttacaaggattcctgatgctggcatattcaaggatcttctggtgttcgatgtatctttcaatgagatatcttctttgactggtctgtccaaggtttccatcaaattgaaggaac

SEQ ID NO: 20252 - protein, 153 aa, Zea mays subsp. mays
  peptide (1)..(153): Ceres Seq. ID no. 2787618
  misc_feature: Pfam Name: LRR_1 Pfam Description: Leucine Rich Repeat
  misc_feature (41)..(152): Homolog of NCBI NO: 21536755 NR Description: unknown [Arabidopsis thaliana]
  misc_feature (41)..(152): Homolog of NCBI NO: 15241153 NR Description: putative protein
KQIAHFLLLRSFLRFPVLPESCRDLNPPSPSGPHGLRRRCSYQLHDLSEVEIPPTLEEVDLTANRLSSVDPRIGQLPHLRKLSFRQNLLDDDAVAPLTSWEAIAGLKEFVLRDNKLTRIPDAGIFKDLLVFDVSFNEISSLTGLSKVSIKLKE

SEQ ID NO: 20253 - DNA, 814 bp, Zea mays subsp. mays; identical to SEQ ID NO: 14542
  misc_feature (1)..(814): Ceres Seq. ID no. 12544477
  misc_feature: MA Experiment ID: 108535 Result: Up-regulated in Transcription
  misc_feature: MA Experiment 108535 PARAMETER Experiment Name: Zm_Meristem_P Parameter: Age (day) Value: 8
  misc_feature: MA Experiment 108535 PARAMETER Experiment Name: Zm_Meristem_P Parameter: Organism Value: Zea mays
  misc_feature: MA Experiment 108535 PARAMETER Experiment Name: Zm_Meristem_P Parameter: Plant Line Value: 35A19
  misc_feature: MA Experiment 108535 PARAMETER Experiment Name: Zm_Meristem_P Parameter: Tissue Value: Root Meristem vs. Above Root Meristem
  misc_feature: MA Experiment ID: 108556 Result: Down-regulated in Transcription
  misc_feature: MA Experiment 108556 PARAMETER Experiment Name: Zm_Drought_P Parameter: Age (day) Value: 9
  misc_feature: MA Experiment 108556 PARAMETER Experiment Name: Zm_Drought_P Parameter: Organism Value: Zea mays
  misc_feature: MA Experiment 108556 PARAMETER Experiment Name: Zm_Drought_P Parameter: Plant Line Value: 35A19
  misc_feature: MA Experiment 108556 PARAMETER Experiment Name: Zm_Drought_P Parameter: Timepoint (hr) Value: 24
  misc_feature: MA Experiment 108556 PARAMETER Experiment Name: Zm_Drought_P Parameter: Tissue Value: Aerial
  misc_feature: MA Experiment 108556 PARAMETER Experiment Name: Zm_Drought_P Parameter: Treatment Value: Drought vs. No Drought
  misc_feature: MA Experiment ID: 20000487 Result: Up-regulated in Transcription
  misc_feature: MA Experiment 20000487 PARAMETER Experiment Name: Zm_50mM_NH4NO3_L_to_H_P Parameter: Organism Value: Zea mays
  misc_feature: MA Experiment 20000487 PARAMETER Experiment Name: Zm_50mM_NH4NO3_L_to_H_P Parameter: Timepoint (hr) Value: 4
  misc_feature: MA Experiment 20000487 PARAMETER Experiment Name: Zm_50mM_NH4NO3_L_to_H_P Parameter: Tissue Value: Leaves
  misc_feature: MA Experiment 20000487 PARAMETER Experiment Name: Zm_50mM_NH4NO3_L_to_H_P Parameter: Treatment Value: 50mM NH4NO3 vs. 100mM Mannitol
  misc_feature: MA Experiment ID: 20000488 Result: Up-regulated in Transcription
  misc_feature: MA Experiment 20000488 PARAMETER Experiment Name: Zm_50mM_NH4NO3_L_to_H_P Parameter: Organism Value: Zea mays
  misc_feature: MA Experiment 20000488 PARAMETER Experiment Name: Zm_50mM_NH4NO3_L_to_H_P Parameter: Timepoint (hr) Value: 8
  misc_feature: MA Experiment 20000488 PARAMETER Experiment Name: Zm_50mM_NH4NO3_L_to_H_P Parameter: Tissue Value: Leaves
  misc_feature: MA Experiment 20000488 PARAMETER Experiment Name: Zm_50mM_NH4NO3_L_to_H_P Parameter: Treatment Value: 50mM NH4NO3 vs. 100mM Mannitol
  misc_feature: MA Experiment ID: 20001612 Result: Up-regulated in Transcription
  misc_feature: MA Experiment 20001612 PARAMETER Experiment Name: Zm_50ppm_KNO3_L-to-H_P Parameter: Age (day) Value: 19
  misc_feature: MA Experiment 20001612 PARAMETER Experiment Name: Zm_50ppm_KNO3_L-to-H_P Parameter: Organism Value: Zea mays
  misc_feature: MA Experiment 20001612 PARAMETER Experiment Name: Zm_50ppm_KNO3_L-to-H_P Parameter: Plant Line Value: 35A19
  misc_feature: MA Experiment 20001612 PARAMETER Experiment Name: Zm_50ppm_KNO3_L-to-H_P Parameter: Timepoint (hr) Value: 8
  misc_feature: MA Experiment 20001612 PARAMETER Experiment Name: Zm_50ppm_KNO3_L-to-H_P Parameter: Tissue Value: Roots
  misc_feature: MA Experiment 20001612 PARAMETER Experiment Name: Zm_50ppm_KNO3_L-to-H_P Parameter: Treatment Value: 50ppm KNO3 vs. 50ppm KCl

SEQ ID NO: 20254 - protein, 164 aa, Zea mays subsp. mays; identical to SEQ ID NO: 14543
  peptide (1)..(164): Ceres Seq. ID no. 12544478
  misc_feature (2)..(100): Pfam Name: Ribosomal protein L21e Pfam Description: Ribosomal protein L21e
  misc_feature (1)..(164): Homolog of NCBI NO: 37535194 NR Description: 60S ribosomal protein L21 [Oryza sativa (japonica group)] >gi|13489167|gb|AAK27801.1| 60S ribosomal protein L21
  misc_feature (1)..(164): Homolog of NCBI NO: 11276828 NR Description: ribosomal protein L21 [imported] - rice
  misc_feature (1)..(164): Homolog of NCBI NO: 18406015 NR Description: 60S ribosomal protein L21, putative; protein id: supported by cDNA: 28545., supported by cDNA: gi_15292812, by cDNA: gi_20258868 [Arabidopsis thaliana]
  misc_feature (1)..(164): Homolog of NCBI NO: 18391042 NR Description: putative 60S ribosomal protein L21; protein id: supported by cDNA: gi_13877928, supported by cDNA: gi_16323461 thaliana] >gi|18391054|ref|NP_563849.1| putative 60S come from
  misc_feature (1)..(157): Homolog of NCBI NO: 15213768 NR Description: ribosomal protein L21 [Spodoptera frugiperda]
  misc_feature (1)..(155): Homolog of NCBI NO: 6094029 NR Description: 60S RIBOSOMAL PROTEIN L21
  misc_feature (1)..(155): Homolog of NCBI NO: 40741182 NR Description: hypothetical protein AN4802.2 [Aspergillus
  misc_feature (1)..(157): Homolog of NCBI NO: 38048363 NR Description: similar to Drosophila melanogaster CG12775
  misc_feature (1)..(157): Homolog of NCBI NO: 20129705 NR Description: CG12775-PA [Drosophila melanogaster]
  misc_feature (1)..(155): Homolog of NCBI NO: 6319668 NR Description: Homology to rat L21; Rpl21ap [Saccharomyces

SEQ ID NO: 20255 - protein, 113 aa, Zea mays subsp. mays; identical to SEQ ID NO: 14544
  peptide (1)..(113): Ceres Seq. ID no. 12544479
  misc_feature (1)..(106): Homolog of NCBI NO: 15213768 NR Description: ribosomal protein L21 [Spodoptera frugiperda]
  misc_feature (1)..(104): Homolog of NCBI NO: 6094029 NR Description: 60S RIBOSOMAL PROTEIN L21
  misc_feature (1)..(104): Homolog of NCBI NO: 40741182 NR Description: hypothetical protein AN4802.2 [Aspergillus
  misc_feature (1)..(106): Homolog of NCBI NO: 38048363 NR Description: similar to Drosophila melanogaster CG12775
  misc_feature (1)..(106): Homolog of NCBI NO: 20129705 NR Description: CG12775-PA [Drosophila melanogaster]
  misc_feature (1)..(104): Homolog of NCBI NO: 6319668 NR Description: Homology to rat L21; Rpl21ap [Saccharomyces
  misc_feature (1)..(113): Homolog of NCBI NO: 37535194 NR Description: 60S ribosomal protein L21 [Oryza sativa (japonica group)] >gi|13489167|gb|AAK27801.1| 60S ribosomal protein L21
  misc_feature (1)..(113): Homolog of NCBI NO: 11276828 NR Description: ribosomal protein L21 [imported] - rice
  misc_feature (1)..(113): Homolog of NCBI NO: 18406015 NR Description: 60S ribosomal protein L21, putative; protein id: supported by cDNA: 28545., supported by cDNA: gi_15292812, by cDNA: gi_20258868 [Arabidopsis thaliana]
  misc_feature (1)..(113): Homolog of NCBI NO: 18391042 NR Description: putative 60S ribosomal protein L21; protein id: supported by cDNA: gi_13877928, supported by cDNA: gi_16323461 thaliana] >gi|18391054|ref|NP_563849.1| putative 60S come from

SEQ ID NO: 20256 - DNA, 1837 bp, Zea mays subsp. mays
  misc_feature (1)..(1837): Ceres Seq. ID no. 12435551
  misc_feature: MA Experiment ID: 108522 Result: Up-regulated in Transcription
  misc_feature: MA Experiment 108522 PARAMETER Experiment Name: Zm_42deg_Heat_P Parameter: Age (day) Value: 8
  misc_feature: MA Experiment 108522 PARAMETER Experiment Name: Zm_42deg_Heat_P Parameter: Organism Value: Zea mays
  misc_feature: MA Experiment 108522 PARAMETER Experiment Name: Zm_42deg_Heat_P Parameter: Plant Line Value: 35A19
  misc_feature: MA Experiment 108522 PARAMETER Experiment Name: Zm_42deg_Heat_P Parameter: Temperature (deg C) Value: 42 vs. 22
  misc_feature: MA Experiment 108522 PARAMETER Experiment Name: Zm_42deg_Heat_P Parameter: Timepoint (hr) Value: 1
  misc_feature: MA Experiment 108522 PARAMETER Experiment Name: Zm_42deg_Heat_P Parameter: Tissue Value: Aerial
  misc_feature: MA Experiment ID: 108527 Result: Down-regulated in Transcription
  misc_feature: MA Experiment 108527 PARAMETER Experiment Name: Zm_5mM_NO_P Parameter: Age (day) Value: 8
  misc_feature: MA Experiment 108527 PARAMETER Experiment Name: Zm_5mM_NO_P Parameter: Organism Value: Zea mays
  misc_feature: MA Experiment 108527 PARAMETER Experiment Name: Zm_5mM_NO_P Parameter: Plant Line Value: 35A19
  misc_feature: MA Experiment 108527 PARAMETER Experiment Name: Zm_5mM_NO_P Parameter: Timepoint (hr) Value: 6
  misc_feature: MA Experiment 108527 PARAMETER Experiment Name: Zm_5mM_NO_P Parameter: Tissue Value: Aerial
  misc_feature: MA Experiment 108527 PARAMETER Experiment Name: Zm_5mM_NO_P Parameter: Treatment Value: 5mM NO vs. No Treatment
  misc_feature: MA Experiment ID: 108528 Result: Down-regulated in Transcription
  misc_feature: MA Experiment 108528 PARAMETER Experiment Name: Zm_Imbibed_Seeds_P Parameter: Age (day) Value: 5 vs. 2
  misc_feature: MA Experiment 108528 PARAMETER Experiment Name: Zm_Imbibed_Seeds_P Parameter: Organism Value: Zea mays
  misc_feature: MA Experiment 108528 PARAMETER Experiment Name: Zm_Imbibed_Seeds_P Parameter: Plant Line Value: 35A19
  misc_feature: MA Experiment 108528 PARAMETER Experiment Name: Zm_Imbibed_Seeds_P Parameter: Tissue Value: Aerial vs. Embryo
  misc_feature: MA Experiment ID: 108530 Result: Down-regulated in Transcription
  misc_feature: MA Experiment 108530 PARAMETER Experiment Name: Zm_Imbibed_Seeds_P Parameter: Age (day) Value: 6 vs. 2
  misc_feature: MA Experiment 108530 PARAMETER Experiment Name: Zm_Imbibed_Seeds_P Parameter: Organism Value: Zea mays
  misc_feature: MA Experiment 108530 PARAMETER Experiment Name: Zm_Imbibed_Seeds_P Parameter: Plant Line Value: 35A19
  misc_feature: MA Experiment 108530 PARAMETER Experiment Name: Zm_Imbibed_Seeds_P Parameter: Tissue Value: Aerial vs. Embryo
  misc_feature: MA Experiment ID: 108536 Result: Up-regulated in Transcription
  misc_feature: MA Experiment 108536 PARAMETER Experiment Name: Zm_Meristem_P Parameter: Age (day) Value: 8
  misc_feature: MA Experiment 108536 PARAMETER Experiment Name: Zm_Meristem_P Parameter: Organism Value: Zea mays
  misc_feature: MA Experiment 108536 PARAMETER Experiment Name: Zm_Meristem_P Parameter: Plant Line Value: 35A19
  misc_feature: MA Experiment 108536 PARAMETER Experiment Name: Zm_Meristem_P Parameter: Tissue Value: Shoot Meristem vs. Above Shoot Meristem
  misc_feature: MA Experiment ID: 108543 Result: Up-regulated in Transcription
  misc_feature: MA Experiment ID: 108559 Result: Down-regulated in Transcription
  misc_feature: MA Experiment 108559 PARAMETER Experiment Name: Zm_5mM_NO_P Parameter: Age (day) Value: 8
  misc_feature: MA Experiment 108559 PARAMETER Experiment Name: Zm_5mM_NO_P Parameter: Organism Value: Zea mays
  misc_feature: MA Experiment 108559 PARAMETER Experiment Name: Zm_5mM_NO_P Parameter: Plant Line Value: 35A19
  misc_feature: MA Experiment 108559 PARAMETER Experiment Name: Zm_5mM_NO_P Parameter: Timepoint (hr) Value: 12
  misc_feature: MA Experiment 108559 PARAMETER Experiment Name: Zm_5mM_NO_P Parameter: Tissue Value: Aerial
  misc_feature: MA Experiment 108559 PARAMETER Experiment Name: Zm_5mM_NO_P Parameter: Treatment Value: 5mM NO vs. No Treatment
  misc_feature: MA Experiment ID: 20000477 Result: Down-regulated in Transcription
  misc_feature: MA Experiment 20000477 PARAMETER Experiment Name: Zm_5mM_SA_P Parameter: Age (day) Value: 10
  misc_feature: MA Experiment 20000477 PARAMETER Experiment Name: Zm_5mM_SA_P Parameter: Organism Value: Zea mays
  misc_feature: MA Experiment 20000477 PARAMETER Experiment Name: Zm_5mM_SA_P Parameter: Plant Line Value: 35A19
  misc_feature: MA Experiment 20000477 PARAMETER Experiment Name: Zm_5mM_SA_P Parameter: Timepoint (hr) Value: 48
  misc_feature: MA Experiment 20000477 PARAMETER Experiment Name: Zm_5mM_SA_P Parameter: Tissue Value: Aerial
  misc_feature: MA Experiment 20000477 PARAMETER Experiment Name: Zm_5mM_SA_P Parameter: Treatment Value: 5mM SA vs. No Treatment
  misc_feature: MA Experiment ID: 20000480 Result: Down-regulated in Transcription
  misc_feature: MA Experiment 20000480 PARAMETER Experiment Name: Zm_Drought_P Parameter: Age (day) Value: 11
  misc_feature: MA Experiment 20000480 PARAMETER Experiment Name: Zm_Drought_P Parameter: Organism Value: Zea mays
  misc_feature: MA Experiment 20000480 PARAMETER Experiment Name: Zm_Drought_P Parameter: Plant Line Value: 35A19
  misc_feature: MA Experiment 20000480 PARAMETER Experiment Name: Zm_Drought_P Parameter: Timepoint (hr) Value: 72
  misc_feature: MA Experiment 20000480 PARAMETER Experiment Name: Zm_Drought_P Parameter: Tissue Value: Aerial
  misc_feature: MA Experiment 20000480 PARAMETER Experiment Name: Zm_Drought_P Parameter: Treatment Value: Drought vs. No Drought
  misc_feature: MA Experiment ID: 20000492 Result: Down-regulated in Transcription
  misc_feature: MA Experiment 20000492 PARAMETER Experiment Name: Zm_Hybrid_Seed_Dev_P Parameter: DAP Value: 12
  misc_feature: MA Experiment 20000492 PARAMETER Experiment Name: Zm_Hybrid_Seed_Dev_P Parameter: Organism Value: Zea mays
  misc_feature: MA Experiment 20000492 PARAMETER Experiment Name: Zm_Hybrid_Seed_Dev_P Parameter: Plant Line Value: 35A19
  misc_feature: MA Experiment 20000492 PARAMETER Experiment Name: Zm_Hybrid_Seed_Dev_P Parameter: Tissue Value: Fert Kernel vs. Unfert Floret
  misc_feature: MA Experiment ID: 20000535 Result: Down-regulated in Transcription
  misc_feature: MA Experiment 20000535 PARAMETER Experiment Name: Zm_Hybrid_Seed_Dev_P Parameter: DAP Value: 30 vs. 12
  misc_feature: MA Experiment 20000535 PARAMETER Experiment Name: Zm_Hybrid_Seed_Dev_P Parameter: Organism Value: Zea mays
  misc_feature: MA Experiment 20000535 PARAMETER Experiment Name: Zm_Hybrid_Seed_Dev_P Parameter: Plant Line Value: 35A19
  misc_feature: MA Experiment 20000535 PARAMETER Experiment Name: Zm_Hybrid_Seed_Dev_P Parameter: Tissue Value: Embryo vs. Unfert Floret
agtctctaggctctggagacctcgcgcaccatcccaccagcagcaagcgcccactaattccgcaccacaacgcgcactctccggcaccaccgccgtcctcgcgacgtcacatagtacgcattacgcactcgcgcgcgcgcgtgcgcgtacatttacgcagcgatgagctcgagaacgcaccacccctgctttgcgtctgtggagtcatgggagcaagcggcgatggcgcacgacggcttcctcggcgatcttgcctgcccgctcccgctcgctcacgctgcaaccgcggcgccgttcgacccgctgcgggtacatgtggcgcacgcgctcacgggcgccggcgcggggtgggaacacgacgccgcgacgggcgcgctcgtgccgtcgcggccgcgaccgctgtcgccgtcctcgctcgcggcggccaccgccgtagtagttggaggaggaggagacgccgtggaggccgcgctgatggagcagcttgcgagcaggctcggcgtcagcgtgccttcgccgccgccatcgcggtacgcgtcctgccacggcacgccggcgggctccccctccaagtcggcggcgccgtgggtgctggccggggacgcggcgcctgcggagcgcgccacagggctcccgtgcttcccggcctcctgtggggagctctcgcgcgtgcccagctgccagtcgtcgcttctcggcgagcacgcaccgactccggcgcccgcgccgttgcctggcgctgccaaacagcacgcgagcgacgggtcgtgcagcgatggcccctgccggaagcggaaggcgtcgggcggcaaggccaaggacgtggtcaccacggccacacccaagtcccgggagccggagacgatggccaagagacgcaagctctcgacagacgccgcccgcgacgaggctgggtcgcacgggaacggcaaggggaaggaggtggcgccggcggcagagccagagccacagccacccaaggactacatccacgtgcgagcgcggaggggccaggccaccgacagccacagcctcgccgagcgggtgaggagggaaaagatcagcgaacgcatgaagctgctgcaggacctcgtgccaggctgcagcaaggttaccgggaaggccgtgatgctggacgagatcataaactacgtacagtcgctgcagtgccaggtggagttcctgtcgatgaagctgtcgacggtcgacccgcgccgggagctcgacgtgggctgcttcgtcgtccccaaagacgacgtaacgatgcaggccaacaggctgtgcgcgcccgcgacgtcgtcgtcgagctcagccttctgctacgccgcgcggagtgttgttacgaacgccaaaggattcgagacgccgctgcccttggcgaaccatggcgtcgcggcggacgacaggccacttgagcggcggactcgagacgcaggtccccaggcggggagcttgtgggaagaggacgatctgcagagcctggtcctgatgggattccggggccgttgatcgttgacgctctgattaggctaggccgctagggacgacagttcgtttccaccgaccgccaaccaaagcgagagttgcagggccacgtaacagcagggttgggctccaatcattgggaactctccatgattgtacacagacaggacgcttacacgctaatttccagctcggcggaggccaagaaacgaaacaaaaaaaaaaggcgaaaagaagatgtttttttctcgcattccccctcacgaatttgcagtttaatcgatgtaagataactcaatgtaattattaatggtatttgagtcttatagacatcaagttgatgaaattttat

SEQ ID NO: 20257 - protein, 470 aa, Zea mays subsp. mays
  peptide (1)..(470): Ceres Seq. ID no. 12435552
  misc_feature (86)..(470): Homolog of NCBI NO: 23106243 NR Description: hypothetical protein [Azotobacter vinelandii]
SLGSGDLAHHPTSSKRPLIPHHNAHSPAPPPSSRRHIVRITHSRARVRVHLRSDELENAPPLLCVCGVMGASGDGARRLPRRSCLPAPARSRCNRGAVRPAAGTCGARAHGRRRGVGTRRRDGRARAVAAATAVAVLARGGHRRSSWRRRRRRGGRADGAACEQARRQRAFAAAIAVRVLPRHAGGLPLQVGGAVGAGRGRGACGARHRAPVLPGLLWGALARAQLPVVASRRARTDSGARAVAWRCQTARERRVVQRWPLPEAEGVGRQGQGRGHHGHTQVPGAGDDGQETQALDRRRPRRGWVARERQGEGGGAGGRARATATQGLHPRASAEGPGHRQPQPRRAGEEGKDQRTHEAAAGPRARLQQGYREGRDAGRDHKLRTVAAVPGGVPVDEAVDGRPAPGARRGLLRRPQRRRNDAGQQAVRARDVVVELSLLLRRAECCYERQRIRDAAALGEPWRRGGRQAT

SEQ ID NO: 20258 - protein, 448 aa, Zea mays subsp. mays
  peptide (1)..(448): Ceres Seq. ID no. 12435553
  misc_feature (285)..(335): Pfam Name: Helix-loop-helix DNA-binding domain Pfam Description: Helix-loop-helix DNA-binding domain
  misc_feature (209)..(385): Homolog of NCBI NO: 30697769 NR Description: DNA-binding protein -related [Arabidopsis
  misc_feature (209)..(370): Homolog of NCBI NO: 20127044 NR Description: putative bHLH transcription factor [Arabidopsis
  misc_feature (209)..(385): Homolog of NCBI NO: 15221563 NR Description: putative DNA-binding protein; protein id:
  misc_feature (209)..(445): Homolog of NCBI NO: 22331295 NR Description: bHLH protein
  misc_feature (165)..(444): Homolog of NCBI NO: 15239013 NR Description: putative protein
  misc_feature (71)..(440): Homolog of NCBI NO: 29647487 NR Description: OJ1191_A10.7 [Oryza sativa (japonica
  misc_feature (165)..(444): Homolog of NCBI NO: 20127085 NR Description: putative bHLH transcription factor [Arabidopsis
  misc_feature (66)..(445): Homolog of NCBI NO: 20127064 NR Description: putative bHLH transcription factor [Arabidopsis
  misc_feature (66)..(445): Homolog of NCBI NO: 15231450 NR Description: bHLH protein
  misc_feature (9)..(380): Homolog of NCBI NO: 34906952 NR Description: DNA-binding protein-like protein
MSSRTHHPCFASVESWEQAAMAHDGFLGDLACPLPLAHAATAAPFDPLRVHVAHALTGAGAGWEHDAATGALVPSRPRPLSPSSLAAATAVVVGGGGDAVEAALMEQLASRLGVSVPSPPPSRYASCHGTPAGSPSKSAAPWVLAGDAAPAERATGLPCFPASCGELSRVPSCQSSLLGEHAPTPAPAPLPGAAKQHASDGSCSDGPCRKRKASGGKAKDVVTTATPKSREPETMAKRRKLSTDAARDEAGSHGNGKGKEVAPAAEPEPQPPKDYIHVRARRGQATDSHSLAERVRREKISERMKLLQDLVPGCSKVTGKAVMLDEIINYVQSLQCQVEFLSMKLSTVDPRRELDVGCFVVPKDDVTMQANRLCAPATSSSSSAFCYAARSVVTNAKGFETPLPLANHGVAADDRPLERRTRDAGPQAGSLWEEDDLQSLVLMGFRGR

SEQ ID NO: 20259 - protein, 428 aa, Zea mays subsp. mays
  peptide (1)..(428): Ceres Seq. ID no. 12435554
  misc_feature (265)..(315): Pfam Name: Helix-loop-helix DNA-binding domain Pfam Description: Helix-loop-helix DNA-binding domain
  misc_feature (189)..(365): Homolog of NCBI NO: 30697769 NR Description: DNA-binding protein -related [Arabidopsis
  misc_feature (189)..(350): Homolog of NCBI NO: 20127044 NR Description: putative bHLH transcription factor [Arabidopsis
  misc_feature (189)..(365): Homolog of NCBI NO: 15221563 NR Description: putative DNA-binding protein; protein id:
  misc_feature (189)..(425): Homolog of NCBI NO: 22331295 NR Description: bHLH protein
  misc_feature (145)..(424): Homolog of NCBI NO: 15239013 NR Description: putative protein
  misc_feature (51)..(420): Homolog of NCBI NO: 29647487 NR Description: OJ1191_A10.7 [Oryza sativa (japonica
  misc_feature (145)..(424): Homolog of NCBI NO: 20127085 NR Description: putative bHLH transcription factor [Arabidopsis
  misc_feature (46)..(425): Homolog of NCBI NO: 20127064 NR Description: putative bHLH transcription factor [Arabidopsis
  misc_feature (46)..(425): Homolog of NCBI NO: 15231450 NR Description: bHLH protein
  misc_feature (1)..(360): Homolog of NCBI NO: 34906952 NR Description: DNA-binding protein-like protein
MAHDGFLGDLACPLPLAHAATAAPFDPLRVHVAHALTGAGAGWEHDAATGALVPSRPRPLSPSSLAAATAVVVGGGGDAVEAALMEQLASRLGVSVPSPPPSRYASCHGTPAGSPSKSAAPWVLAGDAAPAERATGLPCFPASCGELSRVPSCQSSLLGEHAPTPAPAPLPGAAKQHASDGSCSDGPCRKRKASGGKAKDVVTTATPKSREPETMAKRRKLSTDAARDEAGSHGNGKGKEVAPAAEPEPQPPKDYIHVRARRGQATDSHSLAERVRREKISERMKLLQDLVPGCSKVTGKAVMLDEIINYVQSLQCQVEFLSMKLSTVDPRRELDVGCFVVPKDDVTMQANRLCAPATSSSSSAFCYAARSVVTNAKGFETPLPLANHGVAADDRPLERRTRDAGPQAGSLWEEDDLQSLVLMGFRGR

SEQ ID NO: 20260 - DNA, 1144 bp, Zea mays subsp. mays; identical to SEQ ID NO: 12883
  misc_feature (1)..(1144): Ceres Seq. ID no. 12340675
  misc_feature: MA Experiment ID: 108522 Result: Up-regulated in Transcription
  misc_feature: MA Experiment 108522 PARAMETER Experiment Name: Zm_42deg_Heat_P Parameter: Age (day) Value: 8
  misc_feature: MA Experiment 108522 PARAMETER Experiment Name: Zm_42deg_Heat_P Parameter: Organism Value: Zea mays
  misc_feature: MA Experiment 108522 PARAMETER Experiment Name: Zm_42deg_Heat_P Parameter: Plant Line Value: 35A19
  misc_feature: MA Experiment 108522 PARAMETER Experiment Name: Zm_42deg_Heat_P Parameter: Temperature (deg C) Value: 42 vs. 22
  misc_feature: MA Experiment 108522 PARAMETER Experiment Name: Zm_42deg_Heat_P Parameter: Timepoint (hr) Value: 1
  misc_feature: MA Experiment 108522 PARAMETER Experiment Name: Zm_42deg_Heat_P Parameter: Tissue Value: Aerial
  misc_feature: MA Experiment ID: 108523 Result: Up-regulated in Transcription
  misc_feature: MA Experiment 108523 PARAMETER Experiment Name: Zm_42deg_Heat_P Parameter: Age (day) Value: 8
  misc_feature: MA Experiment 108523 PARAMETER Experiment Name: Zm_42deg_Heat_P Parameter: Organism Value: Zea mays
  misc_feature: MA Experiment 108523 PARAMETER Experiment Name: Zm_42deg_Heat_P Parameter: Plant Line Value: 35A19
  misc_feature: MA Experiment 108523 PARAMETER Experiment Name: Zm_42deg_Heat_P Parameter: Temperature (deg C) Value: 42 vs. 22
  misc_feature: MA Experiment 108523 PARAMETER Experiment Name: Zm_42deg_Heat_P Parameter: Timepoint (hr) Value: 6
  misc_feature: MA Experiment 108523 PARAMETER Experiment Name: Zm_42deg_Heat_P Parameter: Tissue Value: Aerial
  misc_feature: MA Experiment ID: 108528 Result: Up-regulated in Transcription
  misc_feature: MA Experiment 108528 PARAMETER Experiment Name: Zm_Imbibed_Seeds_P Parameter: Age (day) Value: 5 vs. 2
  misc_feature: MA Experiment 108528 PARAMETER Experiment Name: Zm_Imbibed_Seeds_P Parameter: Organism Value: Zea mays
  misc_feature: MA Experiment 108528 PARAMETER Experiment Name: Zm_Imbibed_Seeds_P Parameter: Plant Line Value: 35A19
  misc_feature: MA Experiment 108528 PARAMETER Experiment Name: Zm_Imbibed_Seeds_P Parameter: Tissue Value: Aerial vs. Embryo
  misc_feature: MA Experiment ID: 108536 Result: Down-regulated in Transcription
  misc_feature: MA Experiment 108536 PARAMETER Experiment Name: Zm_Meristem_P Parameter: Age (day) Value: 8
  misc_feature: MA Experiment 108536 PARAMETER Experiment Name: Zm_Meristem_P Parameter: Organism Value: Zea mays
  misc_feature: MA Experiment 108536 PARAMETER Experiment Name: Zm_Meristem_P Parameter: Plant Line Value: 35A19
  misc_feature: MA Experiment 108536 PARAMETER Experiment Name: Zm_Meristem_P Parameter: Tissue Value: Shoot Meristem vs. Above Shoot Meristem
  misc_feature: MA Experiment ID: 108544 Result: Down-regulated in Transcription
  misc_feature: MA Experiment ID: 108545 Result: Up-regulated in Transcription
  misc_feature: MA Experiment 108545 PARAMETER Experiment Name: Zm_Imbibed_Seeds_P Parameter: Age (day) Value: 3 vs. 2
  misc_feature: MA Experiment 108545 PARAMETER Experiment Name: Zm_Imbibed_Seeds_P Parameter: Organism Value: Zea mays
  misc_feature: MA Experiment 108545 PARAMETER Experiment Name: Zm_Imbibed_Seeds_P Parameter: Plant Line Value: 35A19
  misc_feature: MA Experiment 108545 PARAMETER Experiment Name: Zm_Imbibed_Seeds_P Parameter: Tissue Value: Aerial vs. Embryo
  misc_feature: MA Experiment ID: 108547 Result: Up-regulated in Transcription
  misc_feature: MA Experiment 108547 PARAMETER Experiment Name: Zm_Imbibed_Seeds_P Parameter: Age (day) Value: 4 vs. 2
  misc_feature: MA Experiment 108547 PARAMETER Experiment Name: Zm_Imbibed_Seeds_P Parameter: Organism Value: Zea mays
  misc_feature: MA Experiment 108547 PARAMETER Experiment Name: Zm_Imbibed_Seeds_P Parameter: Plant Line Value: 35A19
  misc_feature: MA Experiment 108547 PARAMETER Experiment Name: Zm_Imbibed_Seeds_P Parameter: Tissue Value: Aerial vs. Embryo
  misc_feature: MA Experiment ID: 108688 Result: Down-regulated in Transcription
  misc_feature: MA Experiment 108688 PARAMETER Experiment Name: Zm_Embryos-Flowers__P Parameter: Tissue Value: Immature Flowers vs. Aerial+
  misc_feature: MA Experiment ID: 20000492 Result: Up-regulated in Transcription
  misc_feature: MA Experiment 20000492 PARAMETER Experiment Name: Zm_Hybrid_Seed_Dev_P Parameter: DAP Value: 12
  misc_feature: MA Experiment 20000492 PARAMETER Experiment Name: Zm_Hybrid_Seed_Dev_P Parameter: Organism Value: Zea mays
  misc_feature: MA Experiment 20000492 PARAMETER Experiment Name: Zm_Hybrid_Seed_Dev_P Parameter: Plant Line Value: 35A19
  misc_feature: MA Experiment 20000492 PARAMETER Experiment Name: Zm_Hybrid_Seed_Dev_P Parameter: Tissue Value: Fert Kernel vs. Unfert Floret

SEQ ID NO: 20261 - protein, 257 aa, Zea mays subsp. mays; identical to SEQ ID NO: 12884
  peptide (1)..(257): Ceres Seq. ID no. 12340676
  misc_feature (1)..(257): Homolog of NCBI NO: 34897418 NR Description: unknown protein [Oryza sativa (japonica
  misc_feature (4)..(257): Homolog of NCBI NO: 18404496 NR Description: expressed protein; protein id: At2g37660.1, by cDNA: 13797., supported by cDNA: gi_14596078, supported by gi_20148254 [Arabidopsis thaliana]
  misc_feature (1)..(257): Homolog of NCBI NO: 14719331 NR Description: putative 3-beta hydroxysteroid
  misc_feature (9)..(257): Homolog of NCBI NO: 18413869 NR Description: putative protein; protein id: At5g02240.1, by cDNA: gi_15294289 [Arabidopsis thaliana] AT5g02240/T7H20_290 [Arabidopsis thaliana]
  misc_feature (4)..(257): Homolog of NCBI NO: 7485430 NR Description: hypothetical protein At2g37660 [imported] -
  misc_feature (9)..(252): Homolog of NCBI NO: 11358410 NR Description: hypothetical protein T7H20.290 - Arabidopsis >gi|7340698|emb|CAB82997.1| putative protein [Arabidopsis
  misc_feature (96)..(253): Homolog of NCBI NO: 16330694 NR Description: hypothetical protein [Synechocystis sp. PCC 6803]
  misc_feature (96)..(253): Homolog of NCBI NO: 23130188 NR Description: hypothetical protein [Nostoc punctiforme]
  misc_feature (1)..(250): Homolog of NCBI NO: 30689062 NR Description: expressed protein [Arabidopsis thaliana] unknown protein [Arabidopsis thaliana]
  misc_feature (96)..(252): Homolog of NCBI NO: 17230243 NR Description: hypothetical protein [Nostoc sp. PCC 7120]
  misc_feature (1)..(257): Homolog of NCBI NO: 34897418 NR Description: unknown protein [Oryza sativa (japonica
  misc_feature (4)..(257): Homolog of NCBI NO: 18404496 NR Description: expressed protein; protein id: At2g37660.1, by cDNA: 13797., supported by cDNA: gi_14596078, supported by gi_20148254 [Arabidopsis thaliana]
  misc_feature (1)..(257): Homolog of NCBI NO: 14719331 NR Description: putative 3-beta hydroxysteroid
  misc_feature (9)..(257): Homolog of NCBI NO: 18413869 NR Description: putative protein; protein id: At5g02240.1, by cDNA: gi_15294289 [Arabidopsis thaliana] AT5g02240/T7H20_290 [Arabidopsis thaliana]
  misc_feature (4)..(257): Homolog of NCBI NO: 7485430 NR Description: hypothetical protein At2g37660 [imported] -
  misc_feature (9)..(252): Homolog of NCBI NO: 11358410 NR Description: hypothetical protein T7H20.290 - Arabidopsis >gi|7340698|emb|CAB82997.1| putative protein [Arabidopsis
  misc_feature (96)..(253): Homolog of NCBI NO: 16330694 NR Description: hypothetical protein [Synechocystis sp. PCC 6803]
  misc_feature (96)..(253): Homolog of NCBI NO: 23130188 NR Description: hypothetical protein [Nostoc punctiforme]
  misc_feature (1)..(250): Homolog of NCBI NO: 30689062 NR Description: expressed protein [Arabidopsis thaliana] unknown protein [Arabidopsis thaliana]
  misc_feature (96)..(252): Homolog of NCBI NO: 17230243 NR Description: hypothetical protein [Nostoc sp. PCC 7120]

SEQ ID NO: 20262 - protein, 171 aa, Zea mays subsp. mays; identical to SEQ ID NO: 12885
  peptide (1)..(171): Ceres Seq. ID no. 12340677
  misc_feature (1)..(171): Homolog of NCBI NO: 34897418 NR Description: unknown protein [Oryza sativa (japonica
  misc_feature (1)..(171): Homolog of NCBI NO: 18404496 NR Description: expressed protein; protein id: At2g37660.1, by cDNA: 13797., supported by cDNA: gi_14596078, supported by gi_20148254 [Arabidopsis thaliana]
  misc_feature (1)..(171): Homolog of NCBI NO: 14719331 NR Description: putative 3-beta hydroxysteroid
  misc_feature (1)..(171): Homolog of NCBI NO: 18413869 NR Description: putative protein; protein id: At5g02240.1, by cDNA: gi_15294289 [Arabidopsis thaliana] AT5g02240/T7H20_290 [Arabidopsis thaliana]
  misc_feature (1)..(171): Homolog of NCBI NO: 7485430 NR Description: hypothetical protein At2g37660 [imported] -
  misc_feature (1)..(166): Homolog of NCBI NO: 11358410 NR Description: hypothetical protein T7H20.290 - Arabidopsis >gi|7340698|emb|CAB82997.1| putative protein [Arabidopsis
  misc_feature (10)..(167): Homolog of NCBI NO: 16330694 NR Description: hypothetical protein [Synechocystis sp. PCC 6803]
  misc_feature (10)..(167): Homolog of NCBI NO: 23130188 NR Description: hypothetical protein [Nostoc punctiforme]
  misc_feature (1)..(164): Homolog of NCBI NO: 30689062 NR Description: expressed protein [Arabidopsis thaliana] unknown protein [Arabidopsis thaliana]
  misc_feature (10)..(166): Homolog of NCBI NO: 17230243 NR Description: hypothetical protein [Nostoc sp. PCC 7120]
  misc_feature (1)..(171): Homolog of NCBI NO: 34897418 NR Description: unknown protein [Oryza sativa (japonica
  misc_feature (1)..(171): Homolog of NCBI NO: 18404496 NR Description: expressed protein; protein id: At2g37660.1, by cDNA: 13797., supported by cDNA: gi_14596078, supported by gi_20148254 [Arabidopsis thaliana]
  misc_feature (1)..(171): Homolog of NCBI NO: 14719331 NR Description: putative 3-beta hydroxysteroid
  misc_feature (1)..(171): Homolog of NCBI NO: 18413869 NR Description: putative protein; protein id: At5g02240.1, by cDNA: gi_15294289 [Arabidopsis thaliana] AT5g02240/T7H20_290 [Arabidopsis thaliana]
  misc_feature (1)..(171): Homolog of NCBI NO: 7485430 NR Description: hypothetical protein At2g37660 [imported] -
  misc_feature (1)..(166): Homolog of NCBI NO: 11358410 NR Description: hypothetical protein T7H20.290 - Arabidopsis >gi|7340698|emb|CAB82997.1| putative protein [Arabidopsis
  misc_feature (10)..(167): Homolog of NCBI NO: 16330694 NR Description: hypothetical protein [Synechocystis sp. PCC 6803]
  misc_feature (10)..(167): Homolog of NCBI NO: 23130188 NR Description: hypothetical protein [Nostoc punctiforme]
  misc_feature (1)..(164): Homolog of NCBI NO: 30689062 NR Description: expressed protein [Arabidopsis thaliana] unknown protein [Arabidopsis thaliana]
  misc_feature (10)..(166): Homolog of NCBI NO: 17230243 NR Description: hypothetical protein [Nostoc sp. PCC 7120]

SEQ ID NO: 20263 - protein, 151 aa, Zea mays subsp. mays; identical to SEQ ID NO: 12886
  peptide (1)..(151): Ceres Seq. ID no. 12340678
  misc_feature (1)..(151): Homolog of NCBI NO: 34897418 NR Description: unknown protein [Oryza sativa (japonica
  misc_feature (1)..(151): Homolog of NCBI NO: 18404496 NR Description: expressed protein; protein id: At2g37660.1, by cDNA: 13797., supported by cDNA: gi_14596078, supported by gi_20148254 [Arabidopsis thaliana]
  misc_feature (1)..(151): Homolog of NCBI NO: 14719331 NR Description: putative 3-beta hydroxysteroid
  misc_feature (1)..(151): Homolog of NCBI NO: 18413869 NR Description: putative protein; protein id: At5g02240.1, by cDNA: gi_15294289 [Arabidopsis thaliana] AT5g02240/T7H20_290 [Arabidopsis thaliana]
  misc_feature (1)..(151): Homolog of NCBI NO: 7485430 NR Description: hypothetical protein At2g37660 [imported] -
  misc_feature (1)..(146): Homolog of NCBI NO: 11358410 NR Description: hypothetical protein T7H20.290 - Arabidopsis >gi|7340698|emb|CAB82997.1| putative protein [Arabidopsis
  misc_feature (1)..(147): Homolog of NCBI NO: 16330694 NR Description: hypothetical protein [Synechocystis sp. PCC 6803]
  misc_feature (1)..(147): Homolog of NCBI NO: 23130188 NR Description: hypothetical protein [Nostoc punctiforme]
  misc_feature (1)..(144): Homolog of NCBI NO: 30689062 NR Description: expressed protein [Arabidopsis thaliana] unknown protein [Arabidopsis thaliana]
  misc_feature (1)..(146): Homolog of NCBI NO: 17230243 NR Description: hypothetical protein [Nostoc sp. PCC 7120]
  misc_feature (1)..(151): Homolog of NCBI NO: 34897418 NR Description: unknown protein [Oryza sativa (japonica
  misc_feature (1)..(151): Homolog of NCBI NO: 18404496 NR Description: expressed protein; protein id: At2g37660.1, by cDNA: 13797., supported by cDNA: gi_14596078, supported by gi_20148254 [Arabidopsis thaliana]
  misc_feature (1)..(151): Homolog of NCBI NO: 14719331 NR Description: putative 3-beta hydroxysteroid
  misc_feature (1)..(151): Homolog of NCBI NO: 18413869 NR Description: putative protein; protein id: At5g02240.1, by cDNA: gi_15294289 [Arabidopsis thaliana] AT5g02240/T7H20_290 [Arabidopsis thaliana]
  misc_feature (1)..(151): Homolog of NCBI NO: 7485430 NR Description: hypothetical protein At2g37660 [imported] -
  misc_feature (1)..(146): Homolog of NCBI NO: 11358410 NR Description: hypothetical protein T7H20.290 - Arabidopsis >gi|7340698|emb|CAB82997.1| putative protein [Arabidopsis
  misc_feature (1)..(147): Homolog of NCBI NO: 16330694 NR Description: hypothetical protein [Synechocystis sp. PCC 6803]
  misc_feature (1)..(147): Homolog of NCBI NO: 23130188 NR Description: hypothetical protein [Nostoc punctiforme]
  misc_feature (1)..(144): Homolog of NCBI NO: 30689062 NR Description: expressed protein [Arabidopsis thaliana] unknown protein [Arabidopsis thaliana]
  misc_feature (1)..(146): Homolog of NCBI NO: 17230243 NR Description: hypothetical protein [Nostoc sp. PCC 7120]

SEQ ID NO: 20264 - DNA, 1848 bp, Zea mays subsp. mays
  misc_feature (1)..(1848): Ceres Seq. ID no. 12418208
  misc_feature: MA Experiment ID: 108515 Result: Up-regulated in Transcription
  misc_feature: MA Experiment 108515 PARAMETER Experiment Name: Zm_2mM_SA_P Parameter: Age (day) Value: 8
  misc_feature: MA Experiment 108515 PARAMETER Experiment Name: Zm_2mM_SA_P Parameter: Organism Value: Zea mays
  misc_feature: MA Experiment 108515 PARAMETER Experiment Name: Zm_2mM_SA_P Parameter: Plant Line Value: 35A19
  misc_feature: MA Experiment 108515 PARAMETER Experiment Name: Zm_2mM_SA_P Parameter: Timepoint (hr) Value: 12
  misc_feature: MA Experiment 108515 PARAMETER Experiment Name: Zm_2mM_SA_P Parameter: Tissue Value: Aerial
  misc_feature: MA Experiment 108515 PARAMETER Experiment Name: Zm_2mM_SA_P Parameter: Treatment Value: 2mM SA vs. No Treatment
  misc_feature: MA Experiment ID: 108522 Result: Up-regulated in Transcription
  misc_feature: MA Experiment 108522 PARAMETER Experiment Name: Zm_42deg_Heat_P Parameter: Age (day) Value: 8
  misc_feature: MA Experiment 108522 PARAMETER Experiment Name: Zm_42deg_Heat_P Parameter: Organism Value: Zea mays
  misc_feature: MA Experiment 108522 PARAMETER Experiment Name: Zm_42deg_Heat_P Parameter: Plant Line Value: 35A19
  misc_feature: MA Experiment 108522 PARAMETER Experiment Name: Zm_42deg_Heat_P Parameter: Temperature (deg C) Value: 42 vs. 22
  misc_feature: MA Experiment 108522 PARAMETER Experiment Name: Zm_42deg_Heat_P Parameter: Timepoint (hr) Value: 1
  misc_feature: MA Experiment 108522 PARAMETER Experiment Name: Zm_42deg_Heat_P Parameter: Tissue Value: Aerial
  misc_feature: MA Experiment ID: 108523 Result: Up-regulated in Transcription
  misc_feature: MA Experiment 108523 PARAMETER Experiment Name: Zm_42deg_Heat_P Parameter: Age (day) Value: 8
  misc_feature: MA Experiment 108523 PARAMETER Experiment Name: Zm_42deg_Heat_P Parameter: Organism Value: Zea mays
  misc_feature: MA Experiment 108523 PARAMETER Experiment Name: Zm_42deg_Heat_P Parameter: Plant Line Value: 35A19
  misc_feature: MA Experiment 108523 PARAMETER Experiment Name: Zm_42deg_Heat_P Parameter: Temperature (deg C) Value: 42 vs. 22
  misc_feature: MA Experiment 108523 PARAMETER Experiment Name: Zm_42deg_Heat_P Parameter: Timepoint (hr) Value: 6
  misc_feature: MA Experiment 108523 PARAMETER Experiment Name: Zm_42deg_Heat_P Parameter: Tissue Value: Aerial
  misc_feature: MA Experiment ID: 108526 Result: Up-regulated in Transcription
  misc_feature: MA Experiment 108526 PARAMETER Experiment Name: Zm_5mM_NO_P Parameter: Age (day) Value: 8
  misc_feature: MA Experiment 108526 PARAMETER Experiment Name: Zm_5mM_NO_P Parameter: Organism Value: Zea mays
  misc_feature: MA Experiment 108526 PARAMETER Experiment Name: Zm_5mM_NO_P Parameter: Plant Line Value: 35A19
  misc_feature: MA Experiment 108526 PARAMETER Experiment Name: Zm_5mM_NO_P Parameter: Timepoint (hr) Value: 1
  misc_feature: MA Experiment 108526 PARAMETER Experiment Name: Zm_5mM_NO_P Parameter: Tissue Value: Aerial
  misc_feature: MA Experiment 108526 PARAMETER Experiment Name: Zm_5mM_NO_P Parameter: Treatment Value: 5mM NO vs. No Treatment
  misc_feature: MA Experiment ID: 108527 Result: Up-regulated in Transcription
  misc_feature: MA Experiment 108527 PARAMETER Experiment Name: Zm_5mM_NO_P Parameter: Age (day) Value: 8
  misc_feature: MA Experiment 108527 PARAMETER Experiment Name: Zm_5mM_NO_P Parameter: Organism Value: Zea mays
  misc_feature: MA Experiment 108527 PARAMETER Experiment Name: Zm_5mM_NO_P Parameter: Plant Line Value: 35A19
  misc_feature: MA Experiment 108527 PARAMETER Experiment Name: Zm_5mM_NO_P Parameter: Timepoint (hr) Value: 6
  misc_feature: MA Experiment 108527 PARAMETER Experiment Name: Zm_5mM_NO_P Parameter: Tissue Value: Aerial
  misc_feature: MA Experiment 108527 PARAMETER Experiment Name: Zm_5mM_NO_P Parameter: Treatment Value: 5mM NO vs. No Treatment
  misc_feature: MA Experiment ID: 108528 Result: Down-regulated in Transcription
  misc_feature: MA Experiment 108528 PARAMETER Experiment Name: Zm_Imbibed_Seeds_P Parameter: Age (day) Value: 5 vs. 2
  misc_feature: MA Experiment 108528 PARAMETER Experiment Name: Zm_Imbibed_Seeds_P Parameter: Organism Value: Zea mays
  misc_feature: MA Experiment 108528 PARAMETER Experiment Name: Zm_Imbibed_Seeds_P Parameter: Plant Line Value: 35A19
  misc_feature: MA Experiment 108528 PARAMETER Experiment Name: Zm_Imbibed_Seeds_P Parameter: Tissue Value: Aerial vs. Embryo
  misc_feature: MA Experiment ID: 108530 Result: Down-regulated in Transcription
  misc_feature: MA Experiment 108530 PARAMETER Experiment Name: Zm_Imbibed_Seeds_P Parameter: Age (day) Value: 6 vs. 2
  misc_feature: MA Experiment 108530 PARAMETER Experiment Name: Zm_Imbibed_Seeds_P Parameter: Organism Value: Zea mays
  misc_feature: MA Experiment 108530 PARAMETER Experiment Name: Zm_Imbibed_Seeds_P Parameter: Plant Line Value: 35A19
  misc_feature: MA Experiment 108530 PARAMETER Experiment Name: Zm_Imbibed_Seeds_P Parameter: Tissue Value: Aerial vs. Embryo
  misc_feature: MA Experiment ID: 108536 Result: Up-regulated in Transcription
  misc_feature: MA Experiment 108536 PARAMETER Experiment Name: Zm_Meristem_P Parameter: Age (day) Value: 8
  misc_feature: MA Experiment 108536 PARAMETER Experiment Name: Zm_Meristem_P Parameter: Organism Value: Zea mays
  misc_feature: MA Experiment 108536 PARAMETER Experiment Name: Zm_Meristem_P Parameter: Plant Line Value: 35A19
  misc_feature: MA Experiment 108536 PARAMETER Experiment Name: Zm_Meristem_P Parameter: Tissue Value: Shoot Meristem vs. Above Shoot Meristem
  misc_feature: MA Experiment ID: 108542 Result: Up-regulated in Transcription
  misc_feature: MA Experiment 108542 PARAMETER Experiment Name: Zm_150mM_NaCl_P Parameter: Age (day) Value: 8
  misc_feature: MA Experiment 108542 PARAMETER Experiment Name: Zm_150mM_NaCl_P Parameter: Organism Value: Zea mays
  misc_feature: MA Experiment 108542 PARAMETER Experiment Name: Zm_150mM_NaCl_P Parameter: Plant Line Value: 35A19
  misc_feature: MA Experiment 108542 PARAMETER Experiment Name: Zm_150mM_NaCl_P Parameter: Timepoint (hr) Value: 6
  misc_feature: MA Experiment 108542 PARAMETER Experiment Name: Zm_150mM_NaCl_P Parameter: Tissue Value: Aerial
  misc_feature: MA Experiment 108542 PARAMETER Experiment Name: Zm_150mM_NaCl_P Parameter: Treatment Value: 150mM NaCl vs. No Treatment
  misc_feature: MA Experiment ID: 108543 Result: Down-regulated in Transcription
  misc_feature: MA Experiment ID: 108545 Result: Down-regulated in Transcription
  misc_feature: MA Experiment 108545 PARAMETER Experiment Name: Zm_Imbibed_Seeds_P Parameter: Age (day) Value: 3 vs. 2
  misc_feature: MA Experiment 108545 PARAMETER Experiment Name: Zm_Imbibed_Seeds_P Parameter: Organism Value: Zea mays
  misc_feature: MA Experiment 108545 PARAMETER Experiment Name: Zm_Imbibed_Seeds_P Parameter: Plant Line Value: 35A19
  misc_feature: MA Experiment 108545 PARAMETER Experiment Name: Zm_Imbibed_Seeds_P Parameter: Tissue Value: Aerial vs. Embryo
  misc_feature: MA Experiment ID: 108556 Result: Up-regulated in Transcription
  misc_feature: MA Experiment 108556 PARAMETER Experiment Name: Zm_Drought_P Parameter: Age (day) Value: 9
  misc_feature: MA Experiment 108556 PARAMETER Experiment Name: Zm_Drought_P Parameter: Organism Value: Zea mays
  misc_feature: MA Experiment 108556 PARAMETER Experiment Name: Zm_Drought_P Parameter: Plant Line Value: 35A19
  misc_feature: MA Experiment 108556 PARAMETER Experiment Name: Zm_Drought_P Parameter: Timepoint (hr) Value: 24
  misc_feature: MA Experiment 108556 PARAMETER Experiment Name: Zm_Drought_P Parameter: Tissue Value: Aerial
  misc_feature: MA Experiment 108556 PARAMETER Experiment Name: Zm_Drought_P Parameter: Treatment Value: Drought vs. No Drought
  misc_feature: MA Experiment ID: 108559 Result: Up-regulated in Transcription
  misc_feature: MA Experiment 108559 PARAMETER Experiment Name: Zm_5mM_NO_P Parameter: Age (day) Value: 8
  misc_feature: MA Experiment 108559 PARAMETER Experiment Name: Zm_5mM_NO_P Parameter: Organism Value: Zea mays
  misc_feature: MA Experiment 108559 PARAMETER Experiment Name: Zm_5mM_NO_P Parameter: Plant Line Value: 35A19
  misc_feature: MA Experiment 108559 PARAMETER Experiment Name: Zm_5mM_NO_P Parameter: Timepoint (hr) Value: 12
  misc_feature: MA Experiment 108559 PARAMETER Experiment Name: Zm_5mM_NO_P Parameter: Tissue Value: Aerial
  misc_feature: MA Experiment 108559 PARAMETER Experiment Name: Zm_5mM_NO_P Parameter: Treatment Value: 5mM NO vs. No Treatment
  misc_feature: MA Experiment ID: 20000477 Result: Up-regulated in Transcription
  misc_feature: MA Experiment 20000477 PARAMETER Experiment Name: Zm_5mM_SA_P Parameter: Age (day) Value: 10
  misc_feature: MA Experiment 20000477 PARAMETER Experiment Name: Zm_5mM_SA_P Parameter: Organism Value: Zea mays
  misc_feature: MA Experiment 20000477 PARAMETER Experiment Name: Zm_5mM_SA_P Parameter: Plant Line Value: 35A19
  misc_feature: MA Experiment 20000477 PARAMETER Experiment Name: Zm_5mM_SA_P Parameter: Timepoint (hr) Value: 48
  misc_feature: MA Experiment 20000477 PARAMETER Experiment Name: Zm_5mM_SA_P Parameter: Tissue Value: Aerial
  misc_feature: MA Experiment 20000477 PARAMETER Experiment Name: Zm_5mM_SA_P Parameter: Treatment Value: 5mM SA vs. No Treatment
  misc_feature: MA Experiment ID: 20000478 Result: Up-regulated in Transcription
  misc_feature: MA Experiment 20000478 PARAMETER Experiment Name: Zm_5mM_SA_P Parameter: Age (day) Value: 11
  misc_feature: MA Experiment 20000478 PARAMETER Experiment Name: Zm_5mM_SA_P Parameter: Organism Value: Zea mays
  misc_feature: MA Experiment 20000478 PARAMETER Experiment Name: Zm_5mM_SA_P Parameter: Plant Line Value: 35A19
  misc_feature: MA Experiment 20000478 PARAMETER Experiment Name: Zm_5mM_SA_P Parameter: Timepoint (hr) Value: 72
  misc_feature: MA Experiment 20000478 PARAMETER Experiment Name: Zm_5mM_SA_P Parameter: Tissue Value: Aerial
  misc_feature: MA Experiment 20000478 PARAMETER Experiment Name: Zm_5mM_SA_P Parameter: Treatment Value: 5mM SA vs. No Treatment
  misc_feature: MA Experiment ID: 20000480 Result: Up-regulated in Transcription
  misc_feature: MA Experiment 20000480 PARAMETER Experiment Name: Zm_Drought_P Parameter: Age (day) Value: 11
  misc_feature: MA Experiment 20000480 PARAMETER Experiment Name: Zm_Drought_P Parameter: Organism Value: Zea mays
  misc_feature: MA Experiment 20000480 PARAMETER Experiment Name: Zm_Drought_P Parameter: Plant Line Value: 35A19
  misc_feature: MA Experiment 20000480 PARAMETER Experiment Name: Zm_Drought_P Parameter: Timepoint (hr) Value: 72
  misc_feature: MA Experiment 20000480 PARAMETER Experiment Name: Zm_Drought_P Parameter: Tissue Value: Aerial
  misc_feature: MA Experiment 20000480 PARAMETER Experiment Name: Zm_Drought_P Parameter: Treatment Value: Drought vs. No Drought
  misc_feature: MA Experiment ID: 20000492 Result: Up-regulated in Transcription
  misc_feature: MA Experiment 20000492 PARAMETER Experiment Name: Zm_Hybrid_Seed_Dev_P Parameter: DAP Value: 12
  misc_feature: MA Experiment 20000492 PARAMETER Experiment Name: Zm_Hybrid_Seed_Dev_P Parameter: Organism Value: Zea mays
  misc_feature: MA Experiment 20000492 PARAMETER Experiment Name: Zm_Hybrid_Seed_Dev_P Parameter: Plant Line Value: 35A19
  misc_feature: MA Experiment 20000492 PARAMETER Experiment Name: Zm_Hybrid_Seed_Dev_P Parameter: Tissue Value: Fert Kernel vs. Unfert Floret
  misc_feature: MA Experiment ID: 20000532 Result: Up-regulated in Transcription
  misc_feature: MA Experiment 20000532 PARAMETER Experiment Name: Zm_0.001percent_MeJA_P Parameter: Age (day) Value: 10
  misc_feature: MA Experiment 20000532 PARAMETER Experiment Name: Zm_0.001percent_MeJA_P Parameter: Organism Value: Zea mays
  misc_feature: MA Experiment 20000532 PARAMETER Experiment Name: Zm_0.001percent_MeJA_P Parameter: Plant Line Value: 35A19
  misc_feature: MA Experiment 20000532 PARAMETER Experiment Name: Zm_0.001percent_MeJA_P Parameter: Timepoint (hr) Value: 48
  misc_feature: MA Experiment 20000532 PARAMETER Experiment Name: Zm_0.001percent_MeJA_P Parameter: Tissue Value: Aerial
  misc_feature: MA Experiment 20000532 PARAMETER Experiment Name: Zm_0.001percent_MeJA_P Parameter: Treatment Value: 0.001percent MeJA vs. No Treatment
  misc_feature: MA Experiment ID: 20000533 Result: Up-regulated in Transcription
  misc_feature: MA Experiment 20000533 PARAMETER Experiment Name: Zm_0.001percent_MeJA_P Parameter: Age (day) Value: 11
  misc_feature: MA Experiment 20000533 PARAMETER Experiment Name: Zm_0.001percent_MeJA_P Parameter: Organism Value: Zea mays
  misc_feature: MA Experiment 20000533 PARAMETER Experiment Name: Zm_0.001percent_MeJA_P Parameter: Plant Line Value: 35A19
  misc_feature: MA Experiment 20000533 PARAMETER Experiment Name: Zm_0.001percent_MeJA_P Parameter: Timepoint (hr) Value: 72
  misc_feature: MA Experiment 20000533 PARAMETER Experiment Name: Zm_0.001percent_MeJA_P Parameter: Tissue Value: Aerial
  misc_feature: MA Experiment 20000533 PARAMETER Experiment Name: Zm_0.001percent_MeJA_P Parameter: Treatment Value: 0.001percent MeJA vs. No Treatment
  misc_feature: MA Experiment ID: 20000626 Result: Up-regulated in Transcription
  misc_feature: MA Experiment 20000626 PARAMETER Experiment Name: Zm_Herbicide-Treatments_P Parameter: Timepoint (hr) Value: 12
  misc_feature: MA Experiment 20000626 PARAMETER Experiment Name: Zm_Herbicide-Treatments_P Parameter: Tissue Value: Aerial
  misc_feature: MA Experiment 20000626 PARAMETER Experiment Name: Zm_Herbicide-Treatments_P Parameter: Treatment Value: Roundup vs. No Treatment
  misc_feature: MA Experiment ID: 20001612 Result: Up-regulated in Transcription
  misc_feature: MA Experiment 20001612 PARAMETER Experiment Name: Zm_50ppm_KNO3_L-to-H_P Parameter: Age (day) Value: 19
  misc_feature: MA Experiment 20001612 PARAMETER Experiment Name: Zm_50ppm_KNO3_L-to-H_P Parameter: Organism Value: Zea mays
  misc_feature: MA Experiment 20001612 PARAMETER Experiment Name: Zm_50ppm_KNO3_L-to-H_P Parameter: Plant Line Value: 35A19
  misc_feature: MA Experiment 20001612 PARAMETER Experiment Name: Zm_50ppm_KNO3_L-to-H_P Parameter: Timepoint (hr) Value: 8
  misc_feature: MA Experiment 20001612 PARAMETER Experiment Name: Zm_50ppm_KNO3_L-to-H_P Parameter: Tissue Value: Roots
  misc_feature: MA Experiment 20001612 PARAMETER Experiment Name: Zm_50ppm_KNO3_L-to-H_P Parameter: Treatment Value: 50ppm KNO3 vs. 50ppm KCl
accacgggcagctcagctcagcaagccgcacaagccccaaacagaaagagactcacccaccgcgccacgcaacagcccatctccgctctgctctctcgcccaccccgattcccccccatggctatggcgacgacggaggccaccacgctgacggtgctgctcaaggaggcggcggccgccttcccgacccgccgcgcagttgccgtaccgggcaggctggagctcacgcacgccgccctcgacgctctcgtcgacgcggcggccgcacgactcgccgccgacgccggagttctcccgggccacgtcgtcgcgctctccttccccaacaccgtcgagctggtgatcatgttcctggcggtaatccgcgcgcgcggcgtggcggcgccgctcaacccggcctacacgcaggaggagttcgagttctacctctccgactcggaggcgcgcctcctcgtcaccaacgcggagggcaacgcggcagcgcaggctgccgctgccaagctcgggctcgcccacgccaccgccagcctccacgacgcggccggccctgtccacctcgccggcctcccggtccatgctccggagaacgggtcccacggcggcggcgcggcgggctctctctcccccaacgacccgtcggacgtggccctgttcctgcacacctccggcacgacgagccggcccaagggcgtgccgctgaagcagcgcaacctggcggcgtcggtgcggaacatccggtccgtgtaccgcctcgccgagacggacgccacggtggtggtgctgccgctgttccacgtgcacgggctcctctgcgccctgctgagctcgctggcttcgggcgcgtccgtggcgctgccggcggcggggcggttctcggcgtccacgttctgggccgacatgcgggcgtcgggcgccacctggtacacggcggtgccgacgatccaccagatcatcctggaccggcacgcgtcgcggccggaggcgtacccggcgctccgattcatccgcagctgcagcgcgtcgctggcgccggcgatcctggagcggctggaggcggcgttcagcgcgccggtgctggaggcgtacgcgatgacggaggcgtcgcacctgatgacgtcaaacccgctgccggaggacgggccacggaagcccgggtcagtggggcgcgcggtggggcaggagctggcggtgctggacgaggaggggcggctcgtggcggcggggagccccggggaggtgtgcgtccgcggggacaacgtgacggcgggttacaaggggaacccagaggcgaacgaggcggcgttccggttcgggtggttccacacgggggacatcggcgtggtggacgaccaagggtatgtccggctggtggggcgcatcaaggagctcatcaaccgcggcggggagaagatctccccgatcgaggtggacgccgtgctgctaggcctccccggtgtggcgcaggcggtgtcgttcggggtgcctgacgacaagtacggggaggagatcaactgcgcggtgatcccgcgggacgggtcggcgctgcgggaggaggaggtgctggcgcactgccgacggaacctggcgtccttcaaggtgcccaagaaggtgttcatcacggacgacctgcccaagacggccaccggaaagatccagcgccgcatcgtggcgcagcacttcgtgcagccgaccagtgcctgatcgttgatcctggtgcttgccaagtcatgggtcgacggattggaatttcgctacactagctagcattttgccgttgttcccgcattgcgttgcgaggtggacatggcctgactgaacctgaataaacaaacacatgcatcgtctctc

SEQ ID NO: 20265 - protein, 566 aa, Zea mays subsp. mays
  peptide (1)..(566): Ceres Seq. ID no. 12418209
  misc_feature (76)..(491): Pfam Name: AMP-binding enzyme Pfam Description: AMP-binding enzyme
  misc_feature (66)..(553): Homolog of NCBI NO: 22958261 NR Description: hypothetical protein [Rhodobacter sphaeroides]
  misc_feature (113)..(558): Homolog of NCBI NO: 22974227 NR Description: hypothetical protein [Chloroflexus aurantiacus]
  misc_feature (54)..(558): Homolog of NCBI NO: 23129649 NR Description: hypothetical protein [Nostoc punctiforme]
  misc_feature (54)..(563): Homolog of NCBI NO: 40741124 NR Description: hypothetical protein AN4397.2 [Aspergillus
  misc_feature (45)..(553): Homolog of NCBI NO: 13475813 NR Description: similar to coenzyme a synthetase [Mesorhizobium
  misc_feature (48)..(566): Homolog of NCBI NO: 19076049 NR Description: putative coenzyme a synthetase
  misc_feature (66)..(565): Homolog of NCBI NO: 28950137 NR Description: probable fatty acid transporter FAT2 [Neurospora
  misc_feature (46)..(565): Homolog of NCBI NO: 16797908 NR Description: putative acyl-CoA synthetase [Capsicum annuum]
  misc_feature (46)..(562): Homolog of NCBI NO: 21593705 NR Description: 4-coumarate-CoA ligase-like protein [Arabidopsis
  misc_feature (46)..(562): Homolog of NCBI NO: 15229062 NR Description: 4-coumarate-CoA ligase -like protein
TTGSSAQQAAQAPNRKRLTHRATQQPISALLSRPPRFPPMAMATTEATTLTVLLKEAAAAFPTRRAVAVPGRLELTHAALDALVDAAAARLAADAGVLPGHVVALSFPNTVELVIMFLAVIRARGVAAPLNPAYTQEEFEFYLSDSEARLLVTNAEGNAAAQAAAAKLGLAHATASLHDAAGPVHLAGLPVHAPENGSHGGGAAGSLSPNDPSDVALFLHTSGTTSRPKGVPLKQRNLAASVRNIRSVYRLAETDATVVVLPLFHVHGLLCALLSSLASGASVALPAAGRFSASTFWADMRASGATWYTAVPTIHQIILDRHASRPEAYPALRFIRSCSASLAPAILERLEAAFSAPVLEAYAMTEASHLMTSNPLPEDGPRKPGSVGRAVGQELAVLDEEGRLVAAGSPGEVCVRGDNVTAGYKGNPEANEAAFRFGWFHTGDIGVVDDQGYVRLVGRIKELINRGGEKISPIEVDAVLLGLPGVAQAVSFGVPDDKYGEEINCAVIPRDGSALREEEVLAHCRRNLASFKVPKKVFITDDLPKTATGKIQRRIVAQHFVQPTSA

SEQ ID NO: 20266 - protein, 527 aa, Zea mays subsp. mays
  peptide (1)..(527): Ceres Seq. ID no. 12418210
  misc_feature (37)..(452): Pfam Name: AMP-binding enzyme Pfam Description: AMP-binding enzyme
  misc_feature (27)..(514): Homolog of NCBI NO: 22958261 NR Description: hypothetical protein [Rhodobacter sphaeroides]
  misc_feature (74)..(519): Homolog of NCBI NO: 22974227 NR Description: hypothetical protein [Chloroflexus aurantiacus]
  misc_feature (15)..(519): Homolog of NCBI NO: 23129649 NR Description: hypothetical protein [Nostoc punctiforme]
  misc_feature (15)..(524): Homolog of NCBI NO: 40741124 NR Description: hypothetical protein AN4397.2 [Aspergillus
  misc_feature (6)..(514): Homolog of NCBI NO: 13475813 NR Description: similar to coenzyme a synthetase [Mesorhizobium
  misc_feature (9)..(527): Homolog of NCBI NO: 19076049 NR Description: putative coenzyme a synthetase
  misc_feature (27)..(526): Homolog of NCBI NO: 28950137 NR Description: probable fatty acid transporter FAT2 [Neurospora
  misc_feature (7)..(526): Homolog of NCBI NO: 16797908 NR Description: putative acyl-CoA synthetase [Capsicum annuum]
  misc_feature (7)..(523): Homolog of NCBI NO: 21593705 NR Description: 4-coumarate-CoA ligase-like protein [Arabidopsis
  misc_feature (7)..(523): Homolog of NCBI NO: 15229062 NR Description: 4-coumarate-CoA ligase -like protein
MAMATTEATTLTVLLKEAAAAFPTRRAVAVPGRLELTHAALDALVDAAAARLAADAGVLPGHVVALSFPNTVELVIMFLAVIRARGVAAPLNPAYTQEEFEFYLSDSEARLLVTNAEGNAAAQAAAAKLGLAHATASLHDAAGPVHLAGLPVHAPENGSHGGGAAGSLSPNDPSDVALFLHTSGTTSRPKGVPLKQRNLAASVRNIRSVYRLAETDATVVVLPLFHVHGLLCALLSSLASGASVALPAAGRFSASTFWADMRASGATWYTAVPTIHQIILDRHASRPEAYPALRFIRSCSASLAPAILERLEAAFSAPVLEAYAMTEASHLMTSNPLPEDGPRKPGSVGRAVGQELAVLDEEGRLVAAGSPGEVCVRGDNVTAGYKGNPEANEAAFRFGWFHTGDIGVVDDQGYVRLVGRIKELINRGGEKISPIEVDAVLLGLPGVAQAVSFGVPDDKYGEEINCAVIPRDGSALREEEVLAHCRRNLASFKVPKKVFITDDLPKTATGKIQRRIVAQHFVQPTSA

SEQ ID NO: 20267 - protein, 525 aa, Zea mays subsp. mays
  peptide (1)..(525): Ceres Seq. ID no. 12418211
  misc_feature (35)..(450): Pfam Name: AMP-binding enzyme Pfam Description: AMP-binding enzyme
  misc_feature (25)..(512): Homolog of NCBI NO: 22958261 NR Description: hypothetical protein [Rhodobacter sphaeroides]
  misc_feature (72)..(517): Homolog of NCBI NO: 22974227 NR Description: hypothetical protein [Chloroflexus aurantiacus]
  misc_feature (13)..(517): Homolog of NCBI NO: 23129649 NR Description: hypothetical protein [Nostoc punctiforme]
  misc_feature (13)..(522): Homolog of NCBI NO: 40741124 NR Description: hypothetical protein AN4397.2 [Aspergillus
  misc_feature (4)..(512): Homolog of NCBI NO: 13475813 NR Description: similar to coenzyme a synthetase [Mesorhizobium
  misc_feature (7)..(525): Homolog of NCBI NO: 19076049 NR Description: putative coenzyme a synthetase
  misc_feature (25)..(524): Homolog of NCBI NO: 28950137 NR Description: probable fatty acid transporter FAT2 [Neurospora
  misc_feature (5)..(524): Homolog of NCBI NO: 16797908 NR Description: putative acyl-CoA synthetase [Capsicum annuum]
  misc_feature (5)..(521): Homolog of NCBI NO: 21593705 NR Description: 4-coumarate-CoA ligase-like protein [Arabidopsis
  misc_feature (5)..(521): Homolog of NCBI NO: 15229062 NR Description: 4-coumarate-CoA ligase -like protein
MATTEATTLTVLLKEAAAAFPTRRAVAVPGRLELTHAALDALVDAAAARLAADAGVLPGHVVALSFPNTVELVIMFLAVIRARGVAAPLNPAYTQEEFEFYLSDSEARLLVTNAEGNAAAQAAAAKLGLAHATASLHDAAGPVHLAGLPVHAPENGSHGGGAAGSLSPNDPSDVALFLHTSGTTSRPKGVPLKQRNLAASVRNIRSVYRLAETDATVVVLPLFHVHGLLCALLSSLASGASVALPAAGRFSASTFWADMRASGATWYTAVPTIHQIILDRHASRPEAYPALRFIRSCSASLAPAILERLEAAFSAPVLEAYAMTEASHLMTSNPLPEDGPRKPGSVGRAVGQELAVLDEEGRLVAAGSPGEVCVRGDNVTAGYKGNPEANEAAFRFGWFHTGDIGVVDDQGYVRLVGRIKELINRGGEKISPIEVDAVLLGLPGVAQAVSFGVPDDKYGEEINCAVIPRDGSALREEEVLAHCRRNLASFKVPKKVFITDDLPKTATGKIQRRIVAQHFVQPTSA

SEQ ID NO: 20268 - DNA, 1406 bp, Zea mays subsp. mays; identical to SEQ ID NO: 3054
  misc_feature (1)..(1406): Ceres Seq. ID no. 13498652
  misc_feature: MA Experiment ID: 108522 Result: Down-regulated in Transcription
  misc_feature: MA Experiment 108522 PARAMETER Experiment Name: Zm_42deg_Heat_P Parameter: Age (day) Value: 8
  misc_feature: MA Experiment 108522 PARAMETER Experiment Name: Zm_42deg_Heat_P Parameter: Organism Value: Zea mays
  misc_feature: MA Experiment 108522 PARAMETER Experiment Name: Zm_42deg_Heat_P Parameter: Plant Line Value: 35A19
  misc_feature: MA Experiment 108522 PARAMETER Experiment Name: Zm_42deg_Heat_P Parameter: Temperature (deg C) Value: 42 vs. 22
  misc_feature: MA Experiment 108522 PARAMETER Experiment Name: Zm_42deg_Heat_P Parameter: Timepoint (hr) Value: 1
  misc_feature: MA Experiment 108522 PARAMETER Experiment Name: Zm_42deg_Heat_P Parameter: Tissue Value: Aerial
  misc_feature: MA Experiment ID: 108527 Result: Up-regulated in Transcription
  misc_feature: MA Experiment 108527 PARAMETER Experiment Name: Zm_5mM_NO_P Parameter: Age (day) Value: 8
  misc_feature: MA Experiment 108527 PARAMETER Experiment Name: Zm_5mM_NO_P Parameter: Organism Value: Zea mays
  misc_feature: MA Experiment 108527 PARAMETER Experiment Name: Zm_5mM_NO_P Parameter: Plant Line Value: 35A19
  misc_feature: MA Experiment 108527 PARAMETER Experiment Name: Zm_5mM_NO_P Parameter: Timepoint (hr) Value: 6
  misc_feature: MA Experiment 108527 PARAMETER Experiment Name: Zm_5mM_NO_P Parameter: Tissue Value: Aerial
  misc_feature: MA Experiment 108527 PARAMETER Experiment Name: Zm_5mM_NO_P Parameter: Treatment Value: 5mM NO vs. No Treatment
  misc_feature: MA Experiment ID: 108535 Result: Down-regulated in Transcription
  misc_feature: MA Experiment 108535 PARAMETER Experiment Name: Zm_Meristem_P Parameter: Age (day) Value: 8
  misc_feature: MA Experiment 108535 PARAMETER Experiment Name: Zm_Meristem_P Parameter: Organism Value: Zea mays
  misc_feature: MA Experiment 108535 PARAMETER Experiment Name: Zm_Meristem_P Parameter: Plant Line Value: 35A19
  misc_feature: MA Experiment 108535 PARAMETER Experiment Name: Zm_Meristem_P Parameter: Tissue Value: Root Meristem vs. Above Root Meristem
  misc_feature: MA Experiment ID: 108543 Result: Up-regulated in Transcription
  misc_feature: MA Experiment ID: 108545 Result: Down-regulated in Transcription
  misc_feature: MA Experiment 108545 PARAMETER Experiment Name: Zm_Imbibed_Seeds_P Parameter: Age (day) Value: 3 vs. 2
  misc_feature: MA Experiment 108545 PARAMETER Experiment Name: Zm_Imbibed_Seeds_P Parameter: Organism Value: Zea mays
  misc_feature: MA Experiment 108545 PARAMETER Experiment Name: Zm_Imbibed_Seeds_P Parameter: Plant Line Value: 35A19
  misc_feature: MA Experiment 108545 PARAMETER Experiment Name: Zm_Imbibed_Seeds_P Parameter: Tissue Value: Aerial vs. Embryo
  misc_feature: MA Experiment ID: 108546 Result: Up-regulated in Transcription
  misc_feature: MA Experiment 108546 PARAMETER Experiment Name: Zm_Imbibed_Seeds_P Parameter: Age (day) Value: 3 vs. 2
  misc_feature: MA Experiment 108546 PARAMETER Experiment Name: Zm_Imbibed_Seeds_P Parameter: Organism Value: Zea mays
  misc_feature: MA Experiment 108546 PARAMETER Experiment Name: Zm_Imbibed_Seeds_P Parameter: Plant Line Value: 35A19
  misc_feature: MA Experiment 108546 PARAMETER Experiment Name: Zm_Imbibed_Seeds_P Parameter: Tissue Value: Roots vs. Embryo
  misc_feature: MA Experiment ID: 108547 Result: Down-regulated in Transcription
  misc_feature: MA Experiment 108547 PARAMETER Experiment Name: Zm_Imbibed_Seeds_P Parameter: Age (day) Value: 4 vs. 2
  misc_feature: MA Experiment 108547 PARAMETER Experiment Name: Zm_Imbibed_Seeds_P Parameter: Organism Value: Zea mays
  misc_feature: MA Experiment 108547 PARAMETER Experiment Name: Zm_Imbibed_Seeds_P Parameter: Plant Line Value: 35A19
  misc_feature: MA Experiment 108547 PARAMETER Experiment Name: Zm_Imbibed_Seeds_P Parameter: Tissue Value: Aerial vs. Embryo
  misc_feature: MA Experiment ID: 108597 Result: Down-regulated in Transcription
  misc_feature: MA Experiment 108597 PARAMETER Experiment Name: Zm_100uM_ABA_P Parameter: Age (day) Value: 9
  misc_feature: MA Experiment 108597 PARAMETER Experiment Name: Zm_100uM_ABA_P Parameter: Organism Value: Zea mays
  misc_feature: MA Experiment 108597 PARAMETER Experiment Name: Zm_100uM_ABA_P Parameter: Plant Line Value: 35A19
  misc_feature: MA Experiment 108597 PARAMETER Experiment Name: Zm_100uM_ABA_P Parameter: Timepoint (hr) Value: 24
  misc_feature: MA Experiment 108597 PARAMETER Experiment Name: Zm_100uM_ABA_P Parameter: Tissue Value: Aerial
  misc_feature: MA Experiment 108597 PARAMETER Experiment Name: Zm_100uM_ABA_P Parameter: Treatment Value: 100uM ABA vs. No Treatment
  misc_feature: MA Experiment ID: 108689 Result: Down-regulated in Transcription
  misc_feature: MA Experiment 108689 PARAMETER Experiment Name: Zm_Drought_Roots_P Parameter: Age (day) Value: 9
  misc_feature: MA Experiment 108689 PARAMETER Experiment Name: Zm_Drought_Roots_P Parameter: Organism Value: Zea mays
  misc_feature: MA Experiment 108689 PARAMETER Experiment Name: Zm_Drought_Roots_P Parameter: Plant Line Value: 35A19
  misc_feature: MA Experiment 108689 PARAMETER Experiment Name: Zm_Drought_Roots_P Parameter: Timepoint (hr) Value: 24
  misc_feature: MA Experiment 108689 PARAMETER Experiment Name: Zm_Drought_Roots_P Parameter: Tissue Value: Roots
  misc_feature: MA Experiment 108689 PARAMETER Experiment Name: Zm_Drought_Roots_P Parameter: Treatment Value: Drought vs. No Drought
  misc_feature: MA Experiment ID: 20000477 Result: Down-regulated in Transcription
  misc_feature: MA Experiment 20000477 PARAMETER Experiment Name: Zm_5mM_SA_P Parameter: Age (day) Value: 10
  misc_feature: MA Experiment 20000477 PARAMETER Experiment Name: Zm_5mM_SA_P Parameter: Organism Value: Zea mays
  misc_feature: MA Experiment 20000477 PARAMETER Experiment Name: Zm_5mM_SA_P Parameter: Plant Line Value: 35A19
  misc_feature: MA Experiment 20000477 PARAMETER Experiment Name: Zm_5mM_SA_P Parameter: Timepoint (hr) Value: 48
  misc_feature: MA Experiment 20000477 PARAMETER Experiment Name: Zm_5mM_SA_P Parameter: Tissue Value: Aerial
  misc_feature: MA Experiment 20000477 PARAMETER Experiment Name: Zm_5mM_SA_P Parameter: Treatment Value: 5mM SA vs. No Treatment
  misc_feature: MA Experiment ID: 20000479 Result: Down-regulated in Transcription
  misc_feature: MA Experiment 20000479 PARAMETER Experiment Name: Zm_Drought_P Parameter: Age (day) Value: 10
  misc_feature: MA Experiment 20000479 PARAMETER Experiment Name: Zm_Drought_P Parameter: Organism Value: Zea mays
  misc_feature: MA Experiment 20000479 PARAMETER Experiment Name: Zm_Drought_P Parameter: Plant Line Value: 35A19
  misc_feature: MA Experiment 20000479 PARAMETER Experiment Name: Zm_Drought_P Parameter: Timepoint (hr) Value: 48
  misc_feature: MA Experiment 20000479 PARAMETER Experiment Name: Zm_Drought_P Parameter: Tissue Value: Aerial
  misc_feature: MA Experiment 20000479 PARAMETER Experiment Name: Zm_Drought_P Parameter: Treatment Value: Drought vs. No Drought
  misc_feature: MA Experiment ID: 20000492 Result: Down-regulated in Transcription
  misc_feature: MA Experiment 20000492 PARAMETER Experiment Name: Zm_Hybrid_Seed_Dev_P Parameter: DAP Value: 12
  misc_feature: MA Experiment 20000492 PARAMETER Experiment Name: Zm_Hybrid_Seed_Dev_P Parameter: Organism Value: Zea mays
  misc_feature: MA Experiment 20000492 PARAMETER Experiment Name: Zm_Hybrid_Seed_Dev_P Parameter: Plant Line Value: 35A19
  misc_feature: MA Experiment 20000492 PARAMETER Experiment Name: Zm_Hybrid_Seed_Dev_P Parameter: Tissue Value: Fert Kernel vs. Unfert Floret
  misc_feature: MA Experiment ID: 20000535 Result: Down-regulated in Transcription
  misc_feature: MA Experiment 20000535 PARAMETER Experiment Name: Zm_Hybrid_Seed_Dev_P Parameter: DAP Value: 30 vs. 12
  misc_feature: MA Experiment 20000535 PARAMETER Experiment Name: Zm_Hybrid_Seed_Dev_P Parameter: Organism Value: Zea mays
  misc_feature: MA Experiment 20000535 PARAMETER Experiment Name: Zm_Hybrid_Seed_Dev_P Parameter: Plant Line Value: 35A19
  misc_feature: MA Experiment 20000535 PARAMETER Experiment Name: Zm_Hybrid_Seed_Dev_P Parameter: Tissue Value: Embryo vs. Unfert Floret

SEQ ID NO: 20269 - protein, 418 aa, Zea mays subsp. mays; identical to SEQ ID NO: 3055
  peptide (1)..(418): Ceres Seq. ID no. 13498653
  misc_feature (393)..(418): Homolog of NCBI NO: 30685162 NR Description: leucine-rich repeat extensin family [Arabidopsis
  misc_feature (75)..(416): Homolog of NCBI NO: 30685162 NR Description: leucine-rich repeat extensin family [Arabidopsis
  misc_feature (69)..(416): Homolog of NCBI NO: 15233976 NR Description: leucine-rich repeat extensin family [Arabidopsis
  misc_feature (69)..(416): Homolog of NCBI NO: 15235668 NR Description: leucine-rich repeat extensin family [Arabidopsis
  misc_feature (69)..(416): Homolog of NCBI NO: 15230120 NR Description: leucine-rich repeat extensin family [Arabidopsis
  misc_feature (64)..(416): Homolog of NCBI NO: 15228861 NR Description: leucine-rich repeat extensin family [Arabidopsis
  misc_feature (75)..(416): Homolog of NCBI NO: 34906174 NR Description: putative extensin-like protein
  misc_feature (69)..(416): Homolog of NCBI NO: 34912294 NR Description: putative extensin-like protein
  misc_feature (62)..(408): Homolog of NCBI NO: 37718858 NR Description: putative leucine-rich receptor-like protein
  misc_feature (39)..(354): Homolog of NCBI NO: 34393830 NR Description: extensin-like protein [Oryza sativa (japonica
  misc_feature (393)..(418): Homolog of NCBI NO: 30685162 NR Description: leucine-rich repeat extensin family [Arabidopsis
  misc_feature (75)..(416): Homolog of NCBI NO: 30685162 NR Description: leucine-rich repeat extensin family [Arabidopsis
  misc_feature (69)..(416): Homolog of NCBI NO: 15233976 NR Description: leucine-rich repeat extensin family [Arabidopsis
  misc_feature (69)..(416): Homolog of NCBI NO: 15235668 NR Description: leucine-rich repeat extensin family [Arabidopsis
  misc_feature (69)..(416): Homolog of NCBI NO: 15230120 NR Description: leucine-rich repeat extensin family [Arabidopsis
  misc_feature (64)..(416): Homolog of NCBI NO: 15228861 NR Description: leucine-rich repeat extensin family [Arabidopsis
  misc_feature (75)..(416): Homolog of NCBI NO: 34906174 NR Description: putative extensin-like protein
  misc_feature (69)..(416): Homolog of NCBI NO: 34912294 NR Description: putative extensin-like protein
  misc_feature (62)..(408): Homolog of NCBI NO: 37718858 NR Description: putative leucine-rich receptor-like protein
  misc_feature (39)..(354): Homolog of NCBI NO: 34393830 NR Description: extensin-like protein [Oryza sativa (japonica

SEQ ID NO: 20270 - protein, 379 aa, Zea mays subsp. mays; identical to SEQ ID NO: 3056
  peptide (1)..(379): Ceres Seq. ID no. 13498654
  misc_feature (354)..(379): Homolog of NCBI NO: 30685162 NR Description: leucine-rich repeat extensin family [Arabidopsis
  misc_feature (36)..(377): Homolog of NCBI NO: 30685162 NR Description: leucine-rich repeat extensin family [Arabidopsis
  misc_feature (30)..(377): Homolog of NCBI NO: 15233976 NR Description: leucine-rich repeat extensin family [Arabidopsis
  misc_feature (30)..(377): Homolog of NCBI NO: 15235668 NR Description: leucine-rich repeat extensin family [Arabidopsis
  misc_feature (30)..(377): Homolog of NCBI NO: 15230120 NR Description: leucine-rich repeat extensin family [Arabidopsis
  misc_feature (25)..(377): Homolog of NCBI NO: 15228861 NR Description: leucine-rich repeat extensin family [Arabidopsis
  misc_feature (36)..(377): Homolog of NCBI NO: 34906174 NR Description: putative extensin-like protein
  misc_feature (30)..(377): Homolog of NCBI NO: 34912294 NR Description: putative extensin-like protein
  misc_feature (23)..(369): Homolog of NCBI NO: 37718858 NR Description: putative leucine-rich receptor-like protein
  misc_feature (1)..(315): Homolog of NCBI NO: 34393830 NR Description: extensin-like protein [Oryza sativa (japonica
  misc_feature (354)..(379): Homolog of NCBI NO: 30685162 NR Description: leucine-rich repeat extensin family [Arabidopsis
  misc_feature (36)..(377): Homolog of NCBI NO: 30685162 NR Description: leucine-rich repeat extensin family [Arabidopsis
  misc_feature (30)..(377): Homolog of NCBI NO: 15233976 NR Description: leucine-rich repeat extensin family [Arabidopsis
  misc_feature (30)..(377): Homolog of NCBI NO: 15235668 NR Description: leucine-rich repeat extensin family [Arabidopsis
  misc_feature (30)..(377): Homolog of NCBI NO: 15230120 NR Description: leucine-rich repeat extensin family [Arabidopsis
  misc_feature (25)..(377): Homolog of NCBI NO: 15228861 NR Description: leucine-rich repeat extensin family [Arabidopsis
  misc_feature (36)..(377): Homolog of NCBI NO: 34906174 NR Description: putative extensin-like protein
  misc_feature (30)..(377): Homolog of NCBI NO: 34912294 NR Description: putative extensin-like protein
  misc_feature (23)..(369): Homolog of NCBI NO: 37718858 NR Description: putative leucine-rich receptor-like protein
  misc_feature (1)..(315): Homolog of NCBI NO: 34393830 NR Description: extensin-like protein [Oryza sativa (japonica

SEQ ID NO: 20271 - protein, 376 aa, Zea mays subsp. mays; identical to SEQ ID NO: 3057
  peptide (1)..(376): Ceres Seq. ID no. 13498655
  misc_feature (351)..(376): Homolog of NCBI NO: 30685162 NR Description: leucine-rich repeat extensin family [Arabidopsis
  misc_feature (33)..(374): Homolog of NCBI NO: 30685162 NR Description: leucine-rich repeat extensin family [Arabidopsis
  misc_feature (27)..(374): Homolog of NCBI NO: 15233976 NR Description: leucine-rich repeat extensin family [Arabidopsis
  misc_feature (27)..(374): Homolog of NCBI NO: 15235668 NR Description: leucine-rich repeat extensin family [Arabidopsis
  misc_feature (27)..(374): Homolog of NCBI NO: 15230120 NR Description: leucine-rich repeat extensin family [Arabidopsis
  misc_feature (22)..(374): Homolog of NCBI NO: 15228861 NR Description: leucine-rich repeat extensin family [Arabidopsis
  misc_feature (33)..(374): Homolog of NCBI NO: 34906174 NR Description: putative extensin-like protein
  misc_feature (27)..(374): Homolog of NCBI NO: 34912294 NR Description: putative extensin-like protein
  misc_feature (20)..(366): Homolog of NCBI NO: 37718858 NR Description: putative leucine-rich receptor-like protein
  misc_feature (1)..(312): Homolog of NCBI NO: 34393830 NR Description: extensin-like protein [Oryza sativa (japonica
  misc_feature (351)..(376): Homolog of NCBI NO: 30685162 NR Description: leucine-rich repeat extensin family [Arabidopsis
  misc_feature (33)..(374): Homolog of NCBI NO: 30685162 NR Description: leucine-rich repeat extensin family [Arabidopsis
  misc_feature (27)..(374): Homolog of NCBI NO: 15233976 NR Description: leucine-rich repeat extensin family [Arabidopsis
  misc_feature (27)..(374): Homolog of NCBI NO: 15235668 NR Description: leucine-rich repeat extensin family [Arabidopsis
  misc_feature (27)..(374): Homolog of NCBI NO: 15230120 NR Description: leucine-rich repeat extensin family [Arabidopsis
  misc_feature (22)..(374): Homolog of NCBI NO: 15228861 NR Description: leucine-rich repeat extensin family [Arabidopsis
  misc_feature (33)..(374): Homolog of NCBI NO: 34906174 NR Description: putative extensin-like protein
  misc_feature (27)..(374): Homolog of NCBI NO: 34912294 NR Description: putative extensin-like protein
  misc_feature (20)..(366): Homolog of NCBI NO: 37718858 NR Description: putative leucine-rich receptor-like protein
  misc_feature (1)..(312): Homolog of NCBI NO: 34393830 NR Description: extensin-like protein [Oryza sativa (japonica

SEQ ID NO: 20272 - DNA, 998 bp, Zea mays subsp. mays; identical to SEQ ID NO: 15393
  misc_feature (1)..(998): Ceres Seq. ID no. 13636513
  misc_feature: MA Experiment ID: 108528 Result: Up-regulated in Transcription
  misc_feature: MA Experiment 108528 PARAMETER Experiment Name: Zm_Imbibed_Seeds_P Parameter: Age (day) Value: 5 vs. 2
  misc_feature: MA Experiment 108528 PARAMETER Experiment Name: Zm_Imbibed_Seeds_P Parameter: Organism Value: Zea mays
  misc_feature: MA Experiment 108528 PARAMETER Experiment Name: Zm_Imbibed_Seeds_P Parameter: Plant Line Value: 35A19
  misc_feature: MA Experiment 108528 PARAMETER Experiment Name: Zm_Imbibed_Seeds_P Parameter: Tissue Value: Aerial vs. Embryo
  misc_feature: MA Experiment ID: 108530 Result: Up-regulated in Transcription
  misc_feature: MA Experiment 108530 PARAMETER Experiment Name: Zm_Imbibed_Seeds_P Parameter: Age (day) Value: 6 vs. 2
  misc_feature: MA Experiment 108530 PARAMETER Experiment Name: Zm_Imbibed_Seeds_P Parameter: Organism Value: Zea mays
  misc_feature: MA Experiment 108530 PARAMETER Experiment Name: Zm_Imbibed_Seeds_P Parameter: Plant Line Value: 35A19
  misc_feature: MA Experiment 108530 PARAMETER Experiment Name: Zm_Imbibed_Seeds_P Parameter: Tissue Value: Aerial vs. Embryo
  misc_feature: MA Experiment ID: 108545 Result: Up-regulated in Transcription
  misc_feature: MA Experiment 108545 PARAMETER Experiment Name: Zm_Imbibed_Seeds_P Parameter: Age (day) Value: 3 vs. 2
  misc_feature: MA Experiment 108545 PARAMETER Experiment Name: Zm_Imbibed_Seeds_P Parameter: Organism Value: Zea mays
  misc_feature: MA Experiment 108545 PARAMETER Experiment Name: Zm_Imbibed_Seeds_P Parameter: Plant Line Value: 35A19
  misc_feature: MA Experiment 108545 PARAMETER Experiment Name: Zm_Imbibed_Seeds_P Parameter: Tissue Value: Aerial vs. Embryo
  misc_feature: MA Experiment ID: 108547 Result: Up-regulated in Transcription
  misc_feature: MA Experiment 108547 PARAMETER Experiment Name: Zm_Imbibed_Seeds_P Parameter: Age (day) Value: 4 vs. 2
  misc_feature: MA Experiment 108547 PARAMETER Experiment Name: Zm_Imbibed_Seeds_P Parameter: Organism Value: Zea mays
  misc_feature: MA Experiment 108547 PARAMETER Experiment Name: Zm_Imbibed_Seeds_P Parameter: Plant Line Value: 35A19
  misc_feature: MA Experiment 108547 PARAMETER Experiment Name: Zm_Imbibed_Seeds_P Parameter: Tissue Value: Aerial vs. Embryo
  misc_feature: MA Experiment ID: 108559 Result: Down-regulated in Transcription
  misc_feature: MA Experiment 108559 PARAMETER Experiment Name: Zm_5mM_NO_P Parameter: Age (day) Value: 8
  misc_feature: MA Experiment 108559 PARAMETER Experiment Name: Zm_5mM_NO_P Parameter: Organism Value: Zea mays
  misc_feature: MA Experiment 108559 PARAMETER Experiment Name: Zm_5mM_NO_P Parameter: Plant Line Value: 35A19
  misc_feature: MA Experiment 108559 PARAMETER Experiment Name: Zm_5mM_NO_P Parameter: Timepoint (hr) Value: 12
  misc_feature: MA Experiment 108559 PARAMETER Experiment Name: Zm_5mM_NO_P Parameter: Tissue Value: Aerial
  misc_feature: MA Experiment 108559 PARAMETER Experiment Name: Zm_5mM_NO_P Parameter: Treatment Value: 5mM NO vs. No Treatment
  misc_feature: MA Experiment ID: 108688 Result: Down-regulated in Transcription
  misc_feature: MA Experiment 108688 PARAMETER Experiment Name: Zm_Embryos-Flowers__P Parameter: Tissue Value: Immature Flowers vs. Aerial+

SEQ ID NO: 20273 - protein, 276 aa, Zea mays subsp. mays; identical to SEQ ID NO: 15394
  peptide (1)..(276): Ceres Seq. ID no. 15219366
  misc_feature (75)..(75): Xaa is any aa, unknown or other
  misc_feature (77)..(77): Xaa is any aa, unknown or other
  misc_feature (79)..(79): Xaa is any aa, unknown or other
  misc_feature (80)..(80): Xaa is any aa, unknown or other
  misc_feature (82)..(82): Xaa is any aa, unknown or other
  misc_feature (83)..(83): Xaa is any aa, unknown or other
  misc_feature (95)..(95): Xaa is any aa, unknown or other
  misc_feature (115)..(115): Xaa is any aa, unknown or other
  misc_feature (120)..(120): Xaa is any aa, unknown or other
  misc_feature (122)..(122): Xaa is any aa, unknown or other
  misc_feature (123)..(123): Xaa is any aa, unknown or other
  misc_feature (145)..(145): Xaa is any aa, unknown or other
  misc_feature (149)..(149): Xaa is any aa, unknown or other
  misc_feature (171)..(171): Xaa is any aa, unknown or other
  misc_feature (178)..(178): Xaa is any aa, unknown or other

SEQ ID NO: 20274 - protein, 272 aa, Zea mays subsp. mays; identical to SEQ ID NO: 15395
  peptide (1)..(272): Ceres Seq. ID no. 15219367
  misc_feature (89)..(263): Pfam Name: ATP synthase delta (OSCP) subunit Pfam Description: ATP synthase delta (OSCP) subunit
  misc_feature (23)..(272): Homolog of NCBI NO: 1168587 NR Description: ATP synthase delta chain, chloroplast precursor
  misc_feature (88)..(272): Homolog of NCBI NO: 1084479 NR Description: H+-transporting two-sector ATPase (EC 3.6.3.14)
  misc_feature (23)..(272): Homolog of NCBI NO: 416681 NR Description: ATP synthase delta chain, chloroplast precursor
  misc_feature (23)..(272): Homolog of NCBI NO: 114584 NR Description: ATP synthase delta chain, chloroplast precursor
  misc_feature (23)..(272): Homolog of NCBI NO: 170098 NR Description: ATP synthase delta subunit precursor
  misc_feature (57)..(270): Homolog of NCBI NO: 15233985 NR Description: H+-transporting ATP synthase-related protein
  misc_feature (57)..(270): Homolog of NCBI NO: 18491181 NR Description: putative H+-transporting ATP synthase
  misc_feature (89)..(272): Homolog of NCBI NO: 399082 NR Description: ATP synthase delta chain, chloroplast precursor
  misc_feature (139)..(270): Homolog of NCBI NO: 1480014 NR Description: putative delta subunit of ATP synthase [Brassica
  misc_feature (55)..(262): Homolog of NCBI NO: 5902612 NR Description: ATP synthase-delta chain [Volvox carteri f.
  misc_feature (75)..(75): Xaa is any aa, unknown or other
  misc_feature (77)..(77): Xaa is any aa, unknown or other
  misc_feature (79)..(79): Xaa is any aa, unknown or other
  misc_feature (80)..(80): Xaa is any aa, unknown or other
  misc_feature (82)..(82): Xaa is any aa, unknown or other
  misc_feature (94)..(94): Xaa is any aa, unknown or other
  misc_feature (114)..(114): Xaa is any aa, unknown or other
  misc_feature (120)..(120): Xaa is any aa, unknown or other
  misc_feature (122)..(122): Xaa is any aa, unknown or other
  misc_feature (145)..(145): Xaa is any aa, unknown or other
  misc_feature (149)..(149): Xaa is any aa, unknown or other
  misc_feature (171)..(171): Xaa is any aa, unknown or other
  misc_feature (178)..(178): Xaa is any aa, unknown or other

SEQ ID NO: 20275 - protein, 250 aa, Zea mays subsp. mays; identical to SEQ ID NO: 15396
  peptide (1)..(250): Ceres Seq. ID no. 15219368
  misc_feature (67)..(241): Pfam Name: ATP synthase delta (OSCP) subunit Pfam Description: ATP synthase delta (OSCP) subunit
  misc_feature (1)..(250): Homolog of NCBI NO: 1168587 NR Description: ATP synthase delta chain, chloroplast precursor
  misc_feature (66)..(250): Homolog of NCBI NO: 1084479 NR Description: H+-transporting two-sector ATPase (EC 3.6.3.14)
  misc_feature (1)..(250): Homolog of NCBI NO: 416681 NR Description: ATP synthase delta chain, chloroplast precursor
  misc_feature (1)..(250): Homolog of NCBI NO: 114584 NR Description: ATP synthase delta chain, chloroplast precursor
  misc_feature (1)..(250): Homolog of NCBI NO: 170098 NR Description: ATP synthase delta subunit precursor
  misc_feature (35)..(248): Homolog of NCBI NO: 15233985 NR Description: H+-transporting ATP synthase-related protein
  misc_feature (35)..(248): Homolog of NCBI NO: 18491181 NR Description: putative H+-transporting ATP synthase
  misc_feature (67)..(250): Homolog of NCBI NO: 399082 NR Description: ATP synthase delta chain, chloroplast precursor
  misc_feature (117)..(248): Homolog of NCBI NO: 1480014 NR Description: putative delta subunit of ATP synthase [Brassica
  misc_feature (33)..(240): Homolog of NCBI NO: 5902612 NR Description: ATP synthase-delta chain [Volvox carteri f.
  misc_feature (53)..(53): Xaa is any aa, unknown or other
  misc_feature (55)..(55): Xaa is any aa, unknown or other
  misc_feature (57)..(57): Xaa is any aa, unknown or other
  misc_feature (58)..(58): Xaa is any aa, unknown or other
  misc_feature (60)..(60): Xaa is any aa, unknown or other
  misc_feature (72)..(72): Xaa is any aa, unknown or other
  misc_feature (92)..(92): Xaa is any aa, unknown or other
  misc_feature (98)..(98): Xaa is any aa, unknown or other
  misc_feature (100)..(100): Xaa is any aa, unknown or other
  misc_feature (123)..(123): Xaa is any aa, unknown or other
  misc_feature (127)..(127): Xaa is any aa, unknown or other
  misc_feature (149)..(149): Xaa is any aa, unknown or other
  misc_feature (156)..(156): Xaa is any aa, unknown or other

SEQ ID NO: 20276 - DNA, 889 bp, Zea mays subsp. mays
  misc_feature (1)..(889): Ceres Seq. ID no. 12378077
  misc_feature: MA Experiment ID: 108559 Result: Up-regulated in Transcription
  misc_feature: MA Experiment 108559 PARAMETER Experiment Name: Zm_5mM_NO_P Parameter: Age (day) Value: 8
  misc_feature: MA Experiment 108559 PARAMETER Experiment Name: Zm_5mM_NO_P Parameter: Organism Value: Zea mays
  misc_feature: MA Experiment 108559 PARAMETER Experiment Name: Zm_5mM_NO_P Parameter: Plant Line Value: 35A19
  misc_feature: MA Experiment 108559 PARAMETER Experiment Name: Zm_5mM_NO_P Parameter: Timepoint (hr) Value: 12
  misc_feature: MA Experiment 108559 PARAMETER Experiment Name: Zm_5mM_NO_P Parameter: Tissue Value: Aerial
  misc_feature: MA Experiment 108559 PARAMETER Experiment Name: Zm_5mM_NO_P Parameter: Treatment Value: 5mM NO vs. No Treatment
cccatttctctgacatgtgagccctgtaggagagggccttcactcgtcacatgcgctgacgcgcatcccccccggcgtggcgtgcgctttgatctagctcttcttctcgaatccagcccgaggcctttttcttctgcggtttcatccgtacccatcctgcacacgaagcctagaatagccctcccctgctccgccacctcctcggatcccgaccaccccacccccaccccagacaacaggttgatggaggctaagatgggacgcttcttcgagtccgtgagcaatttcttcaccggaggcgaccacatcccctggtgcgaccgcgacctcatcgccggctgtgaaggagagcttgtcaatgctgcaaatgaggaacagaggaatgaaagccttatgaggttgtcatgggcccttgtgcactccaggcagacagacgatgtaaaccgtggaatcagcatgcttcaagcttctttggataattctgccagtcctctgcagactagggaaaagctgtacttgttggctgttggattctacaggattggcgactactcaaaaagcaggcaacttgcagatcgttgtttggagattcaagcggattggcggcaggccatatcgctgaagaaggcaatagaagataaaattgccaaagatggtctgattggaataggaattgcgacaactgcggtcggacttctggttggtggaattgcagctgctgttgccaggaagaagtgaggtcaatatattggatcggcagctcattgaactaggggagctcccgtctctgtaattccaacttttctgttgttaccttggtgatattacagttgaattgccactctttatatgtacgaagtaatcgtatgataatgataacaccattgtg

SEQ ID NO: 20277 - protein, 245 aa, Zea mays subsp. mays
  peptide (1)..(245): Ceres Seq. ID no. 12378078
  misc_feature (135)..(241): Homolog of NCBI NO: 40889302 NR Description: Chain A, Solution Structure Of Human Mitochondria
  misc_feature (129)..(240): Homolog of NCBI NO: 6322124 NR Description: Involved in mitochondrial division; Fis1p
  misc_feature (135)..(243): Homolog of NCBI NO: 33391189 NR Description: putative mitochondrial fission protein Tbfis1p
  misc_feature (135)..(245): Homolog of NCBI NO: 13384998 NR Description: RIKEN cDNA 2010003O14 [Mus musculus]
  misc_feature (135)..(245): Homolog of NCBI NO: 33112470 NR Description: Tetratricopeptide repeat protein 11 (TPR repeat
  misc_feature (135)..(245): Homolog of NCBI NO: 7705632 NR Description: CGI-135 protein [Homo sapiens]
  misc_feature (135)..(245): Homolog of NCBI NO: 27664028 NR Description: similar to RIKEN cDNA 2010003O14
  misc_feature (82)..(243): Homolog of NCBI NO: 18416852 NR Description: putative protein; protein id: At5g12390.1
  misc_feature (82)..(244): Homolog of NCBI NO: 19386833 NR Description: B1147A04.28 [Oryza sativa (japonica
  misc_feature (82)..(245): Homolog of NCBI NO: 18410639 NR Description: expressed protein
PISLTCEPCRRGPSLVTCADAHPPRRGVRFDLALLLESSPRPFSSAVSSVPILHTKPRIALPCSATSSDPDHPTPTPDNRLMEAKMGRFFESVSNFFTGGDHIPWCDRDLIAGCEGELVNAANEEQRNESLMRLSWALVHSRQTDDVNRGISMLQASLDNSASPLQTREKLYLLAVGFYRIGDYSKSRQLADRCLEIQADWRQAISLKKAIEDKIAKDGLIGIGIATTAVGLLVGGIAAAVARKK

SEQ ID NO: 20278 - protein, 164 aa, Zea mays subsp. mays; identical to SEQ ID NO: 10262
  peptide (1)..(164): Ceres Seq. ID no. 12378079
  misc_feature (54)..(160): Homolog of NCBI NO: 40889302 NR Description: Chain A, Solution Structure Of Human Mitochondria
  misc_feature (48)..(159): Homolog of NCBI NO: 6322124 NR Description: Involved in mitochondrial division; Fis1p
  misc_feature (54)..(162): Homolog of NCBI NO: 33391189 NR Description: putative mitochondrial fission protein Tbfis1p
  misc_feature (54)..(164): Homolog of NCBI NO: 13384998 NR Description: RIKEN cDNA 2010003O14 [Mus musculus]
  misc_feature (54)..(164): Homolog of NCBI NO: 33112470 NR Description: Tetratricopeptide repeat protein 11 (TPR repeat
  misc_feature (54)..(164): Homolog of NCBI NO: 7705632 NR Description: CGI-135 protein [Homo sapiens]
  misc_feature (54)..(164): Homolog of NCBI NO: 27664028 NR Description: similar to RIKEN cDNA 2010003O14
  misc_feature (1)..(162): Homolog of NCBI NO: 18416852 NR Description: putative protein; protein id: At5g12390.1
  misc_feature (1)..(163): Homolog of NCBI NO: 19386833 NR Description: B1147A04.28 [Oryza sativa (japonica
  misc_feature (1)..(164): Homolog of NCBI NO: 18410639 NR Description: expressed protein

SEQ ID NO: 20279 - protein, 160 aa, Zea mays subsp. mays; identical to SEQ ID NO: 10263
  peptide (1)..(160): Ceres Seq. ID no. 12378080
  misc_feature (50)..(156): Homolog of NCBI NO: 40889302 NR Description: Chain A, Solution Structure Of Human Mitochondria
  misc_feature (44)..(155): Homolog of NCBI NO: 6322124 NR Description: Involved in mitochondrial division; Fis1p
  misc_feature (50)..(158): Homolog of NCBI NO: 33391189 NR Description: putative mitochondrial fission protein Tbfis1p
  misc_feature (50)..(160): Homolog of NCBI NO: 13384998 NR Description: RIKEN cDNA 2010003O14 [Mus musculus]
  misc_feature (50)..(160): Homolog of NCBI NO: 33112470 NR Description: Tetratricopeptide repeat protein 11 (TPR repeat
  misc_feature (50)..(160): Homolog of NCBI NO: 7705632 NR Description: CGI-135 protein [Homo sapiens]
  misc_feature (50)..(160): Homolog of NCBI NO: 27664028 NR Description: similar to RIKEN cDNA 2010003O14
  misc_feature (1)..(158): Homolog of NCBI NO: 18416852 NR Description: putative protein; protein id: At5g12390.1
  misc_feature (1)..(159): Homolog of NCBI NO: 19386833 NR Description: B1147A04.28 [Oryza sativa (japonica
  misc_feature (1)..(160): Homolog of NCBI NO: 18410639 NR Description: expressed protein

SEQ ID NO: 20280 - DNA, 1394 bp, Zea mays subsp. mays
  misc_feature (1)..(1394): Ceres Seq. ID no. 12435464
  misc_feature: MA Experiment ID: 108529 Result: Up-regulated in Transcription
  misc_feature: MA Experiment 108529 PARAMETER Experiment Name: Zm_Imbibed_Seeds_P Parameter: Age (day) Value: 5 vs. 2
  misc_feature: MA Experiment 108529 PARAMETER Experiment Name: Zm_Imbibed_Seeds_P Parameter: Organism Value: Zea mays
  misc_feature: MA Experiment 108529 PARAMETER Experiment Name: Zm_Imbibed_Seeds_P Parameter: Plant Line Value: 35A19
  misc_feature: MA Experiment 108529 PARAMETER Experiment Name: Zm_Imbibed_Seeds_P Parameter: Tissue Value: Roots vs. Embryo
  misc_feature: MA Experiment ID: 108544 Result: Up-regulated in Transcription
  misc_feature: MA Experiment ID: 108689 Result: Down-regulated in Transcription
  misc_feature: MA Experiment 108689 PARAMETER Experiment Name: Zm_Drought_Roots_P Parameter: Age (day) Value: 9
  misc_feature: MA Experiment 108689 PARAMETER Experiment Name: Zm_Drought_Roots_P Parameter: Organism Value: Zea mays
  misc_feature: MA Experiment 108689 PARAMETER Experiment Name: Zm_Drought_Roots_P Parameter: Plant Line Value: 35A19
  misc_feature: MA Experiment 108689 PARAMETER Experiment Name: Zm_Drought_Roots_P Parameter: Timepoint (hr) Value: 24
  misc_feature: MA Experiment 108689 PARAMETER Experiment Name: Zm_Drought_Roots_P Parameter: Tissue Value: Roots
  misc_feature: MA Experiment 108689 PARAMETER Experiment Name: Zm_Drought_Roots_P Parameter: Treatment Value: Drought vs. No Drought
ccacccgctaacggcgacgacgactgcttccccagtgggagacctgcaatcctcagccacctgcccctccccctcccccatctccgttcacctcttcccctcttccctaccttcctgtattcgcggcgtcgagtgccgccgcccttcgccggcgccgagcacggagcaacgcaccagtttcagtacctggattcgaactgagagtggattacgaagtcatggcaaggttatgttgcttcggcgccggttgctccgatttcacggggcaagggtcaatagcatccggtaaagggaaaggctgtcaagggcaagtcaagatctgctatggatataaccttgtaagagggatgacgaatcatccaatggaggactatcattttgccgaacttgttgatgtcaaaggaaacgagcttggtctttttgctatttatgatggtcatttaggggataccgttcctatgtatttacagaagaatttatttacaaatattttgaatgaggaagagttttggacacacacagatagagcgattataaaagcgtatgaaaaaacagaccaagctattctgtcacatactccagatctgggacaaggtggctccactgctgtaaccgccattcttgtgaacggcaggaagttatgggtagctaatgttggcgattcaagagctgttcttttgaaaggtggtgagcccatacagatgtcgatagaccatgatccgaatgttgagcggagtgtaatcgaaaataggggtggttttgtttcaaatatgccaggagatgttccccgagtatgtggtcagttggctgtctccagagcttttggagacaggaatctaaaatcactattgagatcagagcctgatataaaaatcgaagacatagatcacactgccgagctacttgttcttgcgagtgacggtctttggaaggtgatgaacaatcaagaggttgtcgatttggccaaaaggtacaaggatccctatgctgctgccaagccaattaaccgtcgaagcacaaaaaagagatagtaaggatgatatatcatgcatcgttgttcggttcaaggcgtaagtcggtctcgaaggattttcatcgagagcaaaaaaacaagtgaattaggctgcctgacgatggtagtgataatctgatggttgaataatgactggggtgttggatgtaaatgatttgtctgctccaatgtaaagttcatatataagtatgctaggattatttggtttggcgatttcaaaggtacaggtgcgagggcccgagagctactaaatagctaccatctgtaaataatggttatattggatgttgaatttgtaagagtagactgagcaaaagacatctggatagttcctaaaagaacaaggtactctttatgttcg

SEQ ID NO: 20281 - protein, 270 aa, Zea mays subsp. mays
  peptide (1)..(270): Ceres Seq. ID no. 12435465
  misc_feature (36)..(269): Pfam Name: Protein phosphatase 2C Pfam Description: Protein phosphatase 2C
  misc_feature (22)..(270): Homolog of NCBI NO: 25411985 NR Description: probable protein phosphatase 2C [imported] -
  misc_feature (23)..(270): Homolog of NCBI NO: 18417190 NR Description: protein phosphatase 2C (PP2C)
  misc_feature (22)..(270): Homolog of NCBI NO: 18399423 NR Description: protein phosphatase 2C (PP2C)
  misc_feature (16)..(269): Homolog of NCBI NO: 4336436 NR Description: protein phosphatase type 2C [Lotus japonicus]
  misc_feature (1)..(269): Homolog of NCBI NO: 15081703 NR Description: At1g78200/T11I11_14 [Arabidopsis thaliana]
  misc_feature (1)..(269): Homolog of NCBI NO: 18411863 NR Description: protein phosphatase 2C (PP2C)
  misc_feature (1)..(186): Homolog of NCBI NO: 32488329 NR Description: OSJNBa0086B14.22 [Oryza sativa (japonica
  misc_feature (1)..(269): Homolog of NCBI NO: 21537096 NR Description: protein phosphatase type 2C, putative
  misc_feature (1)..(269): Homolog of NCBI NO: 18395099 NR Description: protein phosphatase 2C (PP2C), putative
  misc_feature (1)..(269): Homolog of NCBI NO: 15218759 NR Description: protein phosphatase 2C (PP2C)
MARLCCFGAGCSDFTGQGSIASGKGKGCQGQVKICYGYNLVRGMTNHPMEDYHFAELVDVKGNELGLFAIYDGHLGDTVPMYLQKNLFTNILNEEEFWTHTDRAIIKAYEKTDQAILSHTPDLGQGGSTAVTAILVNGRKLWVANVGDSRAVLLKGGEPIQMSIDHDPNVERSVIENRGGFVSNMPGDVPRVCGQLAVSRAFGDRNLKSLLRSEPDIKIEDIDHTAELLVLASDGLWKVMNNQEVVDLAKRYKDPYAAAKPINRRSTKKR

SEQ ID NO: 20282 - protein, 227 aa, Zea mays subsp. mays
  peptide (1)..(227): Ceres Seq. ID no. 12435466
  misc_feature (1)..(226): Pfam Name: Protein phosphatase 2C Pfam Description: Protein phosphatase 2C
  misc_feature (1)..(227): Homolog of NCBI NO: 25411985 NR Description: probable protein phosphatase 2C [imported] -
  misc_feature (1)..(227): Homolog of NCBI NO: 18417190 NR Description: protein phosphatase 2C (PP2C)
  misc_feature (1)..(227): Homolog of NCBI NO: 18399423 NR Description: protein phosphatase 2C (PP2C)
  misc_feature (1)..(226): Homolog of NCBI NO: 4336436 NR Description: protein phosphatase type 2C [Lotus japonicus]
  misc_feature (1)..(226): Homolog of NCBI NO: 15081703 NR Description: At1g78200/T11I11_14 [Arabidopsis thaliana]
  misc_feature (1)..(226): Homolog of NCBI NO: 18411863 NR Description: protein phosphatase 2C (PP2C)
  misc_feature (1)..(143): Homolog of NCBI NO: 32488329 NR Description: OSJNBa0086B14.22 [Oryza sativa (japonica
  misc_feature (1)..(226): Homolog of NCBI NO: 21537096 NR Description: protein phosphatase type 2C, putative
  misc_feature (1)..(226): Homolog of NCBI NO: 18395099 NR Description: protein phosphatase 2C (PP2C), putative
  misc_feature (1)..(226): Homolog of NCBI NO: 15218759 NR Description: protein phosphatase 2C (PP2C)
MTNHPMEDYHFAELVDVKGNELGLFAIYDGHLGDTVPMYLQKNLFTNILNEEEFWTHTDRAIIKAYEKTDQAILSHTPDLGQGGSTAVTAILVNGRKLWVANVGDSRAVLLKGGEPIQMSIDHDPNVERSVIENRGGFVSNMPGDVPRVCGQLAVSRAFGDRNLKSLLRSEPDIKIEDIDHTAELLVLASDGLWKVMNNQEVVDLAKRYKDPYAAAKPINRRSTKKR

SEQ ID NO: 20283 - protein, 222 aa, Zea mays subsp. mays
  peptide (1)..(222): Ceres Seq. ID no. 12435467
  misc_feature (1)..(221): Pfam Name: Protein phosphatase 2C Pfam Description: Protein phosphatase 2C
  misc_feature (1)..(222): Homolog of NCBI NO: 25411985 NR Description: probable protein phosphatase 2C [imported] -
  misc_feature (1)..(222): Homolog of NCBI NO: 18417190 NR Description: protein phosphatase 2C (PP2C)
  misc_feature (1)..(222): Homolog of NCBI NO: 18399423 NR Description: protein phosphatase 2C (PP2C)
  misc_feature (1)..(221): Homolog of NCBI NO: 4336436 NR Description: protein phosphatase type 2C [Lotus japonicus]
  misc_feature (1)..(221): Homolog of NCBI NO: 15081703 NR Description: At1g78200/T11I11_14 [Arabidopsis thaliana]
  misc_feature (1)..(221): Homolog of NCBI NO: 18411863 NR Description: protein phosphatase 2C (PP2C)
  misc_feature (1)..(138): Homolog of NCBI NO: 32488329 NR Description: OSJNBa0086B14.22 [Oryza sativa (japonica
  misc_feature (1)..(221): Homolog of NCBI NO: 21537096 NR Description: protein phosphatase type 2C, putative
  misc_feature (1)..(221): Homolog of NCBI NO: 18395099 NR Description: protein phosphatase 2C (PP2C), putative
  misc_feature (1)..(221): Homolog of NCBI NO: 15218759 NR Description: protein phosphatase 2C (PP2C)
MEDYHFAELVDVKGNELGLFAIYDGHLGDTVPMYLQKNLFTNILNEEEFWTHTDRAIIKAYEKTDQAILSHTPDLGQGGSTAVTAILVNGRKLWVANVGDSRAVLLKGGEPIQMSIDHDPNVERSVIENRGGFVSNMPGDVPRVCGQLAVSRAFGDRNLKSLLRSEPDIKIEDIDHTAELLVLASDGLWKVMNNQEVVDLAKRYKDPYAAAKPINRRSTKKR

SEQ ID NO: 20284 - DNA, 1864 bp, Zea mays subsp. mays
  misc_feature (1)..(1864): Ceres Seq. ID no. 12443277
  misc_feature: MA Experiment ID: 108543 Result: Up-regulated in Transcription
  misc_feature: MA Experiment ID: 20000477 Result: Down-regulated in Transcription
  misc_feature: MA Experiment 20000477 PARAMETER Experiment Name: Zm_5mM_SA_P Parameter: Age (day) Value: 10
  misc_feature: MA Experiment 20000477 PARAMETER Experiment Name: Zm_5mM_SA_P Parameter: Organism Value: Zea mays
  misc_feature: MA Experiment 20000477 PARAMETER Experiment Name: Zm_5mM_SA_P Parameter: Plant Line Value: 35A19
  misc_feature: MA Experiment 20000477 PARAMETER Experiment Name: Zm_5mM_SA_P Parameter: Timepoint (hr) Value: 48
  misc_feature: MA Experiment 20000477 PARAMETER Experiment Name: Zm_5mM_SA_P Parameter: Tissue Value: Aerial
  misc_feature: MA Experiment 20000477 PARAMETER Experiment Name: Zm_5mM_SA_P Parameter: Treatment Value: 5mM SA vs. No Treatment
  misc_feature: MA Experiment ID: 20000478 Result: Down-regulated in Transcription
  misc_feature: MA Experiment 20000478 PARAMETER Experiment Name: Zm_5mM_SA_P Parameter: Age (day) Value: 11
  misc_feature: MA Experiment 20000478 PARAMETER Experiment Name: Zm_5mM_SA_P Parameter: Organism Value: Zea mays
  misc_feature: MA Experiment 20000478 PARAMETER Experiment Name: Zm_5mM_SA_P Parameter: Plant Line Value: 35A19
  misc_feature: MA Experiment 20000478 PARAMETER Experiment Name: Zm_5mM_SA_P Parameter: Timepoint (hr) Value: 72
  misc_feature: MA Experiment 20000478 PARAMETER Experiment Name: Zm_5mM_SA_P Parameter: Tissue Value: Aerial
  misc_feature: MA Experiment 20000478 PARAMETER Experiment Name: Zm_5mM_SA_P Parameter: Treatment Value: 5mM SA vs. No Treatment
  misc_feature: MA Experiment ID: 20000480 Result: Down-regulated in Transcription
  misc_feature: MA Experiment 20000480 PARAMETER Experiment Name: Zm_Drought_P Parameter: Age (day) Value: 11
  misc_feature: MA Experiment 20000480 PARAMETER Experiment Name: Zm_Drought_P Parameter: Organism Value: Zea mays
  misc_feature: MA Experiment 20000480 PARAMETER Experiment Name: Zm_Drought_P Parameter: Plant Line Value: 35A19
  misc_feature: MA Experiment 20000480 PARAMETER Experiment Name: Zm_Drought_P Parameter: Timepoint (hr) Value: 72
  misc_feature: MA Experiment 20000480 PARAMETER Experiment Name: Zm_Drought_P Parameter: Tissue Value: Aerial
  misc_feature: MA Experiment 20000480 PARAMETER Experiment Name: Zm_Drought_P Parameter: Treatment Value: Drought vs. No Drought
actcgtgctcgggctcggctccgtccgcgactccgccccacccctttccgtcagcggccgcaaccaccacaccaccacccaatggaggccggggaaatcggcggggcccttgtcttcatcctcgccgccgccgccgtcgtcgcggccgccgtgtccgtcggcgcggtcgacttcagccgcccgctcaccgcgggggcgccgttcgacttccaggcggcggtgtcctggctcatcggcatcctcgacggcacgtcctcggcagcggcggacgtggacggggcgtgggtggcggtgcgggccggggtgatcgcgccggtgctgcaggtggcggtgtgggcgtgcatggtgatgtcggtgatgctggtggtggaggccgtggtacaacagcgtcatcagcctcggcgtcaaggccattgggtggaggcctgagtggaggttcaagtggaagcccctcgacagcgccgacgaggagaaggggaccgcccacttccctatggtcctggttcagatacccatgtacaacgagctggaggtgtacaagctgtcaatagcggcagcatgtgagctgcagtggccaaaggacaggatagtaattcaagtgttggacgattctactgacccctttatcaagaatttggtggagcttgaatgtgagcactgggtgaacaaaggtgtcaatattaagtatgccacaagaaccagccgcaagggattcaaggcaggagctctgaagaaaggaatggaatgtgactatgcatggcaaagcgaatacattgctatatttgatgctgatttccaacctgaaccagattttctgctccaaactgtcccattccttctgcacaatccagaagttgcacttgttcaagctcggtggtccttcgtgaatgacacgacaagcctgctgacaagggtacaaaagatgttttacgactaccacttcaaagttgaacaagaagcaggatcagcgacctttgccttcttcagtttcaacggaactgctggagtgtggcgtacaggagccataagagatgcaggaggttggaaggaccgaactacagttgaagacatggacttggcggttcgagcaacactaaagggctggaaattcgtatatgttggagacgttagagtcaagagtgaactgccgtccacttacaaggcctactgtcggcagcaattccggtggtctagttggtggtgcaaacttattccgtaagatggcaaaggatgttttgtttgccaaggatatatcactcgtcaagaagttctatatgctctatagcttcttctttgtgaggagagttgtagcgccgacggctgcctgtattctctacaatgtcatcatccccatctcagtcacaatcccggagctttacctaccagtgtggggtgttgcctatattcccatggtgcttaccgtggtcacagctataagacatccaaaaaatctacacatactgccattttggattttgtttgagagtgtgatgacattgcatcggatgagggctgcgatgactggactgctggagctagaaggattcaaccagtggattgtgacaaagaaggtggggaatgatctcgaggacactgaagttcctttgcttcagaaaacccggaaaaggctgagagacagagtcaatctccccgagattggattttcggtgtttctcttcctctgtgcatcatacaacctggtgttccatgggaaaacaagctactacttatatatgtaccttcaggggttagcatttctgttactagggtttaacttcactggcaattgttcttgctaccaatgatagcatgtcaaagctgtacgaattgctgattgatattcattttctggtcatgcgttcgt

SEQ ID NO: 20285 - protein, 241 aa, Zea mays subsp. mays
  peptide (1)..(241): Ceres Seq. ID no. 12443278
  misc_feature (3)..(181): Pfam Name: Glycosyl transferase Pfam Description: Glycosyl transferase
  misc_feature (1)..(233): Homolog of NCBI NO: 21536839 NR Description: putative glucosyltransferase [Arabidopsis
  misc_feature (1)..(233): Homolog of NCBI NO: 18403914 NR Description: putative glucosyltransferase
  misc_feature (1)..(233): Homolog of NCBI NO: 15237519 NR Description: putative protein
  misc_feature (1)..(233): Homolog of NCBI NO: 16519223 NR Description: cellulose synthase-like protein OsCslA9 [Oryza
  misc_feature (1)..(233): Homolog of NCBI NO: 15242959 NR Description: glucosyltransferase-like protein
  misc_feature (1)..(233): Homolog of NCBI NO: 19071627 NR Description: putative glucosyl transferase
  misc_feature (1)..(233): Homolog of NCBI NO: 18921325 NR Description: putative cellulose synthase [Oryza sativa]
  misc_feature (1)..(233): Homolog of NCBI NO: 17385967 NR Description: CSLA7 [Oryza sativa]
  misc_feature (1)..(233): Homolog of NCBI NO: 34913250 NR Description: putative CSLA7 [Oryza sativa (japonica
  misc_feature (1)..(233): Homolog of NCBI NO: 33146549 NR Description: CSLA7 [Oryza sativa (japonica cultivar-group)]
MVLVQIPMYNELEVYKLSIAAACELQWPKDRIVIQVLDDSTDPFIKNLVELECEHWVNKGVNIKYATRTSRKGFKAGALKKGMECDYAWQSEYIAIFDADFQPEPDFLLQTVPFLLHNPEVALVQARWSFVNDTTSLLTRVQKMFYDYHFKVEQEAGSATFAFFSFNGTAGVWRTGAIRDAGGWKDRTTVEDMDLAVRATLKGWKFVYVGDVRVKSELPSTYKAYCRQQFRWSSWWCKLIP

SEQ ID NO: 20286 - protein, 234 aa, Zea mays subsp. mays
  peptide (1)..(234): Ceres Seq. ID no. 12443279
  misc_feature (1)..(174): Pfam Name: Glycosyl transferase Pfam Description: Glycosyl transferase
  misc_feature (1)..(226): Homolog of NCBI NO: 21536839 NR Description: putative glucosyltransferase [Arabidopsis
  misc_feature (1)..(226): Homolog of NCBI NO: 18403914 NR Description: putative glucosyltransferase
  misc_feature (1)..(226): Homolog of NCBI NO: 15237519 NR Description: putative protein
  misc_feature (1)..(226): Homolog of NCBI NO: 16519223 NR Description: cellulose synthase-like protein OsCslA9 [Oryza
  misc_feature (1)..(226): Homolog of NCBI NO: 15242959 NR Description: glucosyltransferase-like protein
  misc_feature (1)..(226): Homolog of NCBI NO: 19071627 NR Description: putative glucosyl transferase
  misc_feature (1)..(226): Homolog of NCBI NO: 18921325 NR Description: putative cellulose synthase [Oryza sativa]
  misc_feature (1)..(226): Homolog of NCBI NO: 17385967 NR Description: CSLA7 [Oryza sativa]
  misc_feature (1)..(226): Homolog of NCBI NO: 34913250 NR Description: putative CSLA7 [Oryza sativa (japonica
  misc_feature (1)..(226): Homolog of NCBI NO: 33146549 NR Description: CSLA7 [Oryza sativa (japonica cultivar-group)]
MYNELEVYKLSIAAACELQWPKDRIVIQVLDDSTDPFIKNLVELECEHWVNKGVNIKYATRTSRKGFKAGALKKGMECDYAWQSEYIAIFDADFQPEPDFLLQTVPFLLHNPEVALVQARWSFVNDTTSLLTRVQKMFYDYHFKVEQEAGSATFAFFSFNGTAGVWRTGAIRDAGGWKDRTTVEDMDLAVRATLKGWKFVYVGDVRVKSELPSTYKAYCRQQFRWSSWWCKLIP

SEQ ID NO: 20287 - protein, 229 aa, Zea mays subsp. mays
  peptide (1)..(229): Ceres Seq. ID no. 12443280
  misc_feature (28)..(229): Homolog of NCBI NO: 33146549 NR Description: CSLA7 [Oryza sativa (japonica cultivar-group)]
  misc_feature (28)..(223): Homolog of NCBI NO: 21536839 NR Description: putative glucosyltransferase [Arabidopsis
  misc_feature (28)..(223): Homolog of NCBI NO: 18403914 NR Description: putative glucosyltransferase
  misc_feature (28)..(223): Homolog of NCBI NO: 15237519 NR Description: putative protein
  misc_feature (28)..(223): Homolog of NCBI NO: 16519223 NR Description: cellulose synthase-like protein OsCslA9 [Oryza
  misc_feature (28)..(223): Homolog of NCBI NO: 15242959 NR Description: glucosyltransferase-like protein
  misc_feature (28)..(223): Homolog of NCBI NO: 19071627 NR Description: putative glucosyl transferase
  misc_feature (28)..(223): Homolog of NCBI NO: 18921325 NR Description: putative cellulose synthase [Oryza sativa]
  misc_feature (28)..(229): Homolog of NCBI NO: 17385967 NR Description: CSLA7 [Oryza sativa]
  misc_feature (28)..(229): Homolog of NCBI NO: 34913250 NR Description: putative CSLA7 [Oryza sativa (japonica
MLETLESRVNCRPLTRPTVGSNSGGLVGGANLFRKMAKDVLFAKDISLVKKFYMLYSFFFVRRVVAPTAACILYNVIIPISVTIPELYLPVWGVAYIPMVLTVVTAIRHPKNLHILPFWILFESVMTLHRMRAAMTGLLELEGFNQWIVTKKVGNDLEDTEVPLLQKTRKRLRDRVNLPEIGFSVFLFLCASYNLVFHGKTSYYLYMYLQGLAFLLLGFNFTGNCSCYQ

SEQ ID NO: 20288 - DNA, 443 bp, Zea mays subsp. mays
  misc_feature (1)..(443): Ceres Seq. ID no. 4613574
  misc_feature: MA Experiment ID: 108544 Result: Up-regulated in Transcription
  misc_feature: MA Experiment ID: 108688 Result: Down-regulated in Transcription
  misc_feature: MA Experiment 108688 PARAMETER Experiment Name: Zm_Embryos-Flowers__P Parameter: Tissue Value: Immature Flowers vs. Aerial+
  misc_feature: MA Experiment ID: 108689 Result: Down-regulated in Transcription
  misc_feature: MA Experiment 108689 PARAMETER Experiment Name: Zm_Drought_Roots_P Parameter: Age (day) Value: 9
  misc_feature: MA Experiment 108689 PARAMETER Experiment Name: Zm_Drought_Roots_P Parameter: Organism Value: Zea mays
  misc_feature: MA Experiment 108689 PARAMETER Experiment Name: Zm_Drought_Roots_P Parameter: Plant Line Value: 35A19
  misc_feature: MA Experiment 108689 PARAMETER Experiment Name: Zm_Drought_Roots_P Parameter: Timepoint (hr) Value: 24
  misc_feature: MA Experiment 108689 PARAMETER Experiment Name: Zm_Drought_Roots_P Parameter: Tissue Value: Roots
  misc_feature: MA Experiment 108689 PARAMETER Experiment Name: Zm_Drought_Roots_P Parameter: Treatment Value: Drought vs. No Drought
  misc_feature: MA Experiment ID: 20000478 Result: Up-regulated in Transcription
  misc_feature: MA Experiment 20000478 PARAMETER Experiment Name: Zm_5mM_SA_P Parameter: Age (day) Value: 11
  misc_feature: MA Experiment 20000478 PARAMETER Experiment Name: Zm_5mM_SA_P Parameter: Organism Value: Zea mays
  misc_feature: MA Experiment 20000478 PARAMETER Experiment Name: Zm_5mM_SA_P Parameter: Plant Line Value: 35A19
  misc_feature: MA Experiment 20000478 PARAMETER Experiment Name: Zm_5mM_SA_P Parameter: Timepoint (hr) Value: 72
  misc_feature: MA Experiment 20000478 PARAMETER Experiment Name: Zm_5mM_SA_P Parameter: Tissue Value: Aerial
  misc_feature: MA Experiment 20000478 PARAMETER Experiment Name: Zm_5mM_SA_P Parameter: Treatment Value: 5mM SA vs. No Treatment
  misc_feature: MA Experiment ID: 20000487 Result: Up-regulated in Transcription
  misc_feature: MA Experiment 20000487 PARAMETER Experiment Name: Zm_50mM_NH4NO3_L_to_H_P Parameter: Organism Value: Zea mays
  misc_feature: MA Experiment 20000487 PARAMETER Experiment Name: Zm_50mM_NH4NO3_L_to_H_P Parameter: Timepoint (hr) Value: 4
  misc_feature: MA Experiment 20000487 PARAMETER Experiment Name: Zm_50mM_NH4NO3_L_to_H_P Parameter: Tissue Value: Leaves
  misc_feature: MA Experiment 20000487 PARAMETER Experiment Name: Zm_50mM_NH4NO3_L_to_H_P Parameter: Treatment Value: 50mM NH4NO3 vs. 100mM Mannitol
  misc_feature: MA Experiment ID: 20000492 Result: Up-regulated in Transcription
  misc_feature: MA Experiment 20000492 PARAMETER Experiment Name: Zm_Hybrid_Seed_Dev_P Parameter: DAP Value: 12
  misc_feature: MA Experiment 20000492 PARAMETER Experiment Name: Zm_Hybrid_Seed_Dev_P Parameter: Organism Value: Zea mays
  misc_feature: MA Experiment 20000492 PARAMETER Experiment Name: Zm_Hybrid_Seed_Dev_P Parameter: Plant Line Value: 35A19
  misc_feature: MA Experiment 20000492 PARAMETER Experiment Name: Zm_Hybrid_Seed_Dev_P Parameter: Tissue Value: Fert Kernel vs. Unfert Floret
  misc_feature: MA Experiment ID: 20000535 Result: Up-regulated in Transcription
  misc_feature: MA Experiment 20000535 PARAMETER Experiment Name: Zm_Hybrid_Seed_Dev_P Parameter: DAP Value: 30 vs. 12
  misc_feature: MA Experiment 20000535 PARAMETER Experiment Name: Zm_Hybrid_Seed_Dev_P Parameter: Organism Value: Zea mays
  misc_feature: MA Experiment 20000535 PARAMETER Experiment Name: Zm_Hybrid_Seed_Dev_P Parameter: Plant Line Value: 35A19
  misc_feature: MA Experiment 20000535 PARAMETER Experiment Name: Zm_Hybrid_Seed_Dev_P Parameter: Tissue Value: Embryo vs. Unfert Floret
  misc_feature: MA Experiment ID: 20001612 Result: Up-regulated in Transcription
  misc_feature: MA Experiment 20001612 PARAMETER Experiment Name: Zm_50ppm_KNO3_L-to-H_P Parameter: Age (day) Value: 19
  misc_feature: MA Experiment 20001612 PARAMETER Experiment Name: Zm_50ppm_KNO3_L-to-H_P Parameter: Organism Value: Zea mays
  misc_feature: MA Experiment 20001612 PARAMETER Experiment Name: Zm_50ppm_KNO3_L-to-H_P Parameter: Plant Line Value: 35A19
  misc_feature: MA Experiment 20001612 PARAMETER Experiment Name: Zm_50ppm_KNO3_L-to-H_P Parameter: Timepoint (hr) Value: 8
  misc_feature: MA Experiment 20001612 PARAMETER Experiment Name: Zm_50ppm_KNO3_L-to-H_P Parameter: Tissue Value: Roots
  misc_feature: MA Experiment 20001612 PARAMETER Experiment Name: Zm_50ppm_KNO3_L-to-H_P Parameter: Treatment Value: 50ppm KNO3 vs. 50ppm KCl
  misc_feature: MA Experiment ID: 20001613 Result: Up-regulated in Transcription
  misc_feature: MA Experiment 20001613 PARAMETER Experiment Name: Zm_50ppm_KNO3_L-to-H_P Parameter: Age (day) Value: 20
  misc_feature: MA Experiment 20001613 PARAMETER Experiment Name: Zm_50ppm_KNO3_L-to-H_P Parameter: Organism Value: Zea mays
  misc_feature: MA Experiment 20001613 PARAMETER Experiment Name: Zm_50ppm_KNO3_L-to-H_P Parameter: Plant Line Value: 35A19
  misc_feature: MA Experiment 20001613 PARAMETER Experiment Name: Zm_50ppm_KNO3_L-to-H_P Parameter: Timepoint (hr) Value: 24
  misc_feature: MA Experiment 20001613 PARAMETER Experiment Name: Zm_50ppm_KNO3_L-to-H_P Parameter: Tissue Value: Roots
  misc_feature: MA Experiment 20001613 PARAMETER Experiment Name: Zm_50ppm_KNO3_L-to-H_P Parameter: Treatment Value: 50ppm KNO3 vs. 50ppm KCl
aatatattccctaaatttgcaaatcagggagtaccttccgatgggaggcagcgtcaagatgattgaagagtcactgaagctggcgtacggagaagattctgacttcatcaaagataagaggatagcagcggtgcaggcgctttcaggcactggtgcctgccggctctttgctgatttccaaaagcgttttttgccggattcgcagatctacataccaacaccaacgtggtccaaccatcacaatatttggagggatgctcaagtgccacagaagacattcacatactaccatccagagtcaagagggcttgatttctcaggattgatgaatgaaatcaagaatgctccagatggttcattctttttgcttcatgcatgtgctcataatcccaccggtgtagatcctacggagggaacaatggagagaaatatcccatcagttc

SEQ ID NO: 20289 - protein, 147 aa, Zea mays subsp. mays
  peptide (1)..(147): Ceres Seq. ID no. 4613575
  misc_feature (26)..(137): Pfam Name: Aminotransferase class I and II Pfam Description: Aminotransferase class I and II
  misc_feature (9)..(142): Homolog of NCBI NO: 485495 NR Description: aspartate transaminase (EC 2.6.1.1) AAT5
  misc_feature (9)..(142): Homolog of NCBI NO: 29468084 NR Description: aspartate aminotransferase [Oryza sativa]
  misc_feature (36)..(137): Homolog of NCBI NO: 33772244 NR Description: aspartate transaminase [Malus x domestica]
  misc_feature (7)..(137): Homolog of NCBI NO: 1362046 NR Description: aspartate transaminase (EC 2.6.1.1) precursor -
  misc_feature (10)..(137): Homolog of NCBI NO: 15224592 NR Description: aspartate aminotransferase (AAT1)
  misc_feature (3)..(137): Homolog of NCBI NO: 2130067 NR Description: aspartate transaminase (EC 2.6.1.1) precursor,
  misc_feature (5)..(137): Homolog of NCBI NO: 100728 NR Description: aspartate transaminase (EC 2.6.1.1) AAT3
  misc_feature (5)..(137): Homolog of NCBI NO: 100726 NR Description: aspartate transaminase (EC 2.6.1.1) AAT1
IYSLNLQIREYLPMGGSVKMIEESLKLAYGEDSDFIKDKRIAAVQALSGTGACRLFADFQKRFLPDSQIYIPTPTWSNHHNIWRDAQVPQKTFTYYHPESRGLDFSGLMNEIKNAPDGSFFLLHACAHNPTGVDPTEGTMERNIPSV

SEQ ID NO: 20290 - protein, 134 aa, Zea mays subsp. mays
  peptide (1)..(134): Ceres Seq. ID no. 4613576
  misc_feature (13)..(124): Pfam Name: Aminotransferase class I and II Pfam Description: Aminotransferase class I and II
  misc_feature (1)..(129): Homolog of NCBI NO: 485495 NR Description: aspartate transaminase (EC 2.6.1.1) AAT5
  misc_feature (1)..(129): Homolog of NCBI NO: 29468084 NR Description: aspartate aminotransferase [Oryza sativa]
  misc_feature (23)..(124): Homolog of NCBI NO: 33772244 NR Description: aspartate transaminase [Malus x domestica]
  misc_feature (1)..(124): Homolog of NCBI NO: 1362046 NR Description: aspartate transaminase (EC 2.6.1.1) precursor -
  misc_feature (1)..(124): Homolog of NCBI NO: 15224592 NR Description: aspartate aminotransferase (AAT1)
  misc_feature (1)..(124): Homolog of NCBI NO: 2130067 NR Description: aspartate transaminase (EC 2.6.1.1) precursor,
  misc_feature (1)..(124): Homolog of NCBI NO: 100728 NR Description: aspartate transaminase (EC 2.6.1.1) AAT3
  misc_feature (1)..(124): Homolog of NCBI NO: 100726 NR Description: aspartate transaminase (EC 2.6.1.1) AAT1
MGGSVKMIEESLKLAYGEDSDFIKDKRIAAVQALSGTGACRLFADFQKRFLPDSQIYIPTPTWSNHHNIWRDAQVPQKTFTYYHPESRGLDFSGLMNEIKNAPDGSFFLLHACAHNPTGVDPTEGTMERNIPSV

SEQ ID NO: 20291 - protein, 128 aa, Zea mays subsp. mays
  peptide (1)..(128): Ceres Seq. ID no. 4613577
  misc_feature (7)..(118): Pfam Name: Aminotransferase class I and II Pfam Description: Aminotransferase class I and II
  misc_feature (1)..(123): Homolog of NCBI NO: 485495 NR Description: aspartate transaminase (EC 2.6.1.1) AAT5
  misc_feature (1)..(123): Homolog of NCBI NO: 29468084 NR Description: aspartate aminotransferase [Oryza sativa]
  misc_feature (17)..(118): Homolog of NCBI NO: 33772244 NR Description: aspartate transaminase [Malus x domestica]
  misc_feature (1)..(118): Homolog of NCBI NO: 1362046 NR Description: aspartate transaminase (EC 2.6.1.1) precursor -
  misc_feature (1)..(118): Homolog of NCBI NO: 15224592 NR Description: aspartate aminotransferase (AAT1)
  misc_feature (1)..(118): Homolog of NCBI NO: 2130067 NR Description: aspartate transaminase (EC 2.6.1.1) precursor,
  misc_feature (1)..(118): Homolog of NCBI NO: 100728 NR Description: aspartate transaminase (EC 2.6.1.1) AAT3
  misc_feature (1)..(118): Homolog of NCBI NO: 100726 NR Description: aspartate transaminase (EC 2.6.1.1) AAT1
MIEESLKLAYGEDSDFIKDKRIAAVQALSGTGACRLFADFQKRFLPDSQIYIPTPTWSNHHNIWRDAQVPQKTFTYYHPESRGLDFSGLMNEIKNAPDGSFFLLHACAHNPTGVDPTEGTMERNIPSV

SEQ ID NO: 20292 - DNA, 1962 bp, Zea mays subsp. mays
  misc_feature (1)..(1962): Ceres Seq. ID no. 12391483
  misc_feature: MA Experiment ID: 20000478 Result: Up-regulated in Transcription
  misc_feature: MA Experiment 20000478 PARAMETER Experiment Name: Zm_5mM_SA_P Parameter: Age (day) Value: 11
  misc_feature: MA Experiment 20000478 PARAMETER Experiment Name: Zm_5mM_SA_P Parameter: Organism Value: Zea mays
  misc_feature: MA Experiment 20000478 PARAMETER Experiment Name: Zm_5mM_SA_P Parameter: Plant Line Value: 35A19
  misc_feature: MA Experiment 20000478 PARAMETER Experiment Name: Zm_5mM_SA_P Parameter: Timepoint (hr) Value: 72
  misc_feature: MA Experiment 20000478 PARAMETER Experiment Name: Zm_5mM_SA_P Parameter: Tissue Value: Aerial
  misc_feature: MA Experiment 20000478 PARAMETER Experiment Name: Zm_5mM_SA_P Parameter: Treatment Value: 5mM SA vs. No Treatment
  misc_feature: MA Experiment ID: 20000479 Result: Up-regulated in Transcription
  misc_feature: MA Experiment 20000479 PARAMETER Experiment Name: Zm_Drought_P Parameter: Age (day) Value: 10
  misc_feature: MA Experiment 20000479 PARAMETER Experiment Name: Zm_Drought_P Parameter: Organism Value: Zea mays
  misc_feature: MA Experiment 20000479 PARAMETER Experiment Name: Zm_Drought_P Parameter: Plant Line Value: 35A19
  misc_feature: MA Experiment 20000479 PARAMETER Experiment Name: Zm_Drought_P Parameter: Timepoint (hr) Value: 48
  misc_feature: MA Experiment 20000479 PARAMETER Experiment Name: Zm_Drought_P Parameter: Tissue Value: Aerial
  misc_feature: MA Experiment 20000479 PARAMETER Experiment Name: Zm_Drought_P Parameter: Treatment Value: Drought vs. No Drought
cgccttcgccatttctccgctcctccgcctcgcctcgcctcgcccatcgttccatgtctttctcctccggcggtcaccacccctcccggccggaccaaccccggatcccatttccagttagatgcttccccttcaccaccaccccgccgccgcgccggagtcggcggccccggcgacagaccctccgcccccgccggtcctcgatccgtcctccctccgcatccacatcccgtcaagcccgcaccacgcactgccctccaccccgcacaagcgccccgtcgtcatgacctcgtcgtcctcctcgtccacccccacccgcccctcaccgttgcccttcaccccgcctcggaggcgcaaggtccccgcgcccgctgctcccgcggggacagcggcggccaggcatctccttcgctgcctgcacctccgcctgcgtgtcctcctcctcatctcgcttccctccctctactttctctccccgacccctgccatttttccgcgctccctcctcgccgacttcctttccgcggcggccttctcctgcgcgctcctccttctcctctgcctctccctgccgcggcttcccttcgcgctgacgctgccgctccccctccgccgcgcgcgccgatcccccatcctttggtccatcggttcctcgccatccgcatctgcgaccacccccacaaccggccatttcgtccaggtttatagcaacggtgacgtctacgagggccagttccaccgcggccgctgcactggcagcggcgtctactactactacatgagcgggaggtacgagggagattgggtcgacggcaagtacagcggcttcggcgtcgagacatgggccagaggtagccggtaccggggccagtaccggcagggactcaggcatggctacggcgtgtacaggttctacactggggatgtgtatgccggggagtggtcaaacggccagagccatgggtatggtgtgcacacctgtgaggacggtagccggtatataggggagtttaagaggggcgtcaagcatggtctcggccactaccatttcaggaatggtgacacctacgctggagagtactttgctgataggatgcacggctttggaatctacagctttgccaatggccatagatatgagggagcatggcatgagggtagaaggcagggtttaggcatgtatagtttcaggaatggagagacacaagctgggcactggcaaaatggagttcttgatactttaagcacccagaacttcatccctggatcacctattgctgtgaaccattccaaggtcctcaatgcagtgcaggaagcgagaagagctgcagagaaggcctatgacatcccaagagttgatgataaggtgaacagggcggttgcagcagctaataaagcagccaatgcagccagggtggctgccgtgaaggctgcacaaaagcgcatccccagtaatggtgacgatctaccactgtcagtagtgtgacaatgaagccaatatatgttggcatggagctgcttcgcgatgccatcgcatcaccaattgcccgacataaccttcaacttcccagtaggtgaagccactgctcgtccatcaggccatggcgtgttggcgacacctgagtcattgccagcagcattcaagcttgcgggagaagaccaagttttcagccatcccttccatacatctttgtgatgtcttttgcgatgcagcagaaccactgctctgaggactttccattgtccaaggcagccggtcgaggtcagcagtaggttttatcctgccttttctgcagtgtaatactcacccgatgttagtagagatatgatgaatgtacaccccaacatcagtcgataaaaaactgtgtttattttctctcttggactatgtacagaacctacaaatttagcggttgttggccgtgctggttggagaaacgacaggtgccttcgggttcggtc

SEQ ID NO: 20293 - protein, 454 aa, Zea mays subsp. mays
  peptide (1)..(454): Ceres Seq. ID no. 12391484
  misc_feature (270)..(292): Pfam Name: MORN repeat Pfam Description: MORN repeat
  misc_feature (189)..(382): Homolog of NCBI NO: 23508109 NR Description: hypothetical protein [Plasmodium falciparum 3D7]
  misc_feature (189)..(368): Homolog of NCBI NO: 40062709 NR Description: MORN repeat protein [uncultured bacterium 314]
  misc_feature (189)..(368): Homolog of NCBI NO: 23481997 NR Description: MORN repeat, putative [Plasmodium yoelii yoelii]
  misc_feature (170)..(442): Homolog of NCBI NO: 15217439 NR Description: unknown protein; protein id: At1g77660.1
  misc_feature (76)..(442): Homolog of NCBI NO: 21593251 NR Description: phosphatidylinositol-4-phosphate 5-kinase,
  misc_feature (76)..(442): Homolog of NCBI NO: 15219142 NR Description: phosphatidylinositol-4-phosphate 5-kinase,
  misc_feature (32)..(451): Homolog of NCBI NO: 15235967 NR Description: hypothetical protein; protein id: At4g17080.1
  misc_feature (93)..(449): Homolog of NCBI NO: 18403768 NR Description: expressed protein
  misc_feature (83)..(451): Homolog of NCBI NO: 21928129 NR Description: AT4g17080/dl4570w [Arabidopsis thaliana]
  misc_feature (5)..(454): Homolog of NCBI NO: 37536922 NR Description: putative phosphatidylinositol-4-phosphate
MLPLHHHPAAAPESAAPATDPPPPPVLDPSSLRIHIPSSPHHALPSTPHKRPVVMTSSSSSSTPTRPSPLPFTPPRRRKVPAPAAPAGTAAARHLLRCLHLRLRVLLLISLPSLYFLSPTPAIFPRSLLADFLSAAAFSCALLLLLCLSLPRLPFALTLPLPLRRARRSPILWSIGSSPSASATTPTTGHFVQVYSNGDVYEGQFHRGRCTGSGVYYYYMSGRYEGDWVDGKYSGFGVETWARGSRYRGQYRQGLRHGYGVYRFYTGDVYAGEWSNGQSHGYGVHTCEDGSRYIGEFKRGVKHGLGHYHFRNGDTYAGEYFADRMHGFGIYSFANGHRYEGAWHEGRRQGLGMYSFRNGETQAGHWQNGVLDTLSTQNFIPGSPIAVNHSKVLNAVQEARRAAEKAYDIPRVDDKVNRAVAAANKAANAARVAAVKAAQKRIPSNGDDLPLSVV

SEQ ID NO: 20294 - protein, 400 aa, Zea mays subsp. mays
  peptide (1)..(400): Ceres Seq. ID no. 12391485
  misc_feature (216)..(238): Pfam Name: MORN repeat Pfam Description: MORN repeat
  misc_feature (135)..(328): Homolog of NCBI NO: 23508109 NR Description: hypothetical protein [Plasmodium falciparum 3D7]
  misc_feature (135)..(314): Homolog of NCBI NO: 40062709 NR Description: MORN repeat protein [uncultured bacterium 314]
  misc_feature (135)..(314): Homolog of NCBI NO: 23481997 NR Description: MORN repeat, putative [Plasmodium yoelii yoelii]
  misc_feature (116)..(388): Homolog of NCBI NO: 15217439 NR Description: unknown protein; protein id: At1g77660.1
  misc_feature (22)..(388): Homolog of NCBI NO: 21593251 NR Description: phosphatidylinositol-4-phosphate 5-kinase,
  misc_feature (22)..(388): Homolog of NCBI NO: 15219142 NR Description: phosphatidylinositol-4-phosphate 5-kinase,
  misc_feature (1)..(397): Homolog of NCBI NO: 15235967 NR Description: hypothetical protein; protein id: At4g17080.1
  misc_feature (39)..(395): Homolog of NCBI NO: 18403768 NR Description: expressed protein
  misc_feature (29)..(397): Homolog of NCBI NO: 21928129 NR Description: AT4g17080/dl4570w [Arabidopsis thaliana]
  misc_feature (1)..(400): Homolog of NCBI NO: 37536922 NR Description: putative phosphatidylinositol-4-phosphate
MTSSSSSSTPTRPSPLPFTPPRRRKVPAPAAPAGTAAARHLLRCLHLRLRVLLLISLPSLYFLSPTPAIFPRSLLADFLSAAAFSCALLLLLCLSLPRLPFALTLPLPLRRARRSPILWSIGSSPSASATTPTTGHFVQVYSNGDVYEGQFHRGRCTGSGVYYYYMSGRYEGDWVDGKYSGFGVETWARGSRYRGQYRQGLRHGYGVYRFYTGDVYAGEWSNGQSHGYGVHTCEDGSRYIGEFKRGVKHGLGHYHFRNGDTYAGEYFADRMHGFGIYSFANGHRYEGAWHEGRRQGLGMYSFRNGETQAGHWQNGVLDTLSTQNFIPGSPIAVNHSKVLNAVQEARRAAEKAYDIPRVDDKVNRAVAAANKAANAARVAAVKAAQKRIPSNGDDLPLSVV

SEQ ID NO: 20295 - protein, 235 aa, Zea mays subsp. mays
  peptide (1)..(235): Ceres Seq. ID no. 12391486
  misc_feature (51)..(73): Pfam Name: MORN repeat Pfam Description: MORN repeat
  misc_feature (1)..(163): Homolog of NCBI NO: 23508109 NR Description: hypothetical protein [Plasmodium falciparum 3D7]
  misc_feature (1)..(149): Homolog of NCBI NO: 40062709 NR Description: MORN repeat protein [uncultured bacterium 314]
  misc_feature (1)..(149): Homolog of NCBI NO: 23481997 NR Description: MORN repeat, putative [Plasmodium yoelii yoelii]
  misc_feature (1)..(223): Homolog of NCBI NO: 15217439 NR Description: unknown protein; protein id: At1g77660.1
  misc_feature (1)..(223): Homolog of NCBI NO: 21593251 NR Description: phosphatidylinositol-4-phosphate 5-kinase,
  misc_feature (1)..(223): Homolog of NCBI NO: 15219142 NR Description: phosphatidylinositol-4-phosphate 5-kinase,
  misc_feature (1)..(232): Homolog of NCBI NO: 15235967 NR Description: hypothetical protein; protein id: At4g17080.1
  misc_feature (1)..(230): Homolog of NCBI NO: 18403768 NR Description: expressed protein
  misc_feature (1)..(232): Homolog of NCBI NO: 21928129 NR Description: AT4g17080/dl4570w [Arabidopsis thaliana]
  misc_feature (1)..(235): Homolog of NCBI NO: 37536922 NR Description: putative phosphatidylinositol-4-phosphate
MSGRYEGDWVDGKYSGFGVETWARGSRYRGQYRQGLRHGYGVYRFYTGDVYAGEWSNGQSHGYGVHTCEDGSRYIGEFKRGVKHGLGHYHFRNGDTYAGEYFADRMHGFGIYSFANGHRYEGAWHEGRRQGLGMYSFRNGETQAGHWQNGVLDTLSTQNFIPGSPIAVNHSKVLNAVQEARRAAEKAYDIPRVDDKVNRAVAAANKAANAARVAAVKAAQKRIPSNGDDLPLSVV

SEQ ID NO: 20296 - DNA, 483 bp, Zea mays subsp. mays
  misc_feature (1)..(483): Ceres Seq. ID no. 2871567
  misc_feature: MA Experiment ID: 108504 Result: Up-regulated in Transcription
  misc_feature: MA Experiment 108504 PARAMETER Experiment Name: Zm_Drought_P Parameter: Age (day) Value: 8
  misc_feature: MA Experiment 108504 PARAMETER Experiment Name: Zm_Drought_P Parameter: Organism Value: Zea mays
  misc_feature: MA Experiment 108504 PARAMETER Experiment Name: Zm_Drought_P Parameter: Plant Line Value: 35A19
  misc_feature: MA Experiment 108504 PARAMETER Experiment Name: Zm_Drought_P Parameter: Timepoint (hr) Value: 12
  misc_feature: MA Experiment 108504 PARAMETER Experiment Name: Zm_Drought_P Parameter: Tissue Value: Aerial
  misc_feature: MA Experiment 108504 PARAMETER Experiment Name: Zm_Drought_P Parameter: Treatment Value: Drought vs. No Drought
  misc_feature: MA Experiment ID: 108528 Result: Up-regulated in Transcription
  misc_feature: MA Experiment 108528 PARAMETER Experiment Name: Zm_Imbibed_Seeds_P Parameter: Age (day) Value: 5 vs. 2
  misc_feature: MA Experiment 108528 PARAMETER Experiment Name: Zm_Imbibed_Seeds_P Parameter: Organism Value: Zea mays
  misc_feature: MA Experiment 108528 PARAMETER Experiment Name: Zm_Imbibed_Seeds_P Parameter: Plant Line Value: 35A19
  misc_feature: MA Experiment 108528 PARAMETER Experiment Name: Zm_Imbibed_Seeds_P Parameter: Tissue Value: Aerial vs. Embryo
  misc_feature: MA Experiment ID: 108529 Result: Down-regulated in Transcription
  misc_feature: MA Experiment 108529 PARAMETER Experiment Name: Zm_Imbibed_Seeds_P Parameter: Age (day) Value: 5 vs. 2
  misc_feature: MA Experiment 108529 PARAMETER Experiment Name: Zm_Imbibed_Seeds_P Parameter: Organism Value: Zea mays
  misc_feature: MA Experiment 108529 PARAMETER Experiment Name: Zm_Imbibed_Seeds_P Parameter: Plant Line Value: 35A19
  misc_feature: MA Experiment 108529 PARAMETER Experiment Name: Zm_Imbibed_Seeds_P Parameter: Tissue Value: Roots vs. Embryo
  misc_feature: MA Experiment ID: 108530 Result: Up-regulated in Transcription
  misc_feature: MA Experiment 108530 PARAMETER Experiment Name: Zm_Imbibed_Seeds_P Parameter: Age (day) Value: 6 vs. 2
  misc_feature: MA Experiment 108530 PARAMETER Experiment Name: Zm_Imbibed_Seeds_P Parameter: Organism Value: Zea mays
  misc_feature: MA Experiment 108530 PARAMETER Experiment Name: Zm_Imbibed_Seeds_P Parameter: Plant Line Value: 35A19
  misc_feature: MA Experiment 108530 PARAMETER Experiment Name: Zm_Imbibed_Seeds_P Parameter: Tissue Value: Aerial vs. Embryo
  misc_feature: MA Experiment ID: 108536 Result: Down-regulated in Transcription
  misc_feature: MA Experiment 108536 PARAMETER Experiment Name: Zm_Meristem_P Parameter: Age (day) Value: 8
  misc_feature: MA Experiment 108536 PARAMETER Experiment Name: Zm_Meristem_P Parameter: Organism Value: Zea mays
  misc_feature: MA Experiment 108536 PARAMETER Experiment Name: Zm_Meristem_P Parameter: Plant Line Value: 35A19
  misc_feature: MA Experiment 108536 PARAMETER Experiment Name: Zm_Meristem_P Parameter: Tissue Value: Shoot Meristem vs. Above Shoot Meristem
  misc_feature: MA Experiment ID: 108543 Result: Up-regulated in Transcription
  misc_feature: MA Experiment ID: 108545 Result: Up-regulated in Transcription
  misc_feature: MA Experiment 108545 PARAMETER Experiment Name: Zm_Imbibed_Seeds_P Parameter: Age (day) Value: 3 vs. 2
  misc_feature: MA Experiment 108545 PARAMETER Experiment Name: Zm_Imbibed_Seeds_P Parameter: Organism Value: Zea mays
  misc_feature: MA Experiment 108545 PARAMETER Experiment Name: Zm_Imbibed_Seeds_P Parameter: Plant Line Value: 35A19
  misc_feature: MA Experiment 108545 PARAMETER Experiment Name: Zm_Imbibed_Seeds_P Parameter: Tissue Value: Aerial vs. Embryo
  misc_feature: MA Experiment ID: 108547 Result: Up-regulated in Transcription
  misc_feature: MA Experiment 108547 PARAMETER Experiment Name: Zm_Imbibed_Seeds_P Parameter: Age (day) Value: 4 vs. 2
  misc_feature: MA Experiment 108547 PARAMETER Experiment Name: Zm_Imbibed_Seeds_P Parameter: Organism Value: Zea mays
  misc_feature: MA Experiment 108547 PARAMETER Experiment Name: Zm_Imbibed_Seeds_P Parameter: Plant Line Value: 35A19
  misc_feature: MA Experiment 108547 PARAMETER Experiment Name: Zm_Imbibed_Seeds_P Parameter: Tissue Value: Aerial vs. Embryo
  misc_feature: MA Experiment ID: 108556 Result: Up-regulated in Transcription
  misc_feature: MA Experiment 108556 PARAMETER Experiment Name: Zm_Drought_P Parameter: Age (day) Value: 9
  misc_feature: MA Experiment 108556 PARAMETER Experiment Name: Zm_Drought_P Parameter: Organism Value: Zea mays
  misc_feature: MA Experiment 108556 PARAMETER Experiment Name: Zm_Drought_P Parameter: Plant Line Value: 35A19
  misc_feature: MA Experiment 108556 PARAMETER Experiment Name: Zm_Drought_P Parameter: Timepoint (hr) Value: 24
  misc_feature: MA Experiment 108556 PARAMETER Experiment Name: Zm_Drought_P Parameter: Tissue Value: Aerial
  misc_feature: MA Experiment 108556 PARAMETER Experiment Name: Zm_Drought_P Parameter: Treatment Value: Drought vs. No Drought
  misc_feature: MA Experiment ID: 108597 Result: Up-regulated in Transcription
  misc_feature: MA Experiment 108597 PARAMETER Experiment Name: Zm_100uM_ABA_P Parameter: Age (day) Value: 9
  misc_feature: MA Experiment 108597 PARAMETER Experiment Name: Zm_100uM_ABA_P Parameter: Organism Value: Zea mays
  misc_feature: MA Experiment 108597 PARAMETER Experiment Name: Zm_100uM_ABA_P Parameter: Plant Line Value: 35A19
  misc_feature: MA Experiment 108597 PARAMETER Experiment Name: Zm_100uM_ABA_P Parameter: Timepoint (hr) Value: 24
  misc_feature: MA Experiment 108597 PARAMETER Experiment Name: Zm_100uM_ABA_P Parameter: Tissue Value: Aerial
  misc_feature: MA Experiment 108597 PARAMETER Experiment Name: Zm_100uM_ABA_P Parameter: Treatment Value: 100uM ABA vs. No Treatment
  misc_feature: MA Experiment ID: 108689 Result: Up-regulated in Transcription
  misc_feature: MA Experiment 108689 PARAMETER Experiment Name: Zm_Drought_Roots_P Parameter: Age (day) Value: 9
  misc_feature: MA Experiment 108689 PARAMETER Experiment Name: Zm_Drought_Roots_P Parameter: Organism Value: Zea mays
  misc_feature: MA Experiment 108689 PARAMETER Experiment Name: Zm_Drought_Roots_P Parameter: Plant Line Value: 35A19
  misc_feature: MA Experiment 108689 PARAMETER Experiment Name: Zm_Drought_Roots_P Parameter: Timepoint (hr) Value: 24
  misc_feature: MA Experiment 108689 PARAMETER Experiment Name: Zm_Drought_Roots_P Parameter: Tissue Value: Roots
  misc_feature: MA Experiment 108689 PARAMETER Experiment Name: Zm_Drought_Roots_P Parameter: Treatment Value: Drought vs. No Drought
  misc_feature: MA Experiment ID: 20000479 Result: Up-regulated in Transcription
  misc_feature: MA Experiment 20000479 PARAMETER Experiment Name: Zm_Drought_P Parameter: Age (day) Value: 10
  misc_feature: MA Experiment 20000479 PARAMETER Experiment Name: Zm_Drought_P Parameter: Organism Value: Zea mays
  misc_feature: MA Experiment 20000479 PARAMETER Experiment Name: Zm_Drought_P Parameter: Plant Line Value: 35A19
  misc_feature: MA Experiment 20000479 PARAMETER Experiment Name: Zm_Drought_P Parameter: Timepoint (hr) Value: 48
  misc_feature: MA Experiment 20000479 PARAMETER Experiment Name: Zm_Drought_P Parameter: Tissue Value: Aerial
  misc_feature: MA Experiment 20000479 PARAMETER Experiment Name: Zm_Drought_P Parameter: Treatment Value: Drought vs. No Drought
ctcttattggctgctgtcctgggagttcgcttcagttgggccggccgggggtggttccgtacagttccttctctgttggagtagtcggcggcgatgggtatcctcgcgctcatcaccggcaaggccgacgccagccgcctcaccgtcgctatcacaggaggagctagtggcattggtctggagacatcaagagtcttcgccctgagaggagcccatgttgtcatcgctgctagaaacacagaggctgcatcagaagcaagaaagaccatcatggagaagaacccaacggcacgtattgatgttctgaagctagacctcagctccctcaagtctgtcagggcttttgtggaccagttcaactcgatgaaactccctctaaacatcctgataaataatgcaggcgtcatgttctgccctttttcaactgtctaaaaacggggtcgagatgcagttcgcgacaaatcatctcggacactttctgct

SEQ ID NO: 20297 - protein, 112 aa, Zea mays subsp. mays
  peptide (1)..(112): Ceres Seq. ID no. 2871568
  misc_feature (7)..(109): Homolog of NCBI NO: 23297050 NR Description: unknown protein [Arabidopsis thaliana]
  misc_feature (7)..(109): Homolog of NCBI NO: 30686197 NR Description: short-chain dehydrogenase/reductase family
  misc_feature (7)..(109): Homolog of NCBI NO: 18416145 NR Description: putative protein
  misc_feature (7)..(109): Homolog of NCBI NO: 15233359 NR Description: putative protein; protein id: At4g11410.1
  misc_feature (7)..(109): Homolog of NCBI NO: 21554820 NR Description: putativepod-specific dehydrogenase SAC25
  misc_feature (7)..(109): Homolog of NCBI NO: 20260302 NR Description: putative protein [Arabidopsis thaliana]
  misc_feature (7)..(109): Homolog of NCBI NO: 18413950 NR Description: putative protein
  misc_feature (7)..(109): Homolog of NCBI NO: 629592 NR Description: hypothetical protein - rape
  misc_feature (7)..(109): Homolog of NCBI NO: 15224306 NR Description: putative oxidoreductase
  misc_feature (7)..(109): Homolog of NCBI NO: 34895876 NR Description: P0009G03.18 [Oryza sativa (japonica
MGILALITGKADASRLTVAITGGASGIGLETSRVFALRGAHVVIAARNTEAASEARKTIMEKNPTARIDVLKLDLSSLKSVRAFVDQFNSMKLPLNILINNAGVMFCPFSTV

SEQ ID NO: 20298 - protein, 67 aa, Zea mays subsp. mays
  peptide (1)..(67): Ceres Seq. ID no. 2871569
SYWLLSWEFASVGPAGGGSVQFLLCWSSRRRWVSSRSSPARPTPAASPSLSQEELVALVWRHQESSP

SEQ ID NO: 20299 - DNA, 1731 bp, Zea mays subsp. mays
  misc_feature (1)..(1731): Ceres Seq. ID no. 12436071
  misc_feature: MA Experiment ID: 108544 Result: Up-regulated in Transcription
aggcgcaggcgcgagcgcgacgtccggcgtccggcttcggcggcggagtggagcgatcccgatccccacaaggaattccatcgctgtcgtggcgtttggtggcgctcctcccggccggcaagcaggatcaggtaccctcccgtcccggatcctcccaaccgttccgtttcccgcggccgggctggcttagttctgcggcgctggttgccatttcgggccaaatttgttgcgtgaagcggaaggatttggattgaatggcacgcgttgtttccagtcgacgccctcttggcttgcctttggctgtaggaaatcgcacggaggtgaggatacacgggtgcggaacgagagctaggcgaacctgtctggtacctcgcggcggagatggacgagaaggcgacgatggagagcaagctgtcctcggcggcggccttcgtggaggggggcgtgcaggacgcctgcgacgacgcctgcagcatctgcctcgacgccttctgcgacagcaaccccttccacgatgaccaagtgcaagcatgactaccatcttcagtgcattcttgaatggtgtatattataattcatgtaataatttaggtgccagagaagctcccagtgccccatgtgttggcagcatatcagcatgaaagatcctatgagccaagagctactagaggctgttgaacaagagaggaacatccgagctaatccttcacgtaatactgctgttttccaccatcaaatgctgggtgattttgagatccctgtaggtgcagatgatgcagaacttgaagaacgcattattcagcacttggctgccgcagctgcagtgcgtaggtcacaccgtcatcataatagaagagatgggcaccagagcagatcagaagcaagtagccacccacagtttctggtgctctcagcagacgagcgcacaatctcaggtcaagaaggggactacgaacaagcatctgctgtagcttctggccgccctttacgtacacttgttgaacaagaacgcactcgagggttagcggatgcttccagtccatctctccgttgttctactcctgctgatagtactggtagatcaaacaataggatttctgggatcgaatctacacctgtggatcaagacggaactggaccatccgctttacaatcaatggtacagggatttcataatcaaagtgcaagtggatggagggagaggtggttttctcggagcaactctttactggatcttggttctgaggtgaggagggaggtcaacgcggggattgctgcggtgtctcgcatgatggaatggcacgatgcaagggacgggacgggagcggggccttctcctacctctgcatcaagatctggttctcagtgaaacactctgcacttgaaaggacctatgcaaatgtaaagattaaggtatgtgctcatgctgtgctaatgaaagccttaaattcagtgttttgttttttttctggtggcgtactgtcactgttgactggcctacggatctgagtttttgtgtaattgtttggaagcaattccattgtcgccgaaatggcgcggtagtttctctgactgctgctgctaaatactaggaactttagttttcttcaagtccaaagggtcagagttgagagcacctgagatccggcgatgcttcatggccacggtcccccagaggctattcgcaatagttgactctaaatttctctctatatatcagttttttgtgtc

SEQ ID NO: 20300 - protein, 250 aa, Zea mays subsp. mays
  peptide (1)..(250): Ceres Seq. ID no. 12436072
  misc_feature (1)..(248): Homolog of NCBI NO: 30682750 NR Description: zinc finger (C3HC4-type RING finger) protein
  misc_feature (1)..(248): Homolog of NCBI NO: 11358783 NR Description: RING-H2 finger protein RHF1a
  misc_feature (1)..(188): Homolog of NCBI NO: 30688252 NR Description: zinc finger (C3HC4-type RING finger) protein
  misc_feature (1)..(188): Homolog of NCBI NO: 26451710 NR Description: putative RING-H2 finger protein RHF2a
  misc_feature (1)..(188): Homolog of NCBI NO: 18420424 NR Description: Expressed protein
  misc_feature (147)..(236): Homolog of NCBI NO: 32493110 NR Description: putative RING-H2 zinc finger protein
  misc_feature (1)..(100): Homolog of NCBI NO: 32493110 NR Description: putative RING-H2 zinc finger protein
  misc_feature (1)..(250): Homolog of NCBI NO: 27819501 NR Description: putative zinc finger protein
  misc_feature (1)..(248): Homolog of NCBI NO: 26450997 NR Description: putative RING-H2 finger protein RHF1a
  misc_feature (1)..(248): Homolog of NCBI NO: 25360953 NR Description: RING-H2 finger protein RHF1a [imported] -
MCWQHISMKDPMSQELLEAVEQERNIRANPSRNTAVFHHQMLGDFEIPVGADDAELEERIIQHLAAAAAVRRSHRHHNRRDGHQSRSEASSHPQFLVLSADERTISGQEGDYEQASAVASGRPLRTLVEQERTRGLADASSPSLRCSTPADSTGRSNNRISGIESTPVDQDGTGPSALQSMVQGFHNQSASGWRERWFSRSNSLLDLGSEVRREVNAGIAAVSRMMEWHDARDGTGAGPSPTSASRSGSQ

SEQ ID NO: 20301 - protein, 243 aa, Zea mays subsp. mays
  peptide (1)..(243): Ceres Seq. ID no. 12436073
  misc_feature (1)..(241): Homolog of NCBI NO: 26450997 NR Description: putative RING-H2 finger protein RHF1a
  misc_feature (1)..(241): Homolog of NCBI NO: 30682750 NR Description: zinc finger (C3HC4-type RING finger) protein
  misc_feature (1)..(241): Homolog of NCBI NO: 25360953 NR Description: RING-H2 finger protein RHF1a [imported] -
  misc_feature (1)..(241): Homolog of NCBI NO: 11358783 NR Description: RING-H2 finger protein RHF1a
  misc_feature (1)..(181): Homolog of NCBI NO: 30688252 NR Description: zinc finger (C3HC4-type RING finger) protein
  misc_feature (1)..(181): Homolog of NCBI NO: 26451710 NR Description: putative RING-H2 finger protein RHF2a
  misc_feature (1)..(181): Homolog of NCBI NO: 18420424 NR Description: Expressed protein
  misc_feature (140)..(229): Homolog of NCBI NO: 32493110 NR Description: putative RING-H2 zinc finger protein
  misc_feature (1)..(93): Homolog of NCBI NO: 32493110 NR Description: putative RING-H2 zinc finger protein
  misc_feature (1)..(243): Homolog of NCBI NO: 27819501 NR Description: putative zinc finger protein
MKDPMSQELLEAVEQERNIRANPSRNTAVFHHQMLGDFEIPVGADDAELEERIIQHLAAAAAVRRSHRHHNRRDGHQSRSEASSHPQFLVLSADERTISGQEGDYEQASAVASGRPLRTLVEQERTRGLADASSPSLRCSTPADSTGRSNNRISGIESTPVDQDGTGPSALQSMVQGFHNQSASGWRERWFSRSNSLLDLGSEVRREVNAGIAAVSRMMEWHDARDGTGAGPSPTSASRSGSQ

SEQ ID NO: 20302 - protein, 239 aa, Zea mays subsp. mays
  peptide (1)..(239): Ceres Seq. ID no. 12436074
  misc_feature (1)..(237): Homolog of NCBI NO: 26450997 NR Description: putative RING-H2 finger protein RHF1a
  misc_feature (1)..(237): Homolog of NCBI NO: 30682750 NR Description: zinc finger (C3HC4-type RING finger) protein
  misc_feature (1)..(237): Homolog of NCBI NO: 25360953 NR Description: RING-H2 finger protein RHF1a [imported] -
  misc_feature (1)..(237): Homolog of NCBI NO: 11358783 NR Description: RING-H2 finger protein RHF1a
  misc_feature (1)..(177): Homolog of NCBI NO: 30688252 NR Description: zinc finger (C3HC4-type RING finger) protein
  misc_feature (1)..(177): Homolog of NCBI NO: 26451710 NR Description: putative RING-H2 finger protein RHF2a
  misc_feature (1)..(177): Homolog of NCBI NO: 18420424 NR Description: Expressed protein
  misc_feature (136)..(225): Homolog of NCBI NO: 32493110 NR Description: putative RING-H2 zinc finger protein
  misc_feature (1)..(89): Homolog of NCBI NO: 32493110 NR Description: putative RING-H2 zinc finger protein
  misc_feature (1)..(239): Homolog of NCBI NO: 27819501 NR Description: putative zinc finger protein
MSQELLEAVEQERNIRANPSRNTAVFHHQMLGDFEIPVGADDAELEERIIQHLAAAAAVRRSHRHHNRRDGHQSRSEASSHPQFLVLSADERTISGQEGDYEQASAVASGRPLRTLVEQERTRGLADASSPSLRCSTPADSTGRSNNRISGIESTPVDQDGTGPSALQSMVQGFHNQSASGWRERWFSRSNSLLDLGSEVRREVNAGIAAVSRMMEWHDARDGTGAGPSPTSASRSGSQ

SEQ ID NO: 20303 - DNA, 1079 bp, Zea mays subsp. mays
  misc_feature (1)..(1079): Ceres Seq. ID no. 12455036
  misc_feature: MA Experiment ID: 108528 Result: Up-regulated in Transcription
  misc_feature: MA Experiment 108528 PARAMETER Experiment Name: Zm_Imbibed_Seeds_P Parameter: Age (day) Value: 5 vs. 2
  misc_feature: MA Experiment 108528 PARAMETER Experiment Name: Zm_Imbibed_Seeds_P Parameter: Organism Value: Zea mays
  misc_feature: MA Experiment 108528 PARAMETER Experiment Name: Zm_Imbibed_Seeds_P Parameter: Plant Line Value: 35A19
  misc_feature: MA Experiment 108528 PARAMETER Experiment Name: Zm_Imbibed_Seeds_P Parameter: Tissue Value: Aerial vs. Embryo
  misc_feature: MA Experiment ID: 108529 Result: Up-regulated in Transcription
  misc_feature: MA Experiment 108529 PARAMETER Experiment Name: Zm_Imbibed_Seeds_P Parameter: Age (day) Value: 5 vs. 2
  misc_feature: MA Experiment 108529 PARAMETER Experiment Name: Zm_Imbibed_Seeds_P Parameter: Organism Value: Zea mays
  misc_feature: MA Experiment 108529 PARAMETER Experiment Name: Zm_Imbibed_Seeds_P Parameter: Plant Line Value: 35A19
  misc_feature: MA Experiment 108529 PARAMETER Experiment Name: Zm_Imbibed_Seeds_P Parameter: Tissue Value: Roots vs. Embryo
  misc_feature: MA Experiment ID: 108530 Result: Up-regulated in Transcription
  misc_feature: MA Experiment 108530 PARAMETER Experiment Name: Zm_Imbibed_Seeds_P Parameter: Age (day) Value: 6 vs. 2
  misc_feature: MA Experiment 108530 PARAMETER Experiment Name: Zm_Imbibed_Seeds_P Parameter: Organism Value: Zea mays
  misc_feature: MA Experiment 108530 PARAMETER Experiment Name: Zm_Imbibed_Seeds_P Parameter: Plant Line Value: 35A19
  misc_feature: MA Experiment 108530 PARAMETER Experiment Name: Zm_Imbibed_Seeds_P Parameter: Tissue Value: Aerial vs. Embryo
  misc_feature: MA Experiment ID: 108535 Result: Down-regulated in Transcription
  misc_feature: MA Experiment 108535 PARAMETER Experiment Name: Zm_Meristem_P Parameter: Age (day) Value: 8
  misc_feature: MA Experiment 108535 PARAMETER Experiment Name: Zm_Meristem_P Parameter: Organism Value: Zea mays
  misc_feature: MA Experiment 108535 PARAMETER Experiment Name: Zm_Meristem_P Parameter: Plant Line Value: 35A19
  misc_feature: MA Experiment 108535 PARAMETER Experiment Name: Zm_Meristem_P Parameter: Tissue Value: Root Meristem vs. Above Root Meristem
  misc_feature: MA Experiment ID: 108543 Result: Up-regulated in Transcription
  misc_feature: MA Experiment ID: 108544 Result: Up-regulated in Transcription
  misc_feature: MA Experiment ID: 108547 Result: Up-regulated in Transcription
  misc_feature: MA Experiment 108547 PARAMETER Experiment Name: Zm_Imbibed_Seeds_P Parameter: Age (day) Value: 4 vs. 2
  misc_feature: MA Experiment 108547 PARAMETER Experiment Name: Zm_Imbibed_Seeds_P Parameter: Organism Value: Zea mays
  misc_feature: MA Experiment 108547 PARAMETER Experiment Name: Zm_Imbibed_Seeds_P Parameter: Plant Line Value: 35A19
  misc_feature: MA Experiment 108547 PARAMETER Experiment Name: Zm_Imbibed_Seeds_P Parameter: Tissue Value: Aerial vs. Embryo
  misc_feature: MA Experiment ID: 108687 Result: Down-regulated in Transcription
  misc_feature: MA Experiment 108687 PARAMETER Experiment Name: Zm_Embryos-Flowers__P Parameter: Tissue Value: Embryo vs. Aerial+
  misc_feature: MA Experiment ID: 108689 Result: Up-regulated in Transcription
  misc_feature: MA Experiment 108689 PARAMETER Experiment Name: Zm_Drought_Roots_P Parameter: Age (day) Value: 9
  misc_feature: MA Experiment 108689 PARAMETER Experiment Name: Zm_Drought_Roots_P Parameter: Organism Value: Zea mays
  misc_feature: MA Experiment 108689 PARAMETER Experiment Name: Zm_Drought_Roots_P Parameter: Plant Line Value: 35A19
  misc_feature: MA Experiment 108689 PARAMETER Experiment Name: Zm_Drought_Roots_P Parameter: Timepoint (hr) Value: 24
  misc_feature: MA Experiment 108689 PARAMETER Experiment Name: Zm_Drought_Roots_P Parameter: Tissue Value: Roots
  misc_feature: MA Experiment 108689 PARAMETER Experiment Name: Zm_Drought_Roots_P Parameter: Treatment Value: Drought vs. No Drought
  misc_feature: MA Experiment ID: 20000478 Result: Down-regulated in Transcription
  misc_feature: MA Experiment 20000478 PARAMETER Experiment Name: Zm_5mM_SA_P Parameter: Age (day) Value: 11
  misc_feature: MA Experiment 20000478 PARAMETER Experiment Name: Zm_5mM_SA_P Parameter: Organism Value: Zea mays
  misc_feature: MA Experiment 20000478 PARAMETER Experiment Name: Zm_5mM_SA_P Parameter: Plant Line Value: 35A19
  misc_feature: MA Experiment 20000478 PARAMETER Experiment Name: Zm_5mM_SA_P Parameter: Timepoint (hr) Value: 72
  misc_feature: MA Experiment 20000478 PARAMETER Experiment Name: Zm_5mM_SA_P Parameter: Tissue Value: Aerial
  misc_feature: MA Experiment 20000478 PARAMETER Experiment Name: Zm_5mM_SA_P Parameter: Treatment Value: 5mM SA vs. No Treatment
  misc_feature: MA Experiment ID: 20000480 Result: Down-regulated in Transcription
  misc_feature: MA Experiment 20000480 PARAMETER Experiment Name: Zm_Drought_P Parameter: Age (day) Value: 11
  misc_feature: MA Experiment 20000480 PARAMETER Experiment Name: Zm_Drought_P Parameter: Organism Value: Zea mays
  misc_feature: MA Experiment 20000480 PARAMETER Experiment Name: Zm_Drought_P Parameter: Plant Line Value: 35A19
  misc_feature: MA Experiment 20000480 PARAMETER Experiment Name: Zm_Drought_P Parameter: Timepoint (hr) Value: 72
  misc_feature: MA Experiment 20000480 PARAMETER Experiment Name: Zm_Drought_P Parameter: Tissue Value: Aerial
  misc_feature: MA Experiment 20000480 PARAMETER Experiment Name: Zm_Drought_P Parameter: Treatment Value: Drought vs. No Drought
  misc_feature: MA Experiment ID: 20000535 Result: Down-regulated in Transcription
  misc_feature: MA Experiment 20000535 PARAMETER Experiment Name: Zm_Hybrid_Seed_Dev_P Parameter: DAP Value: 30 vs. 12
  misc_feature: MA Experiment 20000535 PARAMETER Experiment Name: Zm_Hybrid_Seed_Dev_P Parameter: Organism Value: Zea mays
  misc_feature: MA Experiment 20000535 PARAMETER Experiment Name: Zm_Hybrid_Seed_Dev_P Parameter: Plant Line Value: 35A19
  misc_feature: MA Experiment 20000535 PARAMETER Experiment Name: Zm_Hybrid_Seed_Dev_P Parameter: Tissue Value: Embryo vs. Unfert Floret
  misc_feature: MA Experiment ID: 20000626 Result: Down-regulated in Transcription
  misc_feature: MA Experiment 20000626 PARAMETER Experiment Name: Zm_Herbicide-Treatments_P Parameter: Timepoint (hr) Value: 12
  misc_feature: MA Experiment 20000626 PARAMETER Experiment Name: Zm_Herbicide-Treatments_P Parameter: Tissue Value: Aerial
  misc_feature: MA Experiment 20000626 PARAMETER Experiment Name: Zm_Herbicide-Treatments_P Parameter: Treatment Value: Roundup vs. No Treatment
aacgagcagaggtgtgcctagctcatcgatcaacaagtgagtagtagcaccttcaccatggcagacaagaagaaggtggaggtcaaagagacgaaggtggaggtgaagacggccgtctacaaggtgtacgtccactgcggccagtgcgcgcgcgacatccagacgcagttcaccgagttccaaggggttgaagaggtgaaagtggacgccggggccgggaaggtgacagtgaagggcttcggcttcgacgtcgagaagctgaggaagaaagtcgagaagggttgccggaagaaggtcgagctgattccgcccgcgcctcccaaggacgacatggtcgttgatgtcaagaccaaaaaggaggagctcaaggtcataactgtaaagctgccgttgcattgccccgattgtgcagtcagggtcaaggaggttttgcttgagaacaagagtatctacgaggccaagacggatctcggcaagaacacgtgcaccatcgagggtgtcattgaggaggacaagctcgtcaagtacatctacgagaggatgcgcaagaagggcgtcgtcgacaaggtcgagaagaaggtgatcatcaaggaggagaaggtcttagtgaagaaggcggataaggagaaggagaagaaggagaaggagaaggagaaagaaaaggagaaggccaaggagaaggtgaaggaggctgtcgacaaggtcaaggaggtcatcgccccctacttcatcccctgcacgcacccgaacttcgtcgactactcgcacccctggcaccgcggcggcggcggctactgctcgtcgtacggtgacggttacggctacggcgggggctgcggagggtacccaccgtacggtttcagctacacacactctgagctcaaaggctaccatgacacgtcgttcttgcactgcacacaccccaatgagttcatcagcgaggagaacccctacgcgtgcgctgtgatgtagcctctctttttttgcgcttggattcaagtcgaataatttgaacactaagaacaacaccaacgtacggatggctcaaattttctcttttgcttcggctcagatttgtt

SEQ ID NO: 20304 - protein, 304 aa, Zea mays subsp. mays
  peptide (1)..(304): Ceres Seq. ID no. 12455037
  misc_feature (19)..(82): Pfam Name: Heavy-metal-associated domain Pfam Description: Heavy-metal-associated domain
  misc_feature (3)..(218): Homolog of NCBI NO: 21594005 NR Description: unknown [Arabidopsis thaliana]
  misc_feature (7)..(209): Homolog of NCBI NO: 15233023 NR Description: hypothetical protein; protein id: At3g02960.1
  misc_feature (1)..(226): Homolog of NCBI NO: 37532382 NR Description: putative ATFP3 [Oryza sativa (japonica
  misc_feature (20)..(218): Homolog of NCBI NO: 38344582 NR Description: OSJNBa0053B21.14 [Oryza sativa (japonica
  misc_feature (20)..(218): Homolog of NCBI NO: 4097547 NR Description: ATFP3 [Arabidopsis thaliana]
  misc_feature (20)..(218): Homolog of NCBI NO: 18424719 NR Description: copper chaperone (CCH)-related
  misc_feature (20)..(218): Homolog of NCBI NO: 9758294 NR Description: contains similarity to ATFP3~gene_id:MLE2.16
  misc_feature (8)..(219): Homolog of NCBI NO: 15218784 NR Description: hypothetical protein; protein id: At1g29000.1
  misc_feature (265)..(304): Homolog of NCBI NO: 38346717 NR Description: OSJNBa0086O06.15 [Oryza sativa (japonica
  misc_feature (11)..(238): Homolog of NCBI NO: 38346717 NR Description: OSJNBa0086O06.15 [Oryza sativa (japonica
MADKKKVEVKETKVEVKTAVYKVYVHCGQCARDIQTQFTEFQGVEEVKVDAGAGKVTVKGFGFDVEKLRKKVEKGCRKKVELIPPAPPKDDMVVDVKTKKEELKVITVKLPLHCPDCAVRVKEVLLENKSIYEAKTDLGKNTCTIEGVIEEDKLVKYIYERMRKKGVVDKVEKKVIIKEEKVLVKKADKEKEKKEKEKEKEKEKAKEKVKEAVDKVKEVIAPYFIPCTHPNFVDYSHPWHRGGGGYCSSYGDGYGYGGGCGGYPPYGFSYTHSELKGYHDTSFLHCTHPNEFISEENPYACAVM

SEQ ID NO: 20305 - protein, 213 aa, Zea mays subsp. mays
  peptide (1)..(213): Ceres Seq. ID no. 12455038
  misc_feature (64)..(128): Pfam Name: Hsp90 protein Pfam Description: Hsp90 protein
  misc_feature (1)..(127): Homolog of NCBI NO: 21594005 NR Description: unknown [Arabidopsis thaliana]
  misc_feature (1)..(118): Homolog of NCBI NO: 15233023 NR Description: hypothetical protein; protein id: At3g02960.1
  misc_feature (1)..(135): Homolog of NCBI NO: 37532382 NR Description: putative ATFP3 [Oryza sativa (japonica
  misc_feature (1)..(127): Homolog of NCBI NO: 38344582 NR Description: OSJNBa0053B21.14 [Oryza sativa (japonica
  misc_feature (1)..(127): Homolog of NCBI NO: 4097547 NR Description: ATFP3 [Arabidopsis thaliana]
  misc_feature (1)..(127): Homolog of NCBI NO: 18424719 NR Description: copper chaperone (CCH)-related
  misc_feature (1)..(127): Homolog of NCBI NO: 9758294 NR Description: contains similarity to ATFP3~gene_id:MLE2.16
  misc_feature (1)..(128): Homolog of NCBI NO: 15218784 NR Description: hypothetical protein; protein id: At1g29000.1
  misc_feature (174)..(213): Homolog of NCBI NO: 38346717 NR Description: OSJNBa0086O06.15 [Oryza sativa (japonica
  misc_feature (1)..(147): Homolog of NCBI NO: 38346717 NR Description: OSJNBa0086O06.15 [Oryza sativa (japonica
MVVDVKTKKEELKVITVKLPLHCPDCAVRVKEVLLENKSIYEAKTDLGKNTCTIEGVIEEDKLVKYIYERMRKKGVVDKVEKKVIIKEEKVLVKKADKEKEKKEKEKEKEKEKAKEKVKEAVDKVKEVIAPYFIPCTHPNFVDYSHPWHRGGGGYCSSYGDGYGYGGGCGGYPPYGFSYTHSELKGYHDTSFLHCTHPNEFISEENPYACAVM

SEQ ID NO: 20306 - DNA, 1290 bp, Zea mays subsp. mays
  misc_feature (1)..(1290): Ceres Seq. ID no. 12365221
  misc_feature: Phenotype: ROSETTE LEAVES Curled-Cup-shaped
  misc_feature: Phenotype: INFLORESCENCE Flowering Time-Late Flowering
  misc_feature: Phenotype: ROSETTE LEAVES Curled-Cup-shaped
  misc_feature: Phenotype: INFLORESCENCE Flowering Time-Late Flowering
  misc_feature: Phenotype: ROSETTE LEAVES Curled-Cup-shaped
  misc_feature: Phenotype: INFLORESCENCE Flowering Time-Late Flowering
  misc_feature: Phenotype: ROSETTE LEAVES Curled-Cup-shaped
  misc_feature: Phenotype: INFLORESCENCE Flowering Time-Late Flowering
  misc_feature: Phenotype: ROSETTE LEAVES Curled-Cup-shaped
  misc_feature: Phenotype: INFLORESCENCE Flowering Time-Late Flowering
  misc_feature: Phenotype: ROSETTE LEAVES Curled-Cup-shaped
  misc_feature: Phenotype: ROSETTE LEAVES Petiole Length-Short Petioles
  misc_feature: Phenotype: WHOLE PLANT Size-Small
  misc_feature: Phenotype: INFLORESCENCE Flowering Time-Late Flowering
ttttcctcccataaaagcctctccctccgctagtccgctctcaagtaaaaagctcccgaaatcccctcacctactcctctccctctccctctggcagcgccgcctcgccggcggttgcctgcctgcaccttcgccccccgtctcgacctcgacgcggcctccgttcctccgcgagacgcagcatggatgtgcgccctgcgaatgcggccgacgactcgtctctcggagacctgttcccgcaccagcccgccggtttggagagtgacgagagcaacacagaatggctctctggttacgtagaggactgcttttcgagctccacgtcgtacacaaatcccgtctctgcaatggcaagcgagggtgtcggaaaaccaaagctacctccaccaccatcctccaacggcaggagaaagaaacggagcttggcctccgtcatgaccaacggcgactaccaacaattcgtcctcccgctgtacgtcgagccaccgctgatcctgatcgaccagaaacactggatggcagagagcgagctgatccaccccaagaaggacgacgacgaccgagaggtttgccagcaacaagggcaggagcaagagaagggcgtgccgcggctggtgaagatgtgcagcaactgtctgtcaagccaaacgccacggtggagggacgggccgtcggggcgccagatgatgtgcagcgcatgcggcatgaggctcaagccagagaccaggttgtcagccgagcagcagtacggccaggaagaacccaccaggaaggagcaagagccagacaggaagaggaagaaggcggccaagaagacgtgctacgagagcagcgacgccccgccgtcgtcggaccagcaagagaagcggtgcgcccactgcctgtcctccaagaccccgcagtggagggcggggcctctggggcccaagaccctgtgcaacgcctgcggcgtcaggttcaagtccggcaggctgctgcccgagtaccggcccgccaacagccccaccttcgtgagctgcttgcactccaactcccacaagaaggtcatgcagatgcggcaggccgtcgcgcagcagcagtgaggccgacgtctcccggaatctatcgttggaagcgcgttaggggatctcttagatcgtagcttagtcgatgctcagagaggatgagaacagagactttggttatagtagtagtaggcaatcgtcgttagctctagcggtgttctagctcagactgatttgctcggtgtttttagacgtcggattcaatacaatctcgatgttgtcctgg

SEQ ID NO: 20307 - protein, 299 aa, Zea mays subsp. mays
  peptide (1)..(299): Ceres Seq. ID no. 12365222
  misc_feature (192)..(293): Homolog of NCBI NO: 15451574 NR Description: Putative GATA-1 zinc finger protein [Oryza sativa]
  misc_feature (195)..(293): Homolog of NCBI NO: 37572447 NR Description: AG-motif binding protein-3 [Nicotiana tabacum]
  misc_feature (198)..(293): Homolog of NCBI NO: 15233971 NR Description: GATA zinc finger protein; protein id: At4g32890.1
  misc_feature (214)..(293): Homolog of NCBI NO: 15225399 NR Description: GATA zinc finger protein; protein id: At2g45050.1
  misc_feature (180)..(293): Homolog of NCBI NO: 15239503 NR Description: GATA zinc finger protein; protein id: At5g25830.1
  misc_feature (183)..(292): Homolog of NCBI NO: 37572451 NR Description: AG-motif binding protein-5 [Nicotiana tabacum]
  misc_feature (178)..(299): Homolog of NCBI NO: 15232355 NR Description: GATA zinc finger protein
  misc_feature (182)..(295): Homolog of NCBI NO: 37572443 NR Description: AG-motif binding protein-1 [Nicotiana tabacum]
  misc_feature (144)..(178): Homolog of NCBI NO: 8778844 NR Description: T6D22.9 [Arabidopsis thaliana]
  misc_feature (180)..(293): Homolog of NCBI NO: 8778844 NR Description: T6D22.9 [Arabidopsis thaliana]
MDVRPANAADDSSLGDLFPHQPAGLESDESNTEWLSGYVEDCFSSSTSYTNPVSAMASEGVGKPKLPPPPSSNGRRKKRSLASVMTNGDYQQFVLPLYVEPPLILIDQKHWMAESELIHPKKDDDDREVCQQQGQEQEKGVPRLVKMCSNCLSSQTPRWRDGPSGRQMMCSACGMRLKPETRLSAEQQYGQEEPTRKEQEPDRKRKKAAKKTCYESSDAPPSSDQQEKRCAHCLSSKTPQWRAGPLGPKTLCNACGVRFKSGRLLPEYRPANSPTFVSCLHSNSHKKVMQMRQAVAQQQ

SEQ ID NO: 20308 - protein, 286 aa, Zea mays subsp. mays
  peptide (1)..(286): Ceres Seq. ID no. 12365223
MALWLRRGLLFELHVVHKSRLCNGKRGCRKTKATSTTILQRQEKETELGLRHDQRRLPTIRPPAVRRATADPDRPETLDGRERADPPQEGRRRPRGLPATRAGAREGRAAAGEDVQQLSVKPNATVEGRAVGAPDDVQRMRHEAQARDQVVSRAAVRPGRTHQEGARARQEEEEGGQEDVLREQRRPAVVGPAREAVRPLPVLQDPAVEGGASGAQDPVQRLRRQVQVRQAAARVPARQQPHLRELLALQLPQEGHADAAGRRAAAVRPTSPGIYRWKRVRGSLRS

SEQ ID NO: 20309 - protein, 244 aa, Zea mays subsp. mays
  peptide (1)..(244): Ceres Seq. ID no. 12365224
  misc_feature (137)..(238): Homolog of NCBI NO: 15451574 NR Description: Putative GATA-1 zinc finger protein [Oryza sativa]
  misc_feature (140)..(238): Homolog of NCBI NO: 37572447 NR Description: AG-motif binding protein-3 [Nicotiana tabacum]
  misc_feature (143)..(238): Homolog of NCBI NO: 15233971 NR Description: GATA zinc finger protein; protein id: At4g32890.1
  misc_feature (159)..(238): Homolog of NCBI NO: 15225399 NR Description: GATA zinc finger protein; protein id: At2g45050.1
  misc_feature (125)..(238): Homolog of NCBI NO: 15239503 NR Description: GATA zinc finger protein; protein id: At5g25830.1
  misc_feature (128)..(237): Homolog of NCBI NO: 37572451 NR Description: AG-motif binding protein-5 [Nicotiana tabacum]
  misc_feature (123)..(244): Homolog of NCBI NO: 15232355 NR Description: GATA zinc finger protein
  misc_feature (127)..(240): Homolog of NCBI NO: 37572443 NR Description: AG-motif binding protein-1 [Nicotiana tabacum]
  misc_feature (89)..(123): Homolog of NCBI NO: 8778844 NR Description: T6D22.9 [Arabidopsis thaliana]
  misc_feature (125)..(238): Homolog of NCBI NO: 8778844 NR Description: T6D22.9 [Arabidopsis thaliana]
MASEGVGKPKLPPPPSSNGRRKKRSLASVMTNGDYQQFVLPLYVEPPLILIDQKHWMAESELIHPKKDDDDREVCQQQGQEQEKGVPRLVKMCSNCLSSQTPRWRDGPSGRQMMCSACGMRLKPETRLSAEQQYGQEEPTRKEQEPDRKRKKAAKKTCYESSDAPPSSDQQEKRCAHCLSSKTPQWRAGPLGPKTLCNACGVRFKSGRLLPEYRPANSPTFVSCLHSNSHKKVMQMRQAVAQQQ

SEQ ID NO: 20310 - DNA, 1826 bp, Arabidopsis thaliana
  misc_feature (1)..(1826): Ceres Seq. ID no. 13646221
  misc_feature: MA Experiment ID: 20000179 Result: Up-regulated in Transcription
  misc_feature: MA Experiment 20000179 PARAMETER Experiment Name: At_Germinating_Seeds_P Parameter: Age (hr) Value: 6 vs. 0
  misc_feature: MA Experiment 20000179 PARAMETER Experiment Name: At_Germinating_Seeds_P Parameter: Tissue Value: Germinating Seeds
  misc_feature: MA Experiment ID: 20000180 Result: Up-regulated in Transcription
  misc_feature: MA Experiment 20000180 PARAMETER Experiment Name: At_Germinating_Seeds_P Parameter: Age (hr) Value: 24 vs. 0
  misc_feature: MA Experiment 20000180 PARAMETER Experiment Name: At_Germinating_Seeds_P Parameter: Tissue Value: Germinating Seeds
  misc_feature: MA Experiment ID: 20000265 Result: Up-regulated in Transcription
  misc_feature: MA Experiment 20000265 PARAMETER Experiment Name: At_Open_Flower_P Parameter: Age (day) Value: 21
  misc_feature: MA Experiment 20000265 PARAMETER Experiment Name: At_Open_Flower_P Parameter: Plant Line Value: WS
  misc_feature: MA Experiment 20000265 PARAMETER Experiment Name: At_Open_Flower_P Parameter: Tissue Value: Closed Flower vs. Whole Plant
  misc_feature: MA Experiment ID: 20000495 Result: Up-regulated in Transcription
  misc_feature: MA Experiment 20000495 PARAMETER Experiment Name: At_Guard_Cells_P Parameter: Harvest Date Value: 8/2/2002
  misc_feature: MA Experiment 20000495 PARAMETER Experiment Name: At_Guard_Cells_P Parameter: Organism Value: A. thaliana
  misc_feature: MA Experiment 20000495 PARAMETER Experiment Name: At_Guard_Cells_P Parameter: Tissue Value: Guard Cells vs. Leaves
  misc_feature: MA Experiment ID: 20000573 Result: Down-regulated in Transcription
  misc_feature: MA Experiment 20000573 PARAMETER Experiment Name: At_100uM_ABA_Mutants__P Parameter: Organism Value: A. thaliana
  misc_feature: MA Experiment 20000573 PARAMETER Experiment Name: At_100uM_ABA_Mutants__P Parameter: Plant Line Value: CS22 vs. Ler wt
  misc_feature: MA Experiment 20000573 PARAMETER Experiment Name: At_100uM_ABA_Mutants__P Parameter: Timepoint (hr) Value: N/A
  misc_feature: MA Experiment 20000573 PARAMETER Experiment Name: At_100uM_ABA_Mutants__P Parameter: Tissue Value: Whole Plant
  misc_feature: MA Experiment 20000573 PARAMETER Experiment Name: At_100uM_ABA_Mutants__P Parameter: Treatment Value: None
atttgctcactcccattctccagttgtggaaaccccccaaagacatggcatttgaaccttttgagtcatcatcagcgtattcattcacacgacgatttatagaatgtggtgtttgtcctgctttaaaccttccactaaacatgatccctctgaggatcgttttgaagaagaaacaaatatcgttacaggtatttctctgtatgaagatgtcatcttacgtcagagaagatcagaagctgatcagatagaatgggctattcaagatagcttcaacccgcaagaaacttctcgttgtcgtcagcgagaggaggatgatcagatagcgcgtggtttgcaatatgtggaagaaactgagcttgataaatcagttgtggacgaagaagatcagcagctttctaagattgttgaggagagtttgaaggagaaaggcaaaagtaagcaatttgaagatgatcaagtggaaaatgatgaacagcaagctctgatggttcaggagagtctatacatggtggagctttctgctcaacttgaagaagataaaaacatttcaacaatacctccgctgaatgaagatgcgcagcttcagaaggttatttgggaaagcgcgaagggtaaaggccaaatagagcatttcaaagatccagtggaagaagatggaaatcttccaagggtagatctcaacgttaaccatcctcatagcatatgtgatggttgcaaatctgcgattgaatatggaagatctgttcatgccttgggtgttaattggcatcctgaatgtttctgttgtcgttattgcgacaaaccaatcgctatgcacgagttttcaaacacaaaagggaggtgtcatataacctgctacgagcgtagtcacccaaactgccatgtctgcaaaaagaagtttcctggtagaaagtataaagaacatcccttctggaaggaaaagtactgcccttttcatgaagttgatggaactcccaagtgttgcagttgtgaaagattagagccctggggaacgaagtatgtaatgcttgctgacaatcggtggctatgcgtaaaatgtatggaatgcgcggttatggatacttatgagtgccaaccattgcactttgaaatccgtgaaatcttcggaagcttaaacatgaaggttgagaaagaattccctcttcttttggtggagaaagaagcgctgaaaaaagctgaggcgcaagaaaagatcgacaatcagcatggggttgtaaccagaggtatttgcctgtctgaagggcagattgtcaatagtgtctttaaaaagccaaccatggggccaaacggcgagctagtaagcttgggtacagaacctcaaaaggttgttggtggatgtgaggtcactgcaattctcatcctatatggacttcctaggttactaactggatatatcttggctcatgagatgatgcatgcttggcttagactcaatggttataggaatcttaagttagagctggaagaaggaatatgccaagtgctaggccacatgtggttggagtcacagacatactccagttctgcagctgcatcatcagcttcttcttcttcgaggactccagctgctaatgcatcaaagaaaggtgctcaatctgattacgagaagaaactggtggaattttgcaaggatcagatagaaacagacgattcaccggtctacggtgttggattcaggaaagttaaccagatggtctcaaactccagcctccataaaatcctgaaaagtattcaacactggacgaaaccagattcaaatctttgaagcacctaatataggacaaatcgaaacataccttatcgat

SEQ ID NO: 20311 - protein, 560 aa, Arabidopsis thaliana
  peptide (1)..(560): Ceres Seq. ID no. 13646222
  misc_feature (237)..(550): Homolog of NCBI NO: 10177891 NR Description: emb|CAB16816.1|~gene_id:MPI7.6~similar to unknown
  misc_feature (120)..(560): Homolog of NCBI NO: 30698242 NR Description: expressed protein [Arabidopsis thaliana]
  misc_feature (44)..(551): Homolog of NCBI NO: 17065046 NR Description: Unknown protein [Arabidopsis thaliana]
  misc_feature (110)..(560): Homolog of NCBI NO: 8843722 NR Description: emb|CAB16816.1~gene_id:MSN2.2~similar to unknown
  misc_feature (15)..(550): Homolog of NCBI NO: 22326876 NR Description: disease resistance protein (TIR-NBS-LRR class),
  misc_feature (178)..(550): Homolog of NCBI NO: 30698240 NR Description: expressed protein [Arabidopsis thaliana]
  misc_feature (178)..(550): Homolog of NCBI NO: 27808630 NR Description: At5g66630 [Arabidopsis thaliana]
  misc_feature (1)..(271): Homolog of NCBI NO: 15240017 NR Description: expressed protein [Arabidopsis thaliana]
  misc_feature (17)..(550): Homolog of NCBI NO: 15240018 NR Description: hypothetical protein [Arabidopsis thaliana]
  misc_feature (65)..(560): Homolog of NCBI NO: 15240017 NR Description: expressed protein [Arabidopsis thaliana]
MWCLSCFKPSTKHDPSEDRFEEETNIVTGISLYEDVILRQRRSEADQIEWAIQDSFNPQETSRCRQREEDDQIARGLQYVEETELDKSVVDEEDQQLSKIVEESLKEKGKSKQFEDDQVENDEQQALMVQESLYMVELSAQLEEDKNISTIPPLNEDAQLQKVIWESAKGKGQIEHFKDPVEEDGNLPRVDLNVNHPHSICDGCKSAIEYGRSVHALGVNWHPECFCCRYCDKPIAMHEFSNTKGRCHITCYERSHPNCHVCKKKFPGRKYKEHPFWKEKYCPFHEVDGTPKCCSCERLEPWGTKYVMLADNRWLCVKCMECAVMDTYECQPLHFEIREIFGSLNMKVEKEFPLLLVEKEALKKAEAQEKIDNQHGVVTRGICLSEGQIVNSVFKKPTMGPNGELVSLGTEPQKVVGGCEVTAILILYGLPRLLTGYILAHEMMHAWLRLNGYRNLKLELEEGICQVLGHMWLESQTYSSSAAASSASSSSRTPAANASKKGAQSDYEKKLVEFCKDQIETDDSPVYGVGFRKVNQMVSNSSLHKILKSIQHWTKPDSNL

SEQ ID NO: 20312 - protein, 433 aa, Arabidopsis thaliana
  peptide (1)..(433): Ceres Seq. ID no. 13646223
  misc_feature (110)..(423): Homolog of NCBI NO: 10177891 NR Description: emb|CAB16816.1|~gene_id:MPI7.6~similar to unknown
  misc_feature (1)..(433): Homolog of NCBI NO: 30698242 NR Description: expressed protein [Arabidopsis thaliana]
  misc_feature (1)..(424): Homolog of NCBI NO: 17065046 NR Description: Unknown protein [Arabidopsis thaliana]
  misc_feature (1)..(433): Homolog of NCBI NO: 8843722 NR Description: emb|CAB16816.1~gene_id:MSN2.2~similar to unknown
  misc_feature (1)..(423): Homolog of NCBI NO: 22326876 NR Description: disease resistance protein (TIR-NBS-LRR class),
  misc_feature (51)..(423): Homolog of NCBI NO: 30698240 NR Description: expressed protein [Arabidopsis thaliana]
  misc_feature (51)..(423): Homolog of NCBI NO: 27808630 NR Description: At5g66630 [Arabidopsis thaliana]
  misc_feature (1)..(144): Homolog of NCBI NO: 15240017 NR Description: expressed protein [Arabidopsis thaliana]
  misc_feature (1)..(423): Homolog of NCBI NO: 15240018 NR Description: hypothetical protein [Arabidopsis thaliana]
  misc_feature (1)..(433): Homolog of NCBI NO: 15240017 NR Description: expressed protein [Arabidopsis thaliana]
MVQESLYMVELSAQLEEDKNISTIPPLNEDAQLQKVIWESAKGKGQIEHFKDPVEEDGNLPRVDLNVNHPHSICDGCKSAIEYGRSVHALGVNWHPECFCCRYCDKPIAMHEFSNTKGRCHITCYERSHPNCHVCKKKFPGRKYKEHPFWKEKYCPFHEVDGTPKCCSCERLEPWGTKYVMLADNRWLCVKCMECAVMDTYECQPLHFEIREIFGSLNMKVEKEFPLLLVEKEALKKAEAQEKIDNQHGVVTRGICLSEGQIVNSVFKKPTMGPNGELVSLGTEPQKVVGGCEVTAILILYGLPRLLTGYILAHEMMHAWLRLNGYRNLKLELEEGICQVLGHMWLESQTYSSSAAASSASSSSRTPAANASKKGAQSDYEKKLVEFCKDQIETDDSPVYGVGFRKVNQMVSNSSLHKILKSIQHWTKPDSNL

SEQ ID NO: 20313 - protein, 426 aa, Arabidopsis thaliana
  peptide (1)..(426): Ceres Seq. ID no. 13646224
  misc_feature (103)..(416): Homolog of NCBI NO: 10177891 NR Description: emb|CAB16816.1|~gene_id:MPI7.6~similar to unknown
  misc_feature (1)..(426): Homolog of NCBI NO: 30698242 NR Description: expressed protein [Arabidopsis thaliana]
  misc_feature (1)..(417): Homolog of NCBI NO: 17065046 NR Description: Unknown protein [Arabidopsis thaliana]
  misc_feature (1)..(426): Homolog of NCBI NO: 8843722 NR Description: emb|CAB16816.1~gene_id:MSN2.2~similar to unknown
  misc_feature (1)..(416): Homolog of NCBI NO: 22326876 NR Description: disease resistance protein (TIR-NBS-LRR class),
  misc_feature (44)..(416): Homolog of NCBI NO: 30698240 NR Description: expressed protein [Arabidopsis thaliana]
  misc_feature (44)..(416): Homolog of NCBI NO: 27808630 NR Description: At5g66630 [Arabidopsis thaliana]
  misc_feature (1)..(137): Homolog of NCBI NO: 15240017 NR Description: expressed protein [Arabidopsis thaliana]
  misc_feature (1)..(416): Homolog of NCBI NO: 15240018 NR Description: hypothetical protein [Arabidopsis thaliana]
  misc_feature (1)..(426): Homolog of NCBI NO: 15240017 NR Description: expressed protein [Arabidopsis thaliana]
MVELSAQLEEDKNISTIPPLNEDAQLQKVIWESAKGKGQIEHFKDPVEEDGNLPRVDLNVNHPHSICDGCKSAIEYGRSVHALGVNWHPECFCCRYCDKPIAMHEFSNTKGRCHITCYERSHPNCHVCKKKFPGRKYKEHPFWKEKYCPFHEVDGTPKCCSCERLEPWGTKYVMLADNRWLCVKCMECAVMDTYECQPLHFEIREIFGSLNMKVEKEFPLLLVEKEALKKAEAQEKIDNQHGVVTRGICLSEGQIVNSVFKKPTMGPNGELVSLGTEPQKVVGGCEVTAILILYGLPRLLTGYILAHEMMHAWLRLNGYRNLKLELEEGICQVLGHMWLESQTYSSSAAASSASSSSRTPAANASKKGAQSDYEKKLVEFCKDQIETDDSPVYGVGFRKVNQMVSNSSLHKILKSIQHWTKPDSNL

SEQ ID NO: 20314 - DNA, 849 bp, Arabidopsis thaliana
  misc_feature (1)..(849): Ceres Seq. ID no. 13646254
cactcaagaagacatctaaagccatcaaaaatatatccatagaagcttcatcgaaatggcgaatcaagcagctgctgcagcattcttccttttcgctttagccgtcttctccaacttggagctctcagcttcttcacttgtcagtggcaagatctcttgccttgactgccaccgcgatttcgacttctcaggcattaaggtcctccttaaatgcgacggagagaagaaacaaataaccgcgatggcagctgcagacggatctttccggtcagtgcttccaacggctgacaaaaaaggctccataaattgtcttgcaaagctcttgggaggccctgagcaactctatgctcacaaacacaacttggtctctgaattggtcaagtctaaacacgattccaaagttttaactacctcaaacccacttgccttctctctctcctgccccaaaccatcccgagatgatatcggaaaattaatagtcttggaatctccgatcatacttccgatatcatctcgggatggtttggagcaggagaagaagacagaggtggttgaggagaaacagactgaggttgcggctgctgaggaagtcgccgttgagaaggccgaggagtaaagaggaaggaagaagctatatatgaccttttttggtctcatatcgttttctgtttattttattttatcaacatttcataagtattttctatgtttgttgggtttgttatgatgaaatcagatgtttggatcttttaatggttgctacattgtttacatgcttggtcgtagcaacaaagtacaaacttaaaccgmcaaaaaaaaaaaaaaaaaagcttatcgataccgtcgacc

SEQ ID NO: 20315 - protein, 186 aa, Arabidopsis thaliana
  peptide (1)..(186): Ceres Seq. ID no. 15218687
  misc_feature (157)..(186): Homolog of NCBI NO: 30682601 NR Description: expressed protein [Arabidopsis thaliana]
  misc_feature (157)..(186): Homolog of NCBI NO: 18391349 NR Description: expressed protein [Arabidopsis thaliana]
  misc_feature (1)..(131): Homolog of NCBI NO: 30683502 NR Description: expressed protein [Arabidopsis thaliana]
  misc_feature (1)..(141): Homolog of NCBI NO: 21594030 NR Description: unknown [Arabidopsis thaliana]
  misc_feature (1)..(141): Homolog of NCBI NO: 18420486 NR Description: expressed protein [Arabidopsis thaliana]
MANQAAAAAFFLFALAVFSNLELSASSLVSGKISCLDCHRDFDFSGIKVLLKCDGEKKQITAMAAADGSFRSVLPTADKKGSINCLAKLLGGPEQLYAHKHNLVSELVKSKHDSKVLTTSNPLAFSLSCPKPSRDDIGKLIVLESPIILPISSRDGLEQEKKTEVVEEKQTEVAAAEEVAVEKAEE

SEQ ID NO: 20316 - protein, 124 aa, Arabidopsis thaliana
  peptide (1)..(124): Ceres Seq. ID no. 15218688
  misc_feature (95)..(124): Homolog of NCBI NO: 30682601 NR Description: expressed protein [Arabidopsis thaliana]
  misc_feature (95)..(124): Homolog of NCBI NO: 18391349 NR Description: expressed protein [Arabidopsis thaliana]
  misc_feature (1)..(69): Homolog of NCBI NO: 30683502 NR Description: expressed protein [Arabidopsis thaliana]
  misc_feature (1)..(79): Homolog of NCBI NO: 21594030 NR Description: unknown [Arabidopsis thaliana]
  misc_feature (1)..(79): Homolog of NCBI NO: 18420486 NR Description: expressed protein [Arabidopsis thaliana]
MAAADGSFRSVLPTADKKGSINCLAKLLGGPEQLYAHKHNLVSELVKSKHDSKVLTTSNPLAFSLSCPKPSRDDIGKLIVLESPIILPISSRDGLEQEKKTEVVEEKQTEVAAAEEVAVEKAEE

SEQ ID NO: 20317 - DNA, 1826 bp, Arabidopsis thaliana
  misc_feature (1)..(1826): Ceres Seq. ID no. 13592768
  misc_feature: MA Experiment ID: 20000495 Result: Down-regulated in Transcription
  misc_feature: MA Experiment 20000495 PARAMETER Experiment Name: At_Guard_Cells_P Parameter: Harvest Date Value: 8/2/2002
  misc_feature: MA Experiment 20000495 PARAMETER Experiment Name: At_Guard_Cells_P Parameter: Organism Value: A. thaliana
  misc_feature: MA Experiment 20000495 PARAMETER Experiment Name: At_Guard_Cells_P Parameter: Tissue Value: Guard Cells vs. Leaves
aattcattccattgtcgttacctttttgtttctcagactgttaccttacctgtaaagaagagagttaaagatctattgcaaaaaaactcaacctttaatctctctgcttcttctaattaagtaatttcaactacccttttggcgaaacctctcgatctattggtttggtactgaagaaaccgacttgagtctgatttgtttttggtgaaagccatggaagctataagaaagcaagctgcgaagctcagagagcaagtcgcgaggcaacagcaagcggttttgaagcatttagggcatgttaatgctgatgctgttgttgttgatgaagaagagcttcattgtcatcagaaacttcaagatctttatagctctactaaagctgctaagcgtttgcaaaggaacattgttcgtggacttgaaggtttcattgcgactggcacaaaggttgttgagatagggttgaagtttgctgaagattttaagaaatatggagatgagaatcctgatgctaatactcctctatcaagagtcgcacatcactttgggacctcttacaagtcggtggaagacgagagggaaactctcctcggagttcttagtgagcaggtttgtgagccaattcgtacgatgatatatagtgcgcctttggaggatgctcggcatttggtgaatcactatgacaggctgagacaagaagtcgaagctcaggcaactgatgtactgaggagaagatctaagttgaaggaatctgatatttctgaagaagcctacataaaacttaagaattccgaatcgagattagctgagctcaaatcaagtatgaaaactcttggcaaagaagctactaaggccatgttggaagtcgacgatcagcaacagaacgttacttctcagcgcctccgtgctctggttgaagccgagagatcataccatcgtaatgccctcgatatccttgacaagctacatgctgagatgattgctgaggaagaagctataggagcatcaccaaagtcactgcctttacatttagaggatagtgcttctcttccccaagaagaaccgatttcaaaaccctcgggagaggtcaaatcaaaccccttgggaaagatcaaaggaagtcgtcgagaagaagtcaagtctaatccccaagaagtaaccaaacccaatcccaaggacgaaatgaagtccagtccccaagaagaaaccaaatccaatcatcagaaagaaatcaagtctagtccacaggaagagatcaagaagtccaatggatctgatgatcatcacaatcatcaacttctcagtcagaatgattcctactttcttgcaaaggttgtgcacccgtttgatgctcaagccccaggggaactcagtctcgctgtcgatgattatgtaattgtgcgacaggtggctgggacaggctggtcagaaggagaatacaagggcaaagccggatggttcccgtctgcttacgttgagaaacaagagaaagctccggcgagcaagatcgtggaatcaaacgccaagtaacaatgatccctttctttaacatatacatacaaaaagtatgtgtaagatatgattgtgtttttcttccttcttacctatcttcgtaagtaaagatatgtttccacgagtaaatatgatcttgtaagagttatgatttgtgtgttttcttccttttcttcttatgtatcaacatgagtctaactctagactcttgagtcatatctctacgcagttgtgagaatcctgttttatcttttgtttgataagatcctctgtttcttctgtaatttactctgataatgataatgatctttcttgct

SEQ ID NO: 20318 - protein, 437 aa, Arabidopsis thaliana
  peptide (1)..(437): Ceres Seq. ID no. 13592769
  misc_feature (369)..(423): Pfam Name: SH3 domain Pfam Description: SH3 domain
  misc_feature (1)..(269): Homolog of NCBI NO: 22328762 NR Description: SH3 domain-containing protein 3 [Arabidopsis
  misc_feature (363)..(429): Homolog of NCBI NO: 21928139 NR Description: AT4g18060/F15J5_30 [Arabidopsis thaliana]
  misc_feature (1)..(269): Homolog of NCBI NO: 21928139 NR Description: AT4g18060/F15J5_30 [Arabidopsis thaliana]
  misc_feature (345)..(431): Homolog of NCBI NO: 22093679 NR Description: putative SH3(Src homology) domain-containing
  misc_feature (1)..(271): Homolog of NCBI NO: 22093679 NR Description: putative SH3(Src homology) domain-containing
  misc_feature (328)..(431): Homolog of NCBI NO: 38344978 NR Description: OSJNBa0011L07.8 [Oryza sativa (japonica
  misc_feature (1)..(265): Homolog of NCBI NO: 38344978 NR Description: OSJNBa0011L07.8 [Oryza sativa (japonica
  misc_feature (322)..(433): Homolog of NCBI NO: 18418491 NR Description: SH3 domain-containing protein 2 [Arabidopsis
  misc_feature (1)..(267): Homolog of NCBI NO: 18418491 NR Description: SH3 domain-containing protein 2 [Arabidopsis
  misc_feature (1)..(437): Homolog of NCBI NO: 15221714 NR Description: SH3 domain-containing protein 1 [Arabidopsis
MEAIRKQAAKLREQVARQQQAVLKHLGHVNADAVVVDEEELHCHQKLQDLYSSTKAAKRLQRNIVRGLEGFIATGTKVVEIGLKFAEDFKKYGDENPDANTPLSRVAHHFGTSYKSVEDERETLLGVLSEQVCEPIRTMIYSAPLEDARHLVNHYDRLRQEVEAQATDVLRRRSKLKESDISEEAYIKLKNSESRLAELKSSMKTLGKEATKAMLEVDDQQQNVTSQRLRALVEAERSYHRNALDILDKLHAEMIAEEEAIGASPKSLPLHLEDSASLPQEEPISKPSGEVKSNPLGKIKGSRREEVKSNPQEVTKPNPKDEMKSSPQEETKSNHQKEIKSSPQEEIKKSNGSDDHHNHQLLSQNDSYFLAKVVHPFDAQAPGELSLAVDDYVIVRQVAGTGWSEGEYKGKAGWFPSAYVEKQEKAPASKIVESNAK

SEQ ID NO: 20319 - protein, 299 aa, Arabidopsis thaliana
  peptide (1)..(299): Ceres Seq. ID no. 13592770
  misc_feature (231)..(285): Pfam Name: SH3 domain Pfam Description: SH3 domain
  misc_feature (1)..(131): Homolog of NCBI NO: 22328762 NR Description: SH3 domain-containing protein 3 [Arabidopsis
  misc_feature (225)..(291): Homolog of NCBI NO: 21928139 NR Description: AT4g18060/F15J5_30 [Arabidopsis thaliana]
  misc_feature (1)..(131): Homolog of NCBI NO: 21928139 NR Description: AT4g18060/F15J5_30 [Arabidopsis thaliana]
  misc_feature (207)..(293): Homolog of NCBI NO: 22093679 NR Description: putative SH3(Src homology) domain-containing
  misc_feature (1)..(133): Homolog of NCBI NO: 22093679 NR Description: putative SH3(Src homology) domain-containing
  misc_feature (190)..(293): Homolog of NCBI NO: 38344978 NR Description: OSJNBa0011L07.8 [Oryza sativa (japonica
  misc_feature (1)..(127): Homolog of NCBI NO: 38344978 NR Description: OSJNBa0011L07.8 [Oryza sativa (japonica
  misc_feature (184)..(295): Homolog of NCBI NO: 18418491 NR Description: SH3 domain-containing protein 2 [Arabidopsis
  misc_feature (1)..(129): Homolog of NCBI NO: 18418491 NR Description: SH3 domain-containing protein 2 [Arabidopsis
  misc_feature (1)..(299): Homolog of NCBI NO: 15221714 NR Description: SH3 domain-containing protein 1 [Arabidopsis
MIYSAPLEDARHLVNHYDRLRQEVEAQATDVLRRRSKLKESDISEEAYIKLKNSESRLAELKSSMKTLGKEATKAMLEVDDQQQNVTSQRLRALVEAERSYHRNALDILDKLHAEMIAEEEAIGASPKSLPLHLEDSASLPQEEPISKPSGEVKSNPLGKIKGSRREEVKSNPQEVTKPNPKDEMKSSPQEETKSNHQKEIKSSPQEEIKKSNGSDDHHNHQLLSQNDSYFLAKVVHPFDAQAPGELSLAVDDYVIVRQVAGTGWSEGEYKGKAGWFPSAYVEKQEKAPASKIVESNAK

SEQ ID NO: 20320 - protein, 235 aa, Arabidopsis thaliana
  peptide (1)..(235): Ceres Seq. ID no. 13592771
  misc_feature (167)..(221): Pfam Name: SH3 domain Pfam Description: SH3 domain
  misc_feature (1)..(67): Homolog of NCBI NO: 22328762 NR Description: SH3 domain-containing protein 3 [Arabidopsis
  misc_feature (161)..(227): Homolog of NCBI NO: 21928139 NR Description: AT4g18060/F15J5_30 [Arabidopsis thaliana]
  misc_feature (1)..(67): Homolog of NCBI NO: 21928139 NR Description: AT4g18060/F15J5_30 [Arabidopsis thaliana]
  misc_feature (143)..(229): Homolog of NCBI NO: 22093679 NR Description: putative SH3(Src homology) domain-containing
  misc_feature (1)..(69): Homolog of NCBI NO: 22093679 NR Description: putative SH3(Src homology) domain-containing
  misc_feature (126)..(229): Homolog of NCBI NO: 38344978 NR Description: OSJNBa0011L07.8 [Oryza sativa (japonica
  misc_feature (1)..(63): Homolog of NCBI NO: 38344978 NR Description: OSJNBa0011L07.8 [Oryza sativa (japonica
  misc_feature (120)..(231): Homolog of NCBI NO: 18418491 NR Description: SH3 domain-containing protein 2 [Arabidopsis
  misc_feature (1)..(65): Homolog of NCBI NO: 18418491 NR Description: SH3 domain-containing protein 2 [Arabidopsis
  misc_feature (1)..(235): Homolog of NCBI NO: 15221714 NR Description: SH3 domain-containing protein 1 [Arabidopsis
MKTLGKEATKAMLEVDDQQQNVTSQRLRALVEAERSYHRNALDILDKLHAEMIAEEEAIGASPKSLPLHLEDSASLPQEEPISKPSGEVKSNPLGKIKGSRREEVKSNPQEVTKPNPKDEMKSSPQEETKSNHQKEIKSSPQEEIKKSNGSDDHHNHQLLSQNDSYFLAKVVHPFDAQAPGELSLAVDDYVIVRQVAGTGWSEGEYKGKAGWFPSAYVEKQEKAPASKIVESNAK

SEQ ID NO: 20321 - DNA, 1905 bp, Arabidopsis thaliana
  misc_feature (1)..(1905): Ceres Seq. ID no. 13486771
  misc_feature: MA Experiment ID: 20001451 Result: Up-regulated in Transcription
  misc_feature: MA Experiment 20001451 PARAMETER Experiment Name: At_Far-red-induction_P Parameter: Age (day) Value: 7
  misc_feature: MA Experiment 20001451 PARAMETER Experiment Name: At_Far-red-induction_P Parameter: Light Value: Far-red vs. White
  misc_feature: MA Experiment 20001451 PARAMETER Experiment Name: At_Far-red-induction_P Parameter: Organism Value: A. thaliana
  misc_feature: MA Experiment 20001451 PARAMETER Experiment Name: At_Far-red-induction_P Parameter: Plant Line Value: Columbia
  misc_feature: MA Experiment 20001451 PARAMETER Experiment Name: At_Far-red-induction_P Parameter: Timepoint (hr) Value: 24
  misc_feature: MA Experiment 20001451 PARAMETER Experiment Name: At_Far-red-induction_P Parameter: Tissue Value: Whole Plant
  misc_feature: MA Experiment ID: 20001905 Result: Up-regulated in Transcription
  misc_feature: MA Experiment 20001905 PARAMETER Experiment Name: At_Drought_Reproduction_P Parameter: Age (day) Value: 40
  misc_feature: MA Experiment 20001905 PARAMETER Experiment Name: At_Drought_Reproduction_P Parameter: Organism Value: A. thaliana
  misc_feature: MA Experiment 20001905 PARAMETER Experiment Name: At_Drought_Reproduction_P Parameter: Plant Line Value: WS
  misc_feature: MA Experiment 20001905 PARAMETER Experiment Name: At_Drought_Reproduction_P Parameter: Timepoint (day) Value: 10
  misc_feature: MA Experiment 20001905 PARAMETER Experiment Name: At_Drought_Reproduction_P Parameter: Tissue Value: Rosettes
  misc_feature: MA Experiment 20001905 PARAMETER Experiment Name: At_Drought_Reproduction_P Parameter: Treatment Value: Drought vs. No Drought
  misc_feature: MA Experiment ID: 20001911 Result: Up-regulated in Transcription
  misc_feature: MA Experiment 20001911 PARAMETER Experiment Name: At_Drought_Reproduction_P Parameter: Age (day) Value: 40
  misc_feature: MA Experiment 20001911 PARAMETER Experiment Name: At_Drought_Reproduction_P Parameter: Organism Value: A. thaliana
  misc_feature: MA Experiment 20001911 PARAMETER Experiment Name: At_Drought_Reproduction_P Parameter: Plant Line Value: WS
  misc_feature: MA Experiment 20001911 PARAMETER Experiment Name: At_Drought_Reproduction_P Parameter: Timepoint (day) Value: 10
  misc_feature: MA Experiment 20001911 PARAMETER Experiment Name: At_Drought_Reproduction_P Parameter: Tissue Value: Flowers
  misc_feature: MA Experiment 20001911 PARAMETER Experiment Name: At_Drought_Reproduction_P Parameter: Treatment Value: Drought vs. No Drought
acatcctaatcgaaaatccattaattctgctgctgcaaattctatcgaactggtgagttttgttaatctctttcctcgttcgtccttgtctgtatatcagatcgatctctattaccgttttagcttgttcttgatctttgtcaacataaaaacaatcaaacaaagtttcttctatgagttctggtctgaacgaagatttcctcgattgtatcgtgcgtttagaggagacacatgttcaacaaggcttcgatgagggttacgaagaaggtcttgtgtccggtcgtgaagacgctcgtcatctgggtttgaaactcgggttcgagacaggcgagctgattggattctacagaggttgctctgctctttggaattcagctctccgtattgatcctacacgcttctctcctcagctccataagcatctcaatgatttccatgtcttgctcgataaattcccgcttttggatcccgaggacgaagctaaagacgggatcaaggatgatctcagagtcaaattcagcatcatttgtgcatctctcggcttttccaagaaacaatttgagtataaaggatacccgaatccttcctccaatctcgacttttaagacctccctccatcaaaacactcttgtattgtatgtatggctttcaaagtttctctcgtttcctcaaagttkgtatttttaagagaagtgtgtgtgtagacaatctatgttttattggcttgtccttttttctggacatgtgaatgctgaccacaagtctaaatctggtggataacttcttttttagccttataatgaacaaacaaactcacatctgtagatatatatttgtataggtggtcggaggagatgttgagagaaatgcttggttgttgcaaggtttacatatctgaagcgcggaataagacggccctcgaagccattgagagagctttaaagccttttccaccagctgcaattgtcaacaagtttgaagatgcggcttatggcagggttggttacactgttgtatcctcgcttgctaacgggtcgtcttcttccttgaagaatgcggtgtttgctatggttaagactgctctcgacactatcaatcttgagttgcactgtggatcccatccccgccttggagtggttgaccacatatgctttcaccccttatctcaaacctctatagaacaagtttcttccgttgccaattcccttgcaatggatatcggctccattcttcgagttcctacatatctctatggagcagcagaaaaggagcagtgcaccctggattcgatcagaagaaagctggggtacttcaaggcaaacagggagggacatgaatgggcaggtgggtttgacctggagatggtgccactgaagccagacgcagggccacaagaggtgagcaaagccaaaggggttgtagcggttggggcgtgtgggtgggtaagtaactataacgtgcctgtcatgtcaaacgatctcaaggcagtgaggagaatagcgaggaagacgagcgagagaggagggggcttggcttcagtgcagacaatggcgctggtgcacggggaaggagtcatagaggttgcctgtaacttgttgaatccaagccaagtggggggagatgaagtacagggactgatcgagaggcttggcagagaggaaggtctgcttgtgggaaaagggtattatacggactatacacctgaccagatcgttgaaagatatatggacttgctcaacaattcataaatttcaaagtaaaaaaagtaaaaacagtatgatgttgtcattcttagaacgtattattaccgatatcgatcatttatcttcattttgtgtttagatgtgatatacattgccatgagtgacaattgaaattagcaaagattaaataaaaagtgaaatg

SEQ ID NO: 20322 - protein, 297 aa, Arabidopsis thaliana
  peptide (1)..(297): Ceres Seq. ID no. 15218567
  misc_feature (199)..(249): Pfam Name: Formiminotransferase domain Pfam Description: Formiminotransferase domain
  misc_feature (199)..(249): Pfam Name: Formiminotransferase domain Pfam Description: Formiminotransferase domain
  misc_feature (9)..(249): Homolog of NCBI NO: 13540922 NR Description: Glutamate formiminotransferase [Thermoplasma
  misc_feature (9)..(247): Homolog of NCBI NO: 20806959 NR Description: Glutamate formiminotransferase
  misc_feature (9)..(249): Homolog of NCBI NO: 28211902 NR Description: glutamate formiminotransferase [Clostridium
  misc_feature (14)..(249): Homolog of NCBI NO: 15643606 NR Description:
  misc_feature (5)..(55): Homolog of NCBI NO: 34897974 NR Description: hypothetical protein~similar to Oryza sativa
  misc_feature (9)..(249): Homolog of NCBI NO: 13540922 NR Description: Glutamate formiminotransferase [Thermoplasma
  misc_feature (9)..(249): Homolog of NCBI NO: 28211902 NR Description: glutamate formiminotransferase [Clostridium
  misc_feature (5)..(55): Homolog of NCBI NO: 34897974 NR Description: hypothetical protein~similar to Oryza sativa
  misc_feature (1)..(297): Homolog of NCBI NO: 25411995 NR Description: hypothetical protein At2g20830 [imported] -
  misc_feature (1)..(297): Homolog of NCBI NO: 18399493 NR Description: expressed protein [Arabidopsis thaliana]
  misc_feature (5)..(290): Homolog of NCBI NO: 5734618 NR Description: Similar to Arabidopsis thaliana chromosome II BAC
  misc_feature (5)..(290): Homolog of NCBI NO: 34898040 NR Description: OSJNBa0038F22.18 [Oryza sativa (japonica
  misc_feature (142)..(297): Homolog of NCBI NO: 34897974 NR Description: hypothetical protein~similar to Oryza sativa
  misc_feature (14)..(249): Homolog of NCBI NO: 15643606 NR Description:
  misc_feature (9)..(247): Homolog of NCBI NO: 20806959 NR Description: Glutamate formiminotransferase
  misc_feature (142)..(297): Homolog of NCBI NO: 34897974 NR Description: hypothetical protein~similar to Oryza sativa
  misc_feature (5)..(290): Homolog of NCBI NO: 34898040 NR Description: OSJNBa0038F22.18 [Oryza sativa (japonica
  misc_feature (5)..(290): Homolog of NCBI NO: 5734618 NR Description: Similar to Arabidopsis thaliana chromosome II BAC
  misc_feature (1)..(297): Homolog of NCBI NO: 18399493 NR Description: expressed protein [Arabidopsis thaliana]
  misc_feature (1)..(297): Homolog of NCBI NO: 25411995 NR Description: hypothetical protein At2g20830 [imported] -
MLREMLGCCKVYISEARNKTALEAIERALKPFPPAAIVNKFEDAAYGRVGYTVVSSLANGSSSSLKNAVFAMVKTALDTINLELHCGSHPRLGVVDHICFHPLSQTSIEQVSSVANSLAMDIGSILRVPTYLYGAAEKEQCTLDSIRRKLGYFKANREGHEWAGGFDLEMVPLKPDAGPQEVSKAKGVVAVGACGWVSNYNVPVMSNDLKAVRRIARKTSERGGGLASVQTMALVHGEGVIEVACNLLNPSQVGGDEVQGLIERLGREEGLLVGKGYYTDYTPDQIVERYMDLLNNS

SEQ ID NO: 20323 - protein, 293 aa, Arabidopsis thaliana
  peptide (1)..(293): Ceres Seq. ID no. 15218568
  misc_feature (195)..(245): Pfam Name: Formiminotransferase domain Pfam Description: Formiminotransferase domain
  misc_feature (195)..(245): Pfam Name: Formiminotransferase domain Pfam Description: Formiminotransferase domain
  misc_feature (5)..(245): Homolog of NCBI NO: 13540922 NR Description: Glutamate formiminotransferase [Thermoplasma
  misc_feature (5)..(243): Homolog of NCBI NO: 20806959 NR Description: Glutamate formiminotransferase
  misc_feature (5)..(245): Homolog of NCBI NO: 28211902 NR Description: glutamate formiminotransferase [Clostridium
  misc_feature (10)..(245): Homolog of NCBI NO: 15643606 NR Description:
  misc_feature (1)..(51): Homolog of NCBI NO: 34897974 NR Description: hypothetical protein~similar to Oryza sativa
  misc_feature (5)..(245): Homolog of NCBI NO: 13540922 NR Description: Glutamate formiminotransferase [Thermoplasma
  misc_feature (5)..(245): Homolog of NCBI NO: 28211902 NR Description: glutamate formiminotransferase [Clostridium
  misc_feature (1)..(51): Homolog of NCBI NO: 34897974 NR Description: hypothetical protein~similar to Oryza sativa
  misc_feature (1)..(293): Homolog of NCBI NO: 25411995 NR Description: hypothetical protein At2g20830 [imported] -
  misc_feature (1)..(293): Homolog of NCBI NO: 18399493 NR Description: expressed protein [Arabidopsis thaliana]
  misc_feature (1)..(286): Homolog of NCBI NO: 5734618 NR Description: Similar to Arabidopsis thaliana chromosome II BAC
  misc_feature (1)..(286): Homolog of NCBI NO: 34898040 NR Description: OSJNBa0038F22.18 [Oryza sativa (japonica
  misc_feature (138)..(293): Homolog of NCBI NO: 34897974 NR Description: hypothetical protein~similar to Oryza sativa
  misc_feature (10)..(245): Homolog of NCBI NO: 15643606 NR Description:
  misc_feature (5)..(243): Homolog of NCBI NO: 20806959 NR Description: Glutamate formiminotransferase
  misc_feature (138)..(293): Homolog of NCBI NO: 34897974 NR Description: hypothetical protein~similar to Oryza sativa
  misc_feature (1)..(286): Homolog of NCBI NO: 34898040 NR Description: OSJNBa0038F22.18 [Oryza sativa (japonica
  misc_feature (1)..(286): Homolog of NCBI NO: 5734618 NR Description: Similar to Arabidopsis thaliana chromosome II BAC
  misc_feature (1)..(293): Homolog of NCBI NO: 18399493 NR Description: expressed protein [Arabidopsis thaliana]
  misc_feature (1)..(293): Homolog of NCBI NO: 25411995 NR Description: hypothetical protein At2g20830 [imported] -
MLGCCKVYISEARNKTALEAIERALKPFPPAAIVNKFEDAAYGRVGYTVVSSLANGSSSSLKNAVFAMVKTALDTINLELHCGSHPRLGVVDHICFHPLSQTSIEQVSSVANSLAMDIGSILRVPTYLYGAAEKEQCTLDSIRRKLGYFKANREGHEWAGGFDLEMVPLKPDAGPQEVSKAKGVVAVGACGWVSNYNVPVMSNDLKAVRRIARKTSERGGGLASVQTMALVHGEGVIEVACNLLNPSQVGGDEVQGLIERLGREEGLLVGKGYYTDYTPDQIVERYMDLLNNS

SEQ ID NO: 20324 - protein, 226 aa, Arabidopsis thaliana
  peptide (1)..(226): Ceres Seq. ID no. 15218569
  misc_feature (128)..(178): Pfam Name: Formiminotransferase domain Pfam Description: Formiminotransferase domain
  misc_feature (128)..(178): Pfam Name: Formiminotransferase domain Pfam Description: Formiminotransferase domain
  misc_feature (1)..(176): Homolog of NCBI NO: 34540165 NR Description: formiminotransferase-cyclodeaminase-related
  misc_feature (1)..(178): Homolog of NCBI NO: 13540922 NR Description: Glutamate formiminotransferase [Thermoplasma
  misc_feature (1)..(176): Homolog of NCBI NO: 20806959 NR Description: Glutamate formiminotransferase
  misc_feature (1)..(178): Homolog of NCBI NO: 28211902 NR Description: glutamate formiminotransferase [Clostridium
  misc_feature (1)..(178): Homolog of NCBI NO: 15643606 NR Description:
  misc_feature (1)..(176): Homolog of NCBI NO: 34540165 NR Description: formiminotransferase-cyclodeaminase-related
  misc_feature (1)..(176): Homolog of NCBI NO: 20806959 NR Description: Glutamate formiminotransferase
  misc_feature (1)..(178): Homolog of NCBI NO: 15643606 NR Description:
  misc_feature (1)..(226): Homolog of NCBI NO: 25411995 NR Description: hypothetical protein At2g20830 [imported] -
  misc_feature (1)..(226): Homolog of NCBI NO: 18399493 NR Description: expressed protein [Arabidopsis thaliana]
  misc_feature (1)..(219): Homolog of NCBI NO: 5734618 NR Description: Similar to Arabidopsis thaliana chromosome II BAC
  misc_feature (1)..(219): Homolog of NCBI NO: 34898040 NR Description: OSJNBa0038F22.18 [Oryza sativa (japonica
  misc_feature (71)..(226): Homolog of NCBI NO: 34897974 NR Description: hypothetical protein~similar to Oryza sativa
  misc_feature (1)..(178): Homolog of NCBI NO: 28211902 NR Description: glutamate formiminotransferase [Clostridium
  misc_feature (1)..(178): Homolog of NCBI NO: 13540922 NR Description: Glutamate formiminotransferase [Thermoplasma
  misc_feature (71)..(226): Homolog of NCBI NO: 34897974 NR Description: hypothetical protein~similar to Oryza sativa
  misc_feature (1)..(219): Homolog of NCBI NO: 34898040 NR Description: OSJNBa0038F22.18 [Oryza sativa (japonica
  misc_feature (1)..(219): Homolog of NCBI NO: 5734618 NR Description: Similar to Arabidopsis thaliana chromosome II BAC
  misc_feature (1)..(226): Homolog of NCBI NO: 18399493 NR Description: expressed protein [Arabidopsis thaliana]
  misc_feature (1)..(226): Homolog of NCBI NO: 25411995 NR Description: hypothetical protein At2g20830 [imported] -
MVKTALDTINLELHCGSHPRLGVVDHICFHPLSQTSIEQVSSVANSLAMDIGSILRVPTYLYGAAEKEQCTLDSIRRKLGYFKANREGHEWAGGFDLEMVPLKPDAGPQEVSKAKGVVAVGACGWVSNYNVPVMSNDLKAVRRIARKTSERGGGLASVQTMALVHGEGVIEVACNLLNPSQVGGDEVQGLIERLGREEGLLVGKGYYTDYTPDQIVERYMDLLNNS

SEQ ID NO: 20325 - DNA, 1690 bp, Arabidopsis thaliana
  misc_feature (1)..(1690): Ceres Seq. ID no. 13647016
tttcttctcttcctcctacattctcgactctctctttttattagggttttcaattttaatcaaaaaaaaaccctcaaatctcatttttggatttggtttcttctgcgatctctgagattcaatttcttctatcaaaggaaacaaaaaacttcatctttccgaagattttttttccttccttctggagctcttttgaatcaggtgaatttctaattgaatctgaaagtttacgatgaacaatttgatatgatgataagttttgtttgatggagctttcaccaacaagcagtgacaagaaaacaatgaagagatggtttttcatagataaacgagttggatagagtgttattgaagataaagaaagcaaaaaacagaagttcttgcattgaagcattggttttagagtttattgaagcattgtttagagttttgattaatggatttaaactcaaaccacaaatcctctgttcttaaagatccttcaccatcagttaaccaatcaagactcggcgtgtctagtagatttatgatgagtcaatggaagaaacctgcgaaactcgatgatgttagatccaatggttggttagatgcaatgatttcatcttctccaccgcgtaagaagcttgtcaaagattttaatgttgaagttgctcctgaagatgattttgctcaacgtgcttggatggtgaaatatccttcggcgattagctcgtttgcgcatattgcagctcaagcaaagaagaaaaagattgctgtatttctagattatgatggtactctttctccaatagttgatgatcctgatcgtgccatcatgtctgatgcaatgcgttctgcggttaaagatgtcgcgagttacttcccaaccgcaataattagcggtagaagccgtgacaaggtttatcagttggtaggactaacagaactttattacgcgggtagtcatggaatggacataatgacttcttctgatggtccgaattgtttcaaatccactgaccaacagggtaaggaagtgaatctgtttcagcccgcgagagaattcataccggttatcgacgaggtttttagaacccttgttgagaaaatgaaagatatcaaaggtgcaaaagtagagaaccacaagttctgtgcatctgtacattaccgtaacgttgacgaaaaggattggcctattattgctcagcgtgttcatgaccacttgaaacaataccctcgtttgcgtctaactcatgggaggaaggttttagaggttcgtcctgtgatagactggaacaaaggaagagcggtcgagtttctattagaatctctcggattaagcaataaagacgatttgcttcctatctacattggtgatgacacaaccgatgaagatgcgttcaaggtactgagagatgggaaccgaggtttcggcatcctagtatcgtctataccgaaagaaagcaatgcgttttactcccttagagatccatccgaggtgaagaagtttctaaagactttggtgaaatgggcaaagttggagaagaattctactggtttttgaataatatagtggaattttatgattaaatgcttatttacacttttttttgtttctttaatcttttttcatctctacccagttttagtcacagcttaatttatgattttccatttatctggtggaagttaagttattaaagttacatgt

SEQ ID NO: 20326 - protein, 368 aa, Arabidopsis thaliana
  peptide (1)..(368): Ceres Seq. ID no. 13647017
  misc_feature (108)..(346): Pfam Name: Trehalose-phosphatase Pfam Description: Trehalose-phosphatase
  misc_feature (50)..(360): Homolog of NCBI NO: 15218205 NR Description: trehalose-6-phosphate phosphatase (TPPB)
  misc_feature (45)..(362): Homolog of NCBI NO: 30683008 NR Description: trehalose-6-phosphate phosphatase, putative
  misc_feature (36)..(361): Homolog of NCBI NO: 25354597 NR Description: probable trehalose-phosphatase [imported] -
  misc_feature (36)..(361): Homolog of NCBI NO: 21554408 NR Description: trehalose-phosphatase, putative [Arabidopsis
  misc_feature (36)..(361): Homolog of NCBI NO: 18399940 NR Description: trehalose-6-phosphate phosphatase, putative
  misc_feature (38)..(358): Homolog of NCBI NO: 37536726 NR Description: putative trehalose-6-phosphate phosphatase
  misc_feature (5)..(360): Homolog of NCBI NO: 30696054 NR Description: trehalose-6-phosphate phosphatase (TPPA)
  misc_feature (5)..(360): Homolog of NCBI NO: 30696058 NR Description: trehalose-6-phosphate phosphatase (TPPA)
  misc_feature (1)..(368): Homolog of NCBI NO: 15235713 NR Description: trehalose-6-phosphate phosphatase, putative
  misc_feature (1)..(368): Homolog of NCBI NO: 15234552 NR Description: trehalose-6-phosphate phosphatase, putative
MDLNSNHKSSVLKDPSPSVNQSRLGVSSRFMMSQWKKPAKLDDVRSNGWLDAMISSSPPRKKLVKDFNVEVAPEDDFAQRAWMVKYPSAISSFAHIAAQAKKKKIAVFLDYDGTLSPIVDDPDRAIMSDAMRSAVKDVASYFPTAIISGRSRDKVYQLVGLTELYYAGSHGMDIMTSSDGPNCFKSTDQQGKEVNLFQPAREFIPVIDEVFRTLVEKMKDIKGAKVENHKFCASVHYRNVDEKDWPIIAQRVHDHLKQYPRLRLTHGRKVLEVRPVIDWNKGRAVEFLLESLGLSNKDDLLPIYIGDDTTDEDAFKVLRDGNRGFGILVSSIPKESNAFYSLRDPSEVKKFLKTLVKWAKLEKNSTGF

SEQ ID NO: 20327 - protein, 338 aa, Arabidopsis thaliana
  peptide (1)..(338): Ceres Seq. ID no. 13647018
  misc_feature (78)..(316): Pfam Name: Trehalose-phosphatase Pfam Description: Trehalose-phosphatase
  misc_feature (20)..(330): Homolog of NCBI NO: 15218205 NR Description: trehalose-6-phosphate phosphatase (TPPB)
  misc_feature (15)..(332): Homolog of NCBI NO: 30683008 NR Description: trehalose-6-phosphate phosphatase, putative
  misc_feature (6)..(331): Homolog of NCBI NO: 25354597 NR Description: probable trehalose-phosphatase [imported] -
  misc_feature (6)..(331): Homolog of NCBI NO: 21554408 NR Description: trehalose-phosphatase, putative [Arabidopsis
  misc_feature (6)..(331): Homolog of NCBI NO: 18399940 NR Description: trehalose-6-phosphate phosphatase, putative
  misc_feature (8)..(328): Homolog of NCBI NO: 37536726 NR Description: putative trehalose-6-phosphate phosphatase
  misc_feature (1)..(330): Homolog of NCBI NO: 30696054 NR Description: trehalose-6-phosphate phosphatase (TPPA)
  misc_feature (1)..(330): Homolog of NCBI NO: 30696058 NR Description: trehalose-6-phosphate phosphatase (TPPA)
  misc_feature (1)..(338): Homolog of NCBI NO: 15235713 NR Description: trehalose-6-phosphate phosphatase, putative
  misc_feature (1)..(338): Homolog of NCBI NO: 15234552 NR Description: trehalose-6-phosphate phosphatase, putative
MMSQWKKPAKLDDVRSNGWLDAMISSSPPRKKLVKDFNVEVAPEDDFAQRAWMVKYPSAISSFAHIAAQAKKKKIAVFLDYDGTLSPIVDDPDRAIMSDAMRSAVKDVASYFPTAIISGRSRDKVYQLVGLTELYYAGSHGMDIMTSSDGPNCFKSTDQQGKEVNLFQPAREFIPVIDEVFRTLVEKMKDIKGAKVENHKFCASVHYRNVDEKDWPIIAQRVHDHLKQYPRLRLTHGRKVLEVRPVIDWNKGRAVEFLLESLGLSNKDDLLPIYIGDDTTDEDAFKVLRDGNRGFGILVSSIPKESNAFYSLRDPSEVKKFLKTLVKWAKLEKNSTGF

SEQ ID NO: 20328 - protein, 337 aa, Arabidopsis thaliana
  peptide (1)..(337): Ceres Seq. ID no. 13647019
  misc_feature (77)..(315): Pfam Name: Trehalose-phosphatase Pfam Description: Trehalose-phosphatase
  misc_feature (1)..(337): Homolog of NCBI NO: 15234552 NR Description: trehalose-6-phosphate phosphatase, putative
  misc_feature (19)..(329): Homolog of NCBI NO: 15218205 NR Description: trehalose-6-phosphate phosphatase (TPPB)
  misc_feature (14)..(331): Homolog of NCBI NO: 30683008 NR Description: trehalose-6-phosphate phosphatase, putative
  misc_feature (5)..(330): Homolog of NCBI NO: 25354597 NR Description: probable trehalose-phosphatase [imported] -
  misc_feature (5)..(330): Homolog of NCBI NO: 21554408 NR Description: trehalose-phosphatase, putative [Arabidopsis
  misc_feature (5)..(330): Homolog of NCBI NO: 18399940 NR Description: trehalose-6-phosphate phosphatase, putative
  misc_feature (7)..(327): Homolog of NCBI NO: 37536726 NR Description: putative trehalose-6-phosphate phosphatase
  misc_feature (1)..(329): Homolog of NCBI NO: 30696054 NR Description: trehalose-6-phosphate phosphatase (TPPA)
  misc_feature (1)..(329): Homolog of NCBI NO: 30696058 NR Description: trehalose-6-phosphate phosphatase (TPPA)
  misc_feature (1)..(337): Homolog of NCBI NO: 15235713 NR Description: trehalose-6-phosphate phosphatase, putative
MSQWKKPAKLDDVRSNGWLDAMISSSPPRKKLVKDFNVEVAPEDDFAQRAWMVKYPSAISSFAHIAAQAKKKKIAVFLDYDGTLSPIVDDPDRAIMSDAMRSAVKDVASYFPTAIISGRSRDKVYQLVGLTELYYAGSHGMDIMTSSDGPNCFKSTDQQGKEVNLFQPAREFIPVIDEVFRTLVEKMKDIKGAKVENHKFCASVHYRNVDEKDWPIIAQRVHDHLKQYPRLRLTHGRKVLEVRPVIDWNKGRAVEFLLESLGLSNKDDLLPIYIGDDTTDEDAFKVLRDGNRGFGILVSSIPKESNAFYSLRDPSEVKKFLKTLVKWAKLEKNSTGF

SEQ ID NO: 20329 - DNA, 1009 bp, Arabidopsis thaliana
  misc_feature (1)..(1009): Ceres Seq. ID no. 13648400
  misc_feature: MA Experiment ID: 20000185 Result: Up-regulated in Transcription
  misc_feature: MA Experiment 20000185 PARAMETER Experiment Name: At_Roots__P Parameter: Age (day) Value: 7 vs. 21
  misc_feature: MA Experiment 20000185 PARAMETER Experiment Name: At_Roots__P Parameter: Organism Value: A. thaliana
  misc_feature: MA Experiment 20000185 PARAMETER Experiment Name: At_Roots__P Parameter: Tissue Value: Roots vs. Whole Plant
  misc_feature: MA Experiment ID: 20000436 Result: Up-regulated in Transcription
  misc_feature: MA Experiment 20000436 PARAMETER Experiment Name: At_Drought_P Parameter: Age (day) Value: 7
  misc_feature: MA Experiment 20000436 PARAMETER Experiment Name: At_Drought_P Parameter: Organism Value: A. thaliana
  misc_feature: MA Experiment 20000436 PARAMETER Experiment Name: At_Drought_P Parameter: Plant Line Value: WS
  misc_feature: MA Experiment 20000436 PARAMETER Experiment Name: At_Drought_P Parameter: Timepoint (hr) Value: 12
  misc_feature: MA Experiment 20000436 PARAMETER Experiment Name: At_Drought_P Parameter: Tissue Value: Whole Plant
  misc_feature: MA Experiment 20000436 PARAMETER Experiment Name: At_Drought_P Parameter: Treatment Value: Drought vs. No Drought
  misc_feature: MA Experiment ID: 20000437 Result: Up-regulated in Transcription
  misc_feature: MA Experiment 20000437 PARAMETER Experiment Name: At_Drought_P Parameter: Age (day) Value: 8
  misc_feature: MA Experiment 20000437 PARAMETER Experiment Name: At_Drought_P Parameter: Organism Value: A. thaliana
  misc_feature: MA Experiment 20000437 PARAMETER Experiment Name: At_Drought_P Parameter: Plant Line Value: WS
  misc_feature: MA Experiment 20000437 PARAMETER Experiment Name: At_Drought_P Parameter: Timepoint (hr) Value: 24
  misc_feature: MA Experiment 20000437 PARAMETER Experiment Name: At_Drought_P Parameter: Tissue Value: Whole Plant
  misc_feature: MA Experiment 20000437 PARAMETER Experiment Name: At_Drought_P Parameter: Treatment Value: Drought vs. No Drought
  misc_feature: MA Experiment ID: 20000439 Result: Up-regulated in Transcription
  misc_feature: MA Experiment 20000439 PARAMETER Experiment Name: At_Roots__P Parameter: Age (day) Value: 14 vs. 21
  misc_feature: MA Experiment 20000439 PARAMETER Experiment Name: At_Roots__P Parameter: Organism Value: A. thaliana
  misc_feature: MA Experiment 20000439 PARAMETER Experiment Name: At_Roots__P Parameter: Tissue Value: Roots vs. Whole Plant
gagaataatctcctctctctctaacaaactcgcaaactcacatttgtggtactctcagtgttagacaagtccgatcaagtttaagcagtcatggcggttttgcttcctctgtttcttctctctttcatgtttacctattcaaacgcggcggtttgtgtgtgcaaggacgctaacgagctggatcttcagaaggtgatagacttcgcatgtggaggaggtgctgactgtgcacagattcagacgaccggagcttgttatcaaccaaacaccctcaagaaccactgtgacgttgccgttaacagctactatcaacagaaagcttccaccggtgccacatgtgacttcaacggcgccgccgtcatctccacttcccctccttcgactacgtcaagctgtttatctagttctagttccaacggaacccccactgccggatatccatccaccggaaattcaaccacagcaagtccaggcaccacaaatccatccacaggcaattcaacaaacagcacactacccactaatgataagccgacttcatctacgataacgtttcctgacagtactactatgggaccatctagcagcacgagtggtgatcccaacggtggagaagagctatccgtcagaaccacgacgatcatcttactgactaccatcgctgccgtggcattgagggtttaggtaagatcatctcaagatgatgacgaggacgcttatttgttgtggacggctgagataatgccaagttaattagagcctatctttcttcccaccgaattttaatctttaatttccaattaggattgtgactctcgctcgtcttcttaagtattttggtttatagaaaatcttaatcaagagcttttttcttgctttcttttgtaaatccagaaaaaatgagatgctctttgggttgtattagttttacttataattatgccttcgccaataaagataacatgtttctcgaaaaaaaaaaaaaaaaaaactcgagggggggcccggt

SEQ ID NO: 20330 - protein, 197 aa, Arabidopsis thaliana
  peptide (1)..(197): Ceres Seq. ID no. 13648401
  misc_feature (92)..(195): Pfam Name: Mucin-like glycoprotein Pfam Description: Mucin-like glycoprotein
  misc_feature (1)..(152): Homolog of NCBI NO: 15241485 NR Description: glycosyl hydrolase family 17 [Arabidopsis
  misc_feature (1)..(160): Homolog of NCBI NO: 21592859 NR Description: unknown [Arabidopsis thaliana]
  misc_feature (1)..(133): Homolog of NCBI NO: 22325443 NR Description: glycosyl hydrolase family 17 [Arabidopsis
  misc_feature (1)..(191): Homolog of NCBI NO: 22775658 NR Description: contains ESTs
  misc_feature (1)..(187): Homolog of NCBI NO: 30683485 NR Description: expressed protein [Arabidopsis thaliana]
  misc_feature (1)..(155): Homolog of NCBI NO: 18394637 NR Description: glycosyl hydrolase family 17 [Arabidopsis
  misc_feature (1)..(190): Homolog of NCBI NO: 25404810 NR Description: unknown protein, 45065-49536 [imported] -
  misc_feature (1)..(190): Homolog of NCBI NO: 21553768 NR Description: unknown [Arabidopsis thaliana]
  misc_feature (1)..(190): Homolog of NCBI NO: 18409239 NR Description: expressed protein [Arabidopsis thaliana]
  misc_feature (1)..(197): Homolog of NCBI NO: 15222715 NR Description: glycosyl hydrolase family 17 [Arabidopsis
MAVLLPLFLLSFMFTYSNAAVCVCKDANELDLQKVIDFACGGGADCAQIQTTGACYQPNTLKNHCDVAVNSYYQQKASTGATCDFNGAAVISTSPPSTTSSCLSSSSSNGTPTAGYPSTGNSTTASPGTTNPSTGNSTNSTLPTNDKPTSSTITFPDSTTMGPSSSTSGDPNGGEELSVRTTTIILLTTIAAVALRV

SEQ ID NO: 20331 - protein, 185 aa, Arabidopsis thaliana
  peptide (1)..(185): Ceres Seq. ID no. 13648402
  misc_feature (80)..(183): Pfam Name: Mucin-like glycoprotein Pfam Description: Mucin-like glycoprotein
  misc_feature (1)..(140): Homolog of NCBI NO: 15241485 NR Description: glycosyl hydrolase family 17 [Arabidopsis
  misc_feature (1)..(148): Homolog of NCBI NO: 21592859 NR Description: unknown [Arabidopsis thaliana]
  misc_feature (1)..(121): Homolog of NCBI NO: 22325443 NR Description: glycosyl hydrolase family 17 [Arabidopsis
  misc_feature (1)..(179): Homolog of NCBI NO: 22775658 NR Description: contains ESTs
  misc_feature (1)..(175): Homolog of NCBI NO: 30683485 NR Description: expressed protein [Arabidopsis thaliana]
  misc_feature (1)..(143): Homolog of NCBI NO: 18394637 NR Description: glycosyl hydrolase family 17 [Arabidopsis
  misc_feature (1)..(178): Homolog of NCBI NO: 25404810 NR Description: unknown protein, 45065-49536 [imported] -
  misc_feature (1)..(178): Homolog of NCBI NO: 21553768 NR Description: unknown [Arabidopsis thaliana]
  misc_feature (1)..(178): Homolog of NCBI NO: 18409239 NR Description: expressed protein [Arabidopsis thaliana]
  misc_feature (1)..(185): Homolog of NCBI NO: 15222715 NR Description: glycosyl hydrolase family 17 [Arabidopsis
MFTYSNAAVCVCKDANELDLQKVIDFACGGGADCAQIQTTGACYQPNTLKNHCDVAVNSYYQQKASTGATCDFNGAAVISTSPPSTTSSCLSSSSSNGTPTAGYPSTGNSTTASPGTTNPSTGNSTNSTLPTNDKPTSSTITFPDSTTMGPSSSTSGDPNGGEELSVRTTTIILLTTIAAVALRV

SEQ ID NO: 20332 - DNA, 643 bp, Arabidopsis thaliana
  misc_feature (1)..(643): Ceres Seq. ID no. 13648014
ggtcaacacgaaaaagatctaaacatctaccaaacacaatccaaatatatatgtaaaaatgcaaaacctctcaatactacttgtgtgtagcttttgcatacttggccatgtatctagcgctggaatcaggattggtaacgaactcaaaaacaaaaaactcttatggatgagatgttattccaaagatgacgttataggtccattaataataccgatcggagggcataggttcaattattttggtaccaacatatttgctacgactcgtttcatgtgtaccttgagacaagtgcctaattatagacaccatcaaaactttacagcatttaaactttacagtgcttcagatgatggaggcgtatgggattggagagaaagagaagatgggatctatctaaagataaaagctgagagaggtgttaatagaccggtttttatgcataaaaaatatgattggatatattaaaaacgttaacaagctatttgaatgtaagaagatttaaatttttaatattcaatgagagtgtaaaatgataataacattatttgtattgtgttgagtatatcatttatgtataaaatctaaaatttgtatgttatacatttcattatttgtaaatctataataaaacaaatgttattc

SEQ ID NO: 20333 - protein, 135 aa, Arabidopsis thaliana
  peptide (1)..(135): Ceres Seq. ID no. 13648015
  misc_feature (21)..(122): Pfam Name: Plant self-incompatibility protein S1 Pfam Description: Plant self-incompatibility protein S1
  misc_feature (1)..(92): Homolog of NCBI NO: 25412260 NR Description: hypothetical protein At2g24880 [imported] -
  misc_feature (1)..(101): Homolog of NCBI NO: 18400667 NR Description: self-incompatibility protein-related [Arabidopsis
  misc_feature (14)..(129): Homolog of NCBI NO: 25412258 NR Description: hypothetical protein At2g24870 [imported] -
  misc_feature (14)..(129): Homolog of NCBI NO: 18400665 NR Description: self-incompatibility protein-related [Arabidopsis
  misc_feature (1)..(123): Homolog of NCBI NO: 15236527 NR Description: RNA-binding protein-related [Arabidopsis
  misc_feature (1)..(134): Homolog of NCBI NO: 15231636 NR Description: self-incompatibility protein-related [Arabidopsis
  misc_feature (7)..(134): Homolog of NCBI NO: 9279785 NR Description: gb|AAC28191.1~gene_id:F21A17.7~similar to unknown
  misc_feature (1)..(134): Homolog of NCBI NO: 15232231 NR Description: self-incompatibility protein-related [Arabidopsis
  misc_feature (1)..(135): Homolog of NCBI NO: 25405865 NR Description: protein F9C16.21 [imported] - Arabidopsis
  misc_feature (1)..(122): Homolog of NCBI NO: 15231635 NR Description: self-incompatibility protein-related [Arabidopsis
MQNLSILLVCSFCILGHVSSAGIRIGNELKNKKLLWMRCYSKDDVIGPLIIPIGGHRFNYFGTNIFATTRFMCTLRQVPNYRHHQNFTAFKLYSASDDGGVWDWREREDGIYLKIKAERGVNRPVFMHKKYDWIY

SEQ ID NO: 20334 - protein, 99 aa, Arabidopsis thaliana
  peptide (1)..(99): Ceres Seq. ID no. 13648016
  misc_feature (1)..(86): Pfam Name: Plant self-incompatibility protein S1 Pfam Description: Plant self-incompatibility protein S1
  misc_feature (1)..(56): Homolog of NCBI NO: 25412260 NR Description: hypothetical protein At2g24880 [imported] -
  misc_feature (1)..(65): Homolog of NCBI NO: 18400667 NR Description: self-incompatibility protein-related [Arabidopsis
  misc_feature (1)..(93): Homolog of NCBI NO: 25412258 NR Description: hypothetical protein At2g24870 [imported] -
  misc_feature (1)..(93): Homolog of NCBI NO: 18400665 NR Description: self-incompatibility protein-related [Arabidopsis
  misc_feature (1)..(87): Homolog of NCBI NO: 15236527 NR Description: RNA-binding protein-related [Arabidopsis
  misc_feature (1)..(98): Homolog of NCBI NO: 15231636 NR Description: self-incompatibility protein-related [Arabidopsis
  misc_feature (1)..(98): Homolog of NCBI NO: 9279785 NR Description: gb|AAC28191.1~gene_id:F21A17.7~similar to unknown
  misc_feature (1)..(98): Homolog of NCBI NO: 15232231 NR Description: self-incompatibility protein-related [Arabidopsis
  misc_feature (1)..(99): Homolog of NCBI NO: 25405865 NR Description: protein F9C16.21 [imported] - Arabidopsis
  misc_feature (1)..(86): Homolog of NCBI NO: 15231635 NR Description: self-incompatibility protein-related [Arabidopsis
MRCYSKDDVIGPLIIPIGGHRFNYFGTNIFATTRFMCTLRQVPNYRHHQNFTAFKLYSASDDGGVWDWREREDGIYLKIKAERGVNRPVFMHKKYDWIY

SEQ ID NO: 20335 - DNA, 1146 bp, Arabidopsis thaliana
  misc_feature (1)..(1146): Ceres Seq. ID no. 13648017
  misc_feature: MA Experiment ID: 20000286 Result: Up-regulated in Transcription
  misc_feature: MA Experiment 20000286 PARAMETER Experiment Name: At_Open_Flower_P Parameter: Age (day) Value: 21
  misc_feature: MA Experiment 20000286 PARAMETER Experiment Name: At_Open_Flower_P Parameter: Plant Line Value: WS
  misc_feature: MA Experiment 20000286 PARAMETER Experiment Name: At_Open_Flower_P Parameter: Tissue Value: Half Open vs. Whole Plant
  misc_feature: MA Experiment ID: 20000495 Result: Up-regulated in Transcription
  misc_feature: MA Experiment 20000495 PARAMETER Experiment Name: At_Guard_Cells_P Parameter: Harvest Date Value: 8/2/2002
  misc_feature: MA Experiment 20000495 PARAMETER Experiment Name: At_Guard_Cells_P Parameter: Organism Value: A. thaliana
  misc_feature: MA Experiment 20000495 PARAMETER Experiment Name: At_Guard_Cells_P Parameter: Tissue Value: Guard Cells vs. Leaves
  misc_feature: MA Experiment ID: 20001911 Result: Down-regulated in Transcription
  misc_feature: MA Experiment 20001911 PARAMETER Experiment Name: At_Drought_Reproduction_P Parameter: Age (day) Value: 40
  misc_feature: MA Experiment 20001911 PARAMETER Experiment Name: At_Drought_Reproduction_P Parameter: Organism Value: A. thaliana
  misc_feature: MA Experiment 20001911 PARAMETER Experiment Name: At_Drought_Reproduction_P Parameter: Plant Line Value: WS
  misc_feature: MA Experiment 20001911 PARAMETER Experiment Name: At_Drought_Reproduction_P Parameter: Timepoint (day) Value: 10
  misc_feature: MA Experiment 20001911 PARAMETER Experiment Name: At_Drought_Reproduction_P Parameter: Tissue Value: Flowers
  misc_feature: MA Experiment 20001911 PARAMETER Experiment Name: At_Drought_Reproduction_P Parameter: Treatment Value: Drought vs. No Drought
gaattcttactaaaaaaacacaacgaactcaaatcttcaatcttcatcttactctctaattgctttcctattccgatctctgtttcttcataaagtctcaatctttttttctctatggccggaactaaagattctcatgtagtggagattccagtagatgaagagcataaagagagacaacaacaacaacagttggttgcggtctcaaatccgggaatgggaatactcaaagtgattcagcagcatccgttgtctgaaatctcagagagtccaggacatttgttgcttttgaagttatggcaaagagaagaagatttgttctgtcgtcgtgttcttcttaaagaatcaagactagagtcaatcaaaagagagatctttcagctttgttgtttcttcctagtcttccatgggttcttcttcacacttgtctactcttcttcttgttctgatgatgctgacgtggtgaaaagtaatgcggtttgcaagaaatggtggataccttctgcagtgtcattagctacttcattggttctggtgtttcttgttcaagctaagctgtttgtgttctggaaagtttacagaggtgttaatagggagaggaatgataatagaacgcttacacggtgtgttttggagttgaggatgaaagggtcgagctttgatttgtcgaaagagccgatgagtgggaagaggatgaagagttcaagcgttgagatcaagtggaaacctgttacttggttctctcagtatttgataactattgttcttctttgctctgcagggttgttcttcccggtctcaaagttcatcctctgcggattttgacaaactcttcctattcactgtttgttcggactctgcattctttcttcaaccttcattgtggggatgatgcttttggtccgatcttaccattggcctctgttctagctttgagagagtagctgtcaaatctcccagactgaagattcgccggagggaataagaacaacctgtaacttttagcagtactcacacatagtagaaaattgatgtaattcgggattagaattctgatcttgatcttattaatttcattcttcgttaataataaacaacattgcttgtatagtaacaaatttttgcaataaataaaatgccagattc

SEQ ID NO: 20336 - protein, 236 aa, Arabidopsis thaliana
  peptide (1)..(236): Ceres Seq. ID no. 13648018
  misc_feature (43)..(222): Homolog of NCBI NO: 34897044 NR Description: hypothetical protein [Oryza sativa (japonica
  misc_feature (31)..(234): Homolog of NCBI NO: 15230623 NR Description: hypothetical protein [Arabidopsis thaliana]
  misc_feature (8)..(234): Homolog of NCBI NO: 5257261 NR Description: hypothetical protein [Oryza sativa (japonica
  misc_feature (1)..(228): Homolog of NCBI NO: 9758632 NR Description: dbj|BAA81760.1~gene_id:MDA7.18~similar to unknown
  misc_feature (1)..(236): Homolog of NCBI NO: 30696692 NR Description: expressed protein [Arabidopsis thaliana]
MAGTKDSHVVEIPVDEEHKERQQQQQLVAVSNPGMGILKVIQQHPLSEISESPGHLLLLKLWQREEDLFCRRVLLKESRLESIKREIFQLCCFFLVFHGFFFTLVYSSSCSDDADVVKSNAVCKKWWIPSAVSLATSLVLVFLVQAKLFVFWKVYRGVNRERNDNRTLTRCVLELRMKGSSFDLSKEPMSGKRMKSSSVEIKWKPVTWFSQYLITIVLLCSAGLFFPVSKFILCGF

SEQ ID NO: 20337 - protein, 202 aa, Arabidopsis thaliana
  peptide (1)..(202): Ceres Seq. ID no. 13648019
  misc_feature (9)..(188): Homolog of NCBI NO: 34897044 NR Description: hypothetical protein [Oryza sativa (japonica
  misc_feature (1)..(200): Homolog of NCBI NO: 15230623 NR Description: hypothetical protein [Arabidopsis thaliana]
  misc_feature (1)..(200): Homolog of NCBI NO: 5257261 NR Description: hypothetical protein [Oryza sativa (japonica
  misc_feature (1)..(194): Homolog of NCBI NO: 9758632 NR Description: dbj|BAA81760.1~gene_id:MDA7.18~similar to unknown
  misc_feature (1)..(202): Homolog of NCBI NO: 30696692 NR Description: expressed protein [Arabidopsis thaliana]
MGILKVIQQHPLSEISESPGHLLLLKLWQREEDLFCRRVLLKESRLESIKREIFQLCCFFLVFHGFFFTLVYSSSCSDDADVVKSNAVCKKWWIPSAVSLATSLVLVFLVQAKLFVFWKVYRGVNRERNDNRTLTRCVLELRMKGSSFDLSKEPMSGKRMKSSSVEIKWKPVTWFSQYLITIVLLCSAGLFFPVSKFILCGF

SEQ ID NO: 20338 - DNA, 1289 bp, Arabidopsis thaliana
  misc_feature (1)..(1289): Ceres Seq. ID no. 14302919
  misc_feature: MA Experiment ID: 20000169 Result: Down-regulated in Transcription
  misc_feature: MA Experiment 20000169 PARAMETER Experiment Name: At_100uM_ABA_P Parameter: Age (day) Value: 14
  misc_feature: MA Experiment 20000169 PARAMETER Experiment Name: At_100uM_ABA_P Parameter: Organism Value: A. thaliana
  misc_feature: MA Experiment 20000169 PARAMETER Experiment Name: At_100uM_ABA_P Parameter: Plant Line Value: WS
  misc_feature: MA Experiment 20000169 PARAMETER Experiment Name: At_100uM_ABA_P Parameter: Timepoint (hr) Value: 6
  misc_feature: MA Experiment 20000169 PARAMETER Experiment Name: At_100uM_ABA_P Parameter: Tissue Value: Aerial
  misc_feature: MA Experiment 20000169 PARAMETER Experiment Name: At_100uM_ABA_P Parameter: Treatment Value: 100uM ABA vs. No Treatment
  misc_feature: MA Experiment ID: 20000184 Result: Up-regulated in Transcription
  misc_feature: MA Experiment 20000184 PARAMETER Experiment Name: At_Shoots__P Parameter: Age (day) Value: 7
  misc_feature: MA Experiment 20000184 PARAMETER Experiment Name: At_Shoots__P Parameter: Tissue Value: Shoots vs. Whole Plant
  misc_feature: MA Experiment ID: 20000185 Result: Down-regulated in Transcription
  misc_feature: MA Experiment 20000185 PARAMETER Experiment Name: At_Roots__P Parameter: Age (day) Value: 7 vs. 21
  misc_feature: MA Experiment 20000185 PARAMETER Experiment Name: At_Roots__P Parameter: Organism Value: A. thaliana
  misc_feature: MA Experiment 20000185 PARAMETER Experiment Name: At_Roots__P Parameter: Tissue Value: Roots vs. Whole Plant
  misc_feature: MA Experiment ID: 20000437 Result: Down-regulated in Transcription
  misc_feature: MA Experiment 20000437 PARAMETER Experiment Name: At_Drought_P Parameter: Age (day) Value: 8
  misc_feature: MA Experiment 20000437 PARAMETER Experiment Name: At_Drought_P Parameter: Organism Value: A. thaliana
  misc_feature: MA Experiment 20000437 PARAMETER Experiment Name: At_Drought_P Parameter: Plant Line Value: WS
  misc_feature: MA Experiment 20000437 PARAMETER Experiment Name: At_Drought_P Parameter: Timepoint (hr) Value: 24
  misc_feature: MA Experiment 20000437 PARAMETER Experiment Name: At_Drought_P Parameter: Tissue Value: Whole Plant
  misc_feature: MA Experiment 20000437 PARAMETER Experiment Name: At_Drought_P Parameter: Treatment Value: Drought vs. No Drought
  misc_feature: MA Experiment ID: 20000438 Result: Up-regulated in Transcription
  misc_feature: MA Experiment 20000438 PARAMETER Experiment Name: At_Shoots__P Parameter: Age (day) Value: 14
  misc_feature: MA Experiment 20000438 PARAMETER Experiment Name: At_Shoots__P Parameter: Tissue Value: Shoots vs. Whole Plant
  misc_feature: MA Experiment ID: 20000439 Result: Down-regulated in Transcription
  misc_feature: MA Experiment 20000439 PARAMETER Experiment Name: At_Roots__P Parameter: Age (day) Value: 14 vs. 21
  misc_feature: MA Experiment 20000439 PARAMETER Experiment Name: At_Roots__P Parameter: Organism Value: A. thaliana
  misc_feature: MA Experiment 20000439 PARAMETER Experiment Name: At_Roots__P Parameter: Tissue Value: Roots vs. Whole Plant
  misc_feature: MA Experiment ID: 20000574 Result: Down-regulated in Transcription
  misc_feature: MA Experiment 20000574 PARAMETER Experiment Name: At_100uM_ABA_Mutants__P Parameter: Organism Value: A. thaliana
  misc_feature: MA Experiment 20000574 PARAMETER Experiment Name: At_100uM_ABA_Mutants__P Parameter: Plant Line Value: CS23 vs. Ler wt
  misc_feature: MA Experiment 20000574 PARAMETER Experiment Name: At_100uM_ABA_Mutants__P Parameter: Timepoint (hr) Value: N/A
  misc_feature: MA Experiment 20000574 PARAMETER Experiment Name: At_100uM_ABA_Mutants__P Parameter: Tissue Value: Whole Plant
  misc_feature: MA Experiment 20000574 PARAMETER Experiment Name: At_100uM_ABA_Mutants__P Parameter: Treatment Value: None
  misc_feature: MA Experiment ID: 20000794 Result: Down-regulated in Transcription
  misc_feature: MA Experiment 20000794 PARAMETER Experiment Name: At_Petals_P Parameter: Age (day) Value: 23-25 days
  misc_feature: MA Experiment 20000794 PARAMETER Experiment Name: At_Petals_P Parameter: Plant Line Value: WS
  misc_feature: MA Experiment 20000794 PARAMETER Experiment Name: At_Petals_P Parameter: Tissue Value: Petals vs. Whole plant
  misc_feature: MA Experiment ID: 20001248 Result: Up-regulated in Transcription
  misc_feature: MA Experiment 20001248 PARAMETER Experiment Name: At_Far-red-induction_P Parameter: Age (day) Value: 7
  misc_feature: MA Experiment 20001248 PARAMETER Experiment Name: At_Far-red-induction_P Parameter: Light Value: Far-red vs. White
  misc_feature: MA Experiment 20001248 PARAMETER Experiment Name: At_Far-red-induction_P Parameter: Organism Value: A. thaliana
  misc_feature: MA Experiment 20001248 PARAMETER Experiment Name: At_Far-red-induction_P Parameter: Plant Line Value: Columbia
  misc_feature: MA Experiment 20001248 PARAMETER Experiment Name: At_Far-red-induction_P Parameter: Timepoint (hr) Value: 4
  misc_feature: MA Experiment 20001248 PARAMETER Experiment Name: At_Far-red-induction_P Parameter: Tissue Value: Whole Plant
  misc_feature: MA Experiment ID: 20001560 Result: Down-regulated in Transcription
  misc_feature: MA Experiment 20001560 PARAMETER Experiment Name: At_Drought_Soil_Dry_P Parameter: Age (day) Value: 28
  misc_feature: MA Experiment 20001560 PARAMETER Experiment Name: At_Drought_Soil_Dry_P Parameter: Organism Value: A. thaliana
  misc_feature: MA Experiment 20001560 PARAMETER Experiment Name: At_Drought_Soil_Dry_P Parameter: Plant Line Value: WS
  misc_feature: MA Experiment 20001560 PARAMETER Experiment Name: At_Drought_Soil_Dry_P Parameter: Post Timepoint (hr) Value: None
  misc_feature: MA Experiment 20001560 PARAMETER Experiment Name: At_Drought_Soil_Dry_P Parameter: Post-Treatment Value: None
  misc_feature: MA Experiment 20001560 PARAMETER Experiment Name: At_Drought_Soil_Dry_P Parameter: Timepoint (day) Value: 14
  misc_feature: MA Experiment 20001560 PARAMETER Experiment Name: At_Drought_Soil_Dry_P Parameter: Treatment Value: Drought vs. No Drought
  misc_feature: MA Experiment ID: 20001757 Result: Up-regulated in Transcription
  misc_feature: MA Experiment 20001757 PARAMETER Experiment Name: At_50mM_NH4NO3_L-to-H_P Parameter: Timepoint (hr) Value: 6
  misc_feature: MA Experiment 20001757 PARAMETER Experiment Name: At_50mM_NH4NO3_L-to-H_P Parameter: Tissue Value: Leaf
  misc_feature: MA Experiment 20001757 PARAMETER Experiment Name: At_50mM_NH4NO3_L-to-H_P Parameter: Treatment Value: 50mM NH4NO3 vs 100mM Mannitol
  misc_feature: MA Experiment ID: 20001904 Result: Down-regulated in Transcription
  misc_feature: MA Experiment 20001904 PARAMETER Experiment Name: At_Drought_Reproduction_P Parameter: Age (day) Value: 37
  misc_feature: MA Experiment 20001904 PARAMETER Experiment Name: At_Drought_Reproduction_P Parameter: Organism Value: A. thaliana
  misc_feature: MA Experiment 20001904 PARAMETER Experiment Name: At_Drought_Reproduction_P Parameter: Plant Line Value: WS
  misc_feature: MA Experiment 20001904 PARAMETER Experiment Name: At_Drought_Reproduction_P Parameter: Timepoint (day) Value: 7
  misc_feature: MA Experiment 20001904 PARAMETER Experiment Name: At_Drought_Reproduction_P Parameter: Tissue Value: Rosettes
  misc_feature: MA Experiment 20001904 PARAMETER Experiment Name: At_Drought_Reproduction_P Parameter: Treatment Value: Drought vs. No Drought
  misc_feature: MA Experiment ID: 20001905 Result: Down-regulated in Transcription
  misc_feature: MA Experiment 20001905 PARAMETER Experiment Name: At_Drought_Reproduction_P Parameter: Age (day) Value: 40
  misc_feature: MA Experiment 20001905 PARAMETER Experiment Name: At_Drought_Reproduction_P Parameter: Organism Value: A. thaliana
  misc_feature: MA Experiment 20001905 PARAMETER Experiment Name: At_Drought_Reproduction_P Parameter: Plant Line Value: WS
  misc_feature: MA Experiment 20001905 PARAMETER Experiment Name: At_Drought_Reproduction_P Parameter: Timepoint (day) Value: 10
  misc_feature: MA Experiment 20001905 PARAMETER Experiment Name: At_Drought_Reproduction_P Parameter: Tissue Value: Rosettes
  misc_feature: MA Experiment 20001905 PARAMETER Experiment Name: At_Drought_Reproduction_P Parameter: Treatment Value: Drought vs. No Drought
ggtactgctgcacaagtgtagaggcagtggcacaacatctttaagaaagagagagagaaagagtcatttattcatttcctcgcttaaaaatcttgagcacccagacagaattcttctttcttctttctggggttgagaaaaatgagtgaaagagatgatggattggggctaagtttgagcttgagtttaggttttaatcaaaaggacccgtcctcgaggttaaatccaatgcctctggcttcttatgcatcttcatcacacatgcagcatatgcagcagagcaattataaccatcctcaaaagattcagaacacttggattaacatgtttcagtcatcagagagaaactcggacatgagatcgtttctccggggaatagacgtaaacagagctccatcgacggtggtggttgacgtggaggatgaaggcgccggagtttcgtctccgaacagcaccgtctcaagcgtgatgagcgggaagaggagcgagcgagagctaatggctgcggcagctgcagttggaggaggaggtagagtagaagataatgagattgagagagcttcttgctcgctcggcggtggtagcgacgatgaagacggtagcgggaacggagatgactgttcgaggaagaaactccgattgtctaaagaacaagctttggttcttgaagaaacttttaaagaacatagtacactcaatccgaagcaaaagatggctttggctaagcaattgaatctgaggacgagacaagttgaagtgtggttccaaaaccgaagggcaaggacgaagctgaagcaaacggaagtagactgtgaatatcttaagagatgttgcgagaatctaacggatgagaatcggagattgcaaaaggaagtgagtgagcttagggctttaaagctttctccacacttatacatgcacatgaaacctcccactactctcacaatgtgtccttcttgcgagcgagtcgctgttacgtcatcttcgtcatcggtggctcctcctgtgatgaattcatcgtctccgatgggtccgatgagtccgatgagtccgtgggctgccatgcctctacggcaacgacctgctgctggttctcattagagtttaattagtctaaagataataggtttggtgatttgtttttattatatcgttgaacggacttggaagttcttttcaagagttggtcccatgctcttctttcctttgttttattcagtttctatttatagctgaattctggataatggaaaatctactaatattattgtccaattattagtttgggg

SEQ ID NO: 20339 - protein, 319 aa, Arabidopsis thaliana
  peptide (1)..(319): Ceres Seq. ID no. 14302920
  misc_feature (1)..(120): Pfam Name: HD-ZIP protein N terminus Pfam Description: HD-ZIP protein N terminus
  misc_feature (71)..(283): Homolog of NCBI NO: 15238078 NR Description: homeobox-leucine zipper protein HAT2 (HD-ZIP
  misc_feature (133)..(308): Homolog of NCBI NO: 25457630 NR Description: homeobox protein THOM1 [imported] - tomato
  misc_feature (59)..(283): Homolog of NCBI NO: 21592922 NR Description: homeobox-leucine zipper protein HAT1 (hd-zip
  misc_feature (59)..(283): Homolog of NCBI NO: 15236076 NR Description: homeobox-leucine zipper protein HAT1 (HD-Zip
  misc_feature (12)..(315): Homolog of NCBI NO: 18034437 NR Description: homeodomain leucine zipper protein CPHB-3
  misc_feature (1)..(313): Homolog of NCBI NO: 15225368 NR Description: homeobox-leucine zipper protein Athb-4
  misc_feature (1)..(319): Homolog of NCBI NO: 25453563 NR Description: homeobox protein HAT3 [imported] - Arabidopsis
  misc_feature (1)..(319): Homolog of NCBI NO: 15232311 NR Description: homeobox-leucine zipper protein HAT3 [Arabidopsis
MSERDDGLGLSLSLSLGFNQKDPSSRLNPMPLASYASSSHMQHMQQSNYNHPQKIQNTWINMFQSSERNSDMRSFLRGIDVNRAPSTVVVDVEDEGAGVSSPNSTVSSVMSGKRSERELMAAAAAVGGGGRVEDNEIERASCSLGGGSDDEDGSGNGDDCSRKKLRLSKEQALVLEETFKEHSTLNPKQKMALAKQLNLRTRQVEVWFQNRRARTKLKQTEVDCEYLKRCCENLTDENRRLQKEVSELRALKLSPHLYMHMKPPTTLTMCPSCERVAVTSSSSSVAPPVMNSSSPMGPMSPMSPWAAMPLRQRPAAGSH

SEQ ID NO: 20340 - protein, 290 aa, Arabidopsis thaliana
  peptide (1)..(290): Ceres Seq. ID no. 14302921
  misc_feature (1)..(91): Pfam Name: HD-ZIP protein N terminus Pfam Description: HD-ZIP protein N terminus
  misc_feature (42)..(254): Homolog of NCBI NO: 15238078 NR Description: homeobox-leucine zipper protein HAT2 (HD-ZIP
  misc_feature (104)..(279): Homolog of NCBI NO: 25457630 NR Description: homeobox protein THOM1 [imported] - tomato
  misc_feature (30)..(254): Homolog of NCBI NO: 21592922 NR Description: homeobox-leucine zipper protein HAT1 (hd-zip
  misc_feature (30)..(254): Homolog of NCBI NO: 15236076 NR Description: homeobox-leucine zipper protein HAT1 (HD-Zip
  misc_feature (1)..(286): Homolog of NCBI NO: 18034437 NR Description: homeodomain leucine zipper protein CPHB-3
  misc_feature (1)..(284): Homolog of NCBI NO: 15225368 NR Description: homeobox-leucine zipper protein Athb-4
  misc_feature (1)..(290): Homolog of NCBI NO: 25453563 NR Description: homeobox protein HAT3 [imported] - Arabidopsis
  misc_feature (1)..(290): Homolog of NCBI NO: 15232311 NR Description: homeobox-leucine zipper protein HAT3 [Arabidopsis
MPLASYASSSHMQHMQQSNYNHPQKIQNTWINMFQSSERNSDMRSFLRGIDVNRAPSTVVVDVEDEGAGVSSPNSTVSSVMSGKRSERELMAAAAAVGGGGRVEDNEIERASCSLGGGSDDEDGSGNGDDCSRKKLRLSKEQALVLEETFKEHSTLNPKQKMALAKQLNLRTRQVEVWFQNRRARTKLKQTEVDCEYLKRCCENLTDENRRLQKEVSELRALKLSPHLYMHMKPPTTLTMCPSCERVAVTSSSSSVAPPVMNSSSPMGPMSPMSPWAAMPLRQRPAAGSH

SEQ ID NO: 20341 - protein, 279 aa, Arabidopsis thaliana
  peptide (1)..(279): Ceres Seq. ID no. 14302922
  misc_feature (1)..(80): Pfam Name: HD-ZIP protein N terminus Pfam Description: HD-ZIP protein N terminus
  misc_feature (31)..(243): Homolog of NCBI NO: 15238078 NR Description: homeobox-leucine zipper protein HAT2 (HD-ZIP
  misc_feature (93)..(268): Homolog of NCBI NO: 25457630 NR Description: homeobox protein THOM1 [imported] - tomato
  misc_feature (19)..(243): Homolog of NCBI NO: 21592922 NR Description: homeobox-leucine zipper protein HAT1 (hd-zip
  misc_feature (19)..(243): Homolog of NCBI NO: 15236076 NR Description: homeobox-leucine zipper protein HAT1 (HD-Zip
  misc_feature (1)..(275): Homolog of NCBI NO: 18034437 NR Description: homeodomain leucine zipper protein CPHB-3
  misc_feature (1)..(273): Homolog of NCBI NO: 15225368 NR Description: homeobox-leucine zipper protein Athb-4
  misc_feature (1)..(279): Homolog of NCBI NO: 25453563 NR Description: homeobox protein HAT3 [imported] - Arabidopsis
  misc_feature (1)..(279): Homolog of NCBI NO: 15232311 NR Description: homeobox-leucine zipper protein HAT3 [Arabidopsis
MQHMQQSNYNHPQKIQNTWINMFQSSERNSDMRSFLRGIDVNRAPSTVVVDVEDEGAGVSSPNSTVSSVMSGKRSERELMAAAAAVGGGGRVEDNEIERASCSLGGGSDDEDGSGNGDDCSRKKLRLSKEQALVLEETFKEHSTLNPKQKMALAKQLNLRTRQVEVWFQNRRARTKLKQTEVDCEYLKRCCENLTDENRRLQKEVSELRALKLSPHLYMHMKPPTTLTMCPSCERVAVTSSSSSVAPPVMNSSSPMGPMSPMSPWAAMPLRQRPAAGSH

SEQ ID NO: 20342 - DNA, 664 bp, Arabidopsis thaliana
  misc_feature (1)..(664): Ceres Seq. ID no. 14302927
gatcacaaatatcatcttactaaaataaaaatccaatggatccatcagaatttcccttcgatatcgaagcttacaaaagacaatttcatatcaaagagaggtatatcatcaaccggtttagagagcgtcacaaaaaaattgaagaagattatccacgtcgcaataaaagaacatatatcaagagggatcatgtagcaccaaactaaaggttgattgacaactactttgctattcaacctacgtatgatgatgcaatgtttcgacggtgattccggatgcgaaaacatgtttttcttcgaatcgttggagccttatcaagaaatgacgactacttcacccaacgtgttgacgaaacaaataaagaaggtatatctccactagcaaaatgtatcacggccatgcggatgttagcatatggtatggcgtcagacacggtggatgaatacatcaaaataggaggttctacaacattagagtgcttgcgtagattctgtaatggaatcatacaattgtacgagcaagaatatcttagagcttgtcgcatctggtccccatctttttgttttctactgcgttgaatccacgtatgattttttgctttttcaacaccctcattgtaagagttcaacagttaaataaattattcaacatctccattgcacat

SEQ ID NO: 20343 - protein, 100 aa, Arabidopsis thaliana
  peptide (1)..(100): Ceres Seq. ID no. 14302928
  misc_feature (1)..(86): Homolog of NCBI NO: 27575887 NR Description: TPA: putative transposase [Oryza sativa (japonica
  misc_feature (1)..(86): Homolog of NCBI NO: 22830897 NR Description: B [Oryza sativa (japonica cultivar-group)]
  misc_feature (1)..(86): Homolog of NCBI NO: 38344363 NR Description: OSJNBb0032D24.14 [Oryza sativa (japonica
  misc_feature (1)..(86): Homolog of NCBI NO: 18855038 NR Description: putative ribosomal protein [Oryza sativa]
  misc_feature (1)..(86): Homolog of NCBI NO: 34913402 NR Description: B1074C08.24 [Oryza sativa (japonica
  misc_feature (1)..(86): Homolog of NCBI NO: 37536886 NR Description: hypothetical protein [Oryza sativa (japonica
  misc_feature (1)..(86): Homolog of NCBI NO: 34907790 NR Description: P0703B11.15 [Oryza sativa (japonica
  misc_feature (1)..(86): Homolog of NCBI NO: 37534864 NR Description: contains similarity to ribosomal protein
  misc_feature (1)..(89): Homolog of NCBI NO: 29824487 NR Description: hypothetical protein [Oryza sativa (japonica
  misc_feature (13)..(87): Homolog of NCBI NO: 22325602 NR Description: ribosomal protein -related [Arabidopsis thaliana]
MRKHVFLRIVGALSRNDDYFTQRVDETNKEGISPLAKCITAMRMLAYGMASDTVDEYIKIGGSTTLECLRRFCNGIIQLYEQEYLRACRIWSPSFCFLLR

SEQ ID NO: 20344 - protein, 64 aa, Arabidopsis thaliana
  peptide (1)..(64): Ceres Seq. ID no. 14302929
DHKYHLTKIKIQWIHQNFPSISKLTKDNFISKRGISSTGLESVTKKLKKIIHVAIKEHISRGIM

SEQ ID NO: 20345 - protein, 59 aa, Arabidopsis thaliana
  peptide (1)..(59): Ceres Seq. ID no. 14302930
  misc_feature (1)..(45): Homolog of NCBI NO: 27575887 NR Description: TPA: putative transposase [Oryza sativa (japonica
  misc_feature (1)..(45): Homolog of NCBI NO: 22830897 NR Description: B [Oryza sativa (japonica cultivar-group)]
  misc_feature (1)..(45): Homolog of NCBI NO: 38344363 NR Description: OSJNBb0032D24.14 [Oryza sativa (japonica
  misc_feature (1)..(45): Homolog of NCBI NO: 18855038 NR Description: putative ribosomal protein [Oryza sativa]
  misc_feature (1)..(45): Homolog of NCBI NO: 34913402 NR Description: B1074C08.24 [Oryza sativa (japonica
  misc_feature (1)..(45): Homolog of NCBI NO: 37536886 NR Description: hypothetical protein [Oryza sativa (japonica
  misc_feature (1)..(45): Homolog of NCBI NO: 34907790 NR Description: P0703B11.15 [Oryza sativa (japonica
  misc_feature (1)..(45): Homolog of NCBI NO: 37534864 NR Description: contains similarity to ribosomal protein
  misc_feature (1)..(48): Homolog of NCBI NO: 29824487 NR Description: hypothetical protein [Oryza sativa (japonica
  misc_feature (1)..(46): Homolog of NCBI NO: 22325602 NR Description: ribosomal protein -related [Arabidopsis thaliana]
MRMLAYGMASDTVDEYIKIGGSTTLECLRRFCNGIIQLYEQEYLRACRIWSPSFCFLLR

SEQ ID NO: 20346 - DNA, 1050 bp, Arabidopsis thaliana
  misc_feature (1)..(1050): Ceres Seq. ID no. 13647648
gaatactttgtctgtttcttcttcctgtggcttctgggtctttgtcaacatcaaagctctttactttttcaacttactttatcgtgcgtctgtacggaccacaaaaggctctctctttatttctctgtgagatttttttaggatctgagagagccaaagatcatggaggaaagccaagaacttgccttgacccagttgagaaaatcggtcgagaaactctcttcttctactgagggatatgacaaaccaacattgatgaggttcctggtggcaagatcaatggacccagtcaaggcagcaaagatgtttgtagattggcaaaaatggagagcctccatggttcctccaactggattcatccctgagtcagaagtgcaggatgaattggaattcagaaaggtctgtcttcagggtccgaccaaatccggacacccattggtgcttgtcataacctctaagcattttgcttctaaggatccagctaacttcaagaagtttgttgtttatgcgctagacaaaacaatcgcaagtggcaacaatggcaaagaagttggaggtgagaaattagtagccgttattgatctggcaaacattacatacaagaaccttgatgctcgtggattgatcactggctttcaattcttacaatcttactacccggaacgccttgcaaaatgctacattttgcatatgcccggattcttcgtgaccgtttggaaattcgtctgccgttttctagagaaagcaactcaggaaaagattgtgatagttacggatggagaagaacagagaaaattcgaggaagagatcggagcagatgctttaccggaagagtacggtggccgagctaagctcacagcaatccaagatgttcttcttcctcaggctgctccagtaactctaacaaacaataatgtttagctctttatttttggaagcattaacctgaatatttgtaatggtcagaacataactagtggtacatctctaaatttccgaaaaaaaaaaaaaaaaaaactcgaggggggggcccggtacccaattcgccct

SEQ ID NO: 20347 - protein, 252 aa, Arabidopsis thaliana
  peptide (1)..(252): Ceres Seq. ID no. 13647649
  misc_feature (161)..(227): Pfam Name: CRAL/TRIO domain Pfam Description: CRAL/TRIO domain
  misc_feature (1)..(236): Homolog of NCBI NO: 15223439 NR Description: SEC14 cytosolic factor, putative [Arabidopsis
  misc_feature (21)..(252): Homolog of NCBI NO: 30684014 NR Description: SEC14 cytosolic factor, putative [Arabidopsis
  misc_feature (1)..(35): Homolog of NCBI NO: 25402783 NR Description: protein F10B6.22 [imported] - Arabidopsis
  misc_feature (21)..(251): Homolog of NCBI NO: 25402783 NR Description: protein F10B6.22 [imported] - Arabidopsis
MEESQELALTQLRKSVEKLSSSTEGYDKPTLMRFLVARSMDPVKAAKMFVDWQKWRASMVPPTGFIPESEVQDELEFRKVCLQGPTKSGHPLVLVITSKHFASKDPANFKKFVVYALDKTIASGNNGKEVGGEKLVAVIDLANITYKNLDARGLITGFQFLQSYYPERLAKCYILHMPGFFVTVWKFVCRFLEKATQEKIVIVTDGEEQRKFEEEIGADALPEEYGGRAKLTAIQDVLLPQAAPVTLTNNNV

SEQ ID NO: 20348 - protein, 221 aa, Arabidopsis thaliana
  peptide (1)..(221): Ceres Seq. ID no. 13647650
  misc_feature (130)..(196): Pfam Name: CRAL/TRIO domain Pfam Description: CRAL/TRIO domain
  misc_feature (1)..(205): Homolog of NCBI NO: 15223439 NR Description: SEC14 cytosolic factor, putative [Arabidopsis
  misc_feature (1)..(221): Homolog of NCBI NO: 30684014 NR Description: SEC14 cytosolic factor, putative [Arabidopsis
  misc_feature (1)..(220): Homolog of NCBI NO: 25402783 NR Description: protein F10B6.22 [imported] - Arabidopsis
MRFLVARSMDPVKAAKMFVDWQKWRASMVPPTGFIPESEVQDELEFRKVCLQGPTKSGHPLVLVITSKHFASKDPANFKKFVVYALDKTIASGNNGKEVGGEKLVAVIDLANITYKNLDARGLITGFQFLQSYYPERLAKCYILHMPGFFVTVWKFVCRFLEKATQEKIVIVTDGEEQRKFEEEIGADALPEEYGGRAKLTAIQDVLLPQAAPVTLTNNNV

SEQ ID NO: 20349 - protein, 213 aa, Arabidopsis thaliana
  peptide (1)..(213): Ceres Seq. ID no. 13647651
  misc_feature (122)..(188): Pfam Name: CRAL/TRIO domain Pfam Description: CRAL/TRIO domain
  misc_feature (1)..(197): Homolog of NCBI NO: 15223439 NR Description: SEC14 cytosolic factor, putative [Arabidopsis
  misc_feature (1)..(213): Homolog of NCBI NO: 30684014 NR Description: SEC14 cytosolic factor, putative [Arabidopsis
  misc_feature (1)..(212): Homolog of NCBI NO: 25402783 NR Description: protein F10B6.22 [imported] - Arabidopsis
MDPVKAAKMFVDWQKWRASMVPPTGFIPESEVQDELEFRKVCLQGPTKSGHPLVLVITSKHFASKDPANFKKFVVYALDKTIASGNNGKEVGGEKLVAVIDLANITYKNLDARGLITGFQFLQSYYPERLAKCYILHMPGFFVTVWKFVCRFLEKATQEKIVIVTDGEEQRKFEEEIGADALPEEYGGRAKLTAIQDVLLPQAAPVTLTNNNV

SEQ ID NO: 20350 - DNA, 1491 bp, Arabidopsis thaliana
  misc_feature (1)..(1491): Ceres Seq. ID no. 14309794
  misc_feature: MA Experiment ID: 20000440 Result: Up-regulated in Transcription
  misc_feature: MA Experiment 20000440 PARAMETER Experiment Name: At_Closed-Flower__Sub_P Parameter: Tissue Value: Closed Flower vs. Whole Plant
tcttcatacaacattttagctttactttttctctttactcttctctctctctttctctttctctttctctttcactcgttctctctcactcactctcttcacacacagatccaagatggcctcttcaatggctagcaatgatttccagctccctccacgtttcttcactgttttcgtctcccatttcagctcagagttcatggtgatcccagtttcctactacgatcacattccacatcgtttccccaagactgtgattctccgaggacctggtggatgctcctggaaggtagcgacggagataaaggatgatgaagtgcttttttcacaaggatggcccaaatttgttcgggataatactcttaacgatggagactttttgacctttgcctataatggagctcacatattcgaggtcagtatctttcgcggctacgacgcatgtaaagagattagcgaagtcactgaattggaagaggaagaagaagacagtgttatatctctgagcagtgaagacacagacactggtgctaaatctgagatgaagaatacagtcccggaaggcagagacaaaggaaagtcaaaagtggaagttgtggaggattctgatgacgatgaggaggaggatagtgtttattctgaaagcagtgaagaaacagagacagacactgattctgaattcaaggtggccaagccaacaataccaaaaagccagaagaaaggaaagaagaaagaacaagttgtggagtcctctgatgacgaggaagacgaagaggaggacagtgacagtgattacattgaaacgtttggtcaattggatattgaagagaattccatcagtgaggaggacagttcttatgctcctgataaagaagacacagccactgcctcttttgtcaaaccaaaggttgcaaataaggttgctaatctgaagaggaaagaggcggcaaagaagaggaagaaagtcgatcccatgatcaagaatcctgagagatacctcgatgatcctaagaatatccatttcgagacaaacgtgaagaataggttatacgagctgttggttcatgcacaactggtgaaagactattgcttgaggtttggagactatgttaactacatcgacaggttcgggaaactaagtgctaaaacagccaaatggaaggatcagcgtgtttgtatcaaaagatggatgcgcatatgcaagaggaacaagttgaagaaagaagaccgcattttgtgtgagctcttgcgcaagggaactttcgtttacgcaatcaaactccatgtcatccgcggtaaggatctgtagacgctagcagtatgagtagaggaagagatttggctacttaattatctctctgatttccatcttgttgtgtgatcaagcaaacttatgtgtttcattattgtctacttcagattgtatgaccttctctcttgttctctcatgaatctatttctgaatacaatatctaatctttgagctaaaag

SEQ ID NO: 20351 - protein, 397 aa, Arabidopsis thaliana
  peptide (1)..(397): Ceres Seq. ID no. 14309795
  misc_feature (112)..(323): Pfam Name: Eukaryotic translation initiation factor 3 Pfam Description: Eukaryotic translation initiation factor 3
  misc_feature (7)..(227): Homolog of NCBI NO: 15238624 NR Description: transcriptional factor B3 family [Arabidopsis
  misc_feature (7)..(184): Homolog of NCBI NO: 18409814 NR Description: transcriptional factor B3 family [Arabidopsis
  misc_feature (208)..(393): Homolog of NCBI NO: 15242851 NR Description: transcriptional factor B3 family [Arabidopsis
  misc_feature (222)..(393): Homolog of NCBI NO: 11357788 NR Description: hypothetical protein F4P12.10 - Arabidopsis
  misc_feature (222)..(393): Homolog of NCBI NO: 18409814 NR Description: transcriptional factor B3 family [Arabidopsis
  misc_feature (7)..(234): Homolog of NCBI NO: 11357788 NR Description: hypothetical protein F4P12.10 - Arabidopsis
  misc_feature (5)..(171): Homolog of NCBI NO: 15230669 NR Description: transcriptional factor B3 family [Arabidopsis
  misc_feature (3)..(206): Homolog of NCBI NO: 15230649 NR Description: transcriptional factor B3 family [Arabidopsis
  misc_feature (212)..(393): Homolog of NCBI NO: 15230649 NR Description: transcriptional factor B3 family [Arabidopsis
  misc_feature (1)..(397): Homolog of NCBI NO: 15235362 NR Description: transcriptional factor B3 family [Arabidopsis
MASSMASNDFQLPPRFFTVFVSHFSSEFMVIPVSYYDHIPHRFPKTVILRGPGGCSWKVATEIKDDEVLFSQGWPKFVRDNTLNDGDFLTFAYNGAHIFEVSIFRGYDACKEISEVTELEEEEEDSVISLSSEDTDTGAKSEMKNTVPEGRDKGKSKVEVVEDSDDDEEEDSVYSESSEETETDTDSEFKVAKPTIPKSQKKGKKKEQVVESSDDEEDEEEDSDSDYIETFGQLDIEENSISEEDSSYAPDKEDTATASFVKPKVANKVANLKRKEAAKKRKKVDPMIKNPERYLDDPKNIHFETNVKNRLYELLVHAQLVKDYCLRFGDYVNYIDRFGKLSAKTAKWKDQRVCIKRWMRICKRNKLKKEDRILCELLRKGTFVYAIKLHVIRGKDL

SEQ ID NO: 20352 - protein, 393 aa, Arabidopsis thaliana
  peptide (1)..(393): Ceres Seq. ID no. 14309796
  misc_feature (108)..(319): Pfam Name: Eukaryotic translation initiation factor 3 Pfam Description: Eukaryotic translation initiation factor 3
  misc_feature (3)..(223): Homolog of NCBI NO: 15238624 NR Description: transcriptional factor B3 family [Arabidopsis
  misc_feature (3)..(180): Homolog of NCBI NO: 18409814 NR Description: transcriptional factor B3 family [Arabidopsis
  misc_feature (204)..(389): Homolog of NCBI NO: 15242851 NR Description: transcriptional factor B3 family [Arabidopsis
  misc_feature (218)..(389): Homolog of NCBI NO: 11357788 NR Description: hypothetical protein F4P12.10 - Arabidopsis
  misc_feature (218)..(389): Homolog of NCBI NO: 18409814 NR Description: transcriptional factor B3 family [Arabidopsis
  misc_feature (3)..(230): Homolog of NCBI NO: 11357788 NR Description: hypothetical protein F4P12.10 - Arabidopsis
  misc_feature (1)..(167): Homolog of NCBI NO: 15230669 NR Description: transcriptional factor B3 family [Arabidopsis
  misc_feature (1)..(202): Homolog of NCBI NO: 15230649 NR Description: transcriptional factor B3 family [Arabidopsis
  misc_feature (208)..(389): Homolog of NCBI NO: 15230649 NR Description: transcriptional factor B3 family [Arabidopsis
  misc_feature (1)..(393): Homolog of NCBI NO: 15235362 NR Description: transcriptional factor B3 family [Arabidopsis
MASNDFQLPPRFFTVFVSHFSSEFMVIPVSYYDHIPHRFPKTVILRGPGGCSWKVATEIKDDEVLFSQGWPKFVRDNTLNDGDFLTFAYNGAHIFEVSIFRGYDACKEISEVTELEEEEEDSVISLSSEDTDTGAKSEMKNTVPEGRDKGKSKVEVVEDSDDDEEEDSVYSESSEETETDTDSEFKVAKPTIPKSQKKGKKKEQVVESSDDEEDEEEDSDSDYIETFGQLDIEENSISEEDSSYAPDKEDTATASFVKPKVANKVANLKRKEAAKKRKKVDPMIKNPERYLDDPKNIHFETNVKNRLYELLVHAQLVKDYCLRFGDYVNYIDRFGKLSAKTAKWKDQRVCIKRWMRICKRNKLKKEDRILCELLRKGTFVYAIKLHVIRGKDL

SEQ ID NO: 20353 - protein, 369 aa, Arabidopsis thaliana
  peptide (1)..(369): Ceres Seq. ID no. 14309797
  misc_feature (84)..(295): Pfam Name: Eukaryotic translation initiation factor 3 Pfam Description: Eukaryotic translation initiation factor 3
  misc_feature (1)..(199): Homolog of NCBI NO: 15238624 NR Description: transcriptional factor B3 family [Arabidopsis
  misc_feature (1)..(156): Homolog of NCBI NO: 18409814 NR Description: transcriptional factor B3 family [Arabidopsis
  misc_feature (180)..(365): Homolog of NCBI NO: 15242851 NR Description: transcriptional factor B3 family [Arabidopsis
  misc_feature (194)..(365): Homolog of NCBI NO: 11357788 NR Description: hypothetical protein F4P12.10 - Arabidopsis
  misc_feature (194)..(365): Homolog of NCBI NO: 18409814 NR Description: transcriptional factor B3 family [Arabidopsis
  misc_feature (1)..(206): Homolog of NCBI NO: 11357788 NR Description: hypothetical protein F4P12.10 - Arabidopsis
  misc_feature (1)..(143): Homolog of NCBI NO: 15230669 NR Description: transcriptional factor B3 family [Arabidopsis
  misc_feature (1)..(178): Homolog of NCBI NO: 15230649 NR Description: transcriptional factor B3 family [Arabidopsis
  misc_feature (184)..(365): Homolog of NCBI NO: 15230649 NR Description: transcriptional factor B3 family [Arabidopsis
  misc_feature (1)..(369): Homolog of NCBI NO: 15235362 NR Description: transcriptional factor B3 family [Arabidopsis
MVIPVSYYDHIPHRFPKTVILRGPGGCSWKVATEIKDDEVLFSQGWPKFVRDNTLNDGDFLTFAYNGAHIFEVSIFRGYDACKEISEVTELEEEEEDSVISLSSEDTDTGAKSEMKNTVPEGRDKGKSKVEVVEDSDDDEEEDSVYSESSEETETDTDSEFKVAKPTIPKSQKKGKKKEQVVESSDDEEDEEEDSDSDYIETFGQLDIEENSISEEDSSYAPDKEDTATASFVKPKVANKVANLKRKEAAKKRKKVDPMIKNPERYLDDPKNIHFETNVKNRLYELLVHAQLVKDYCLRFGDYVNYIDRFGKLSAKTAKWKDQRVCIKRWMRICKRNKLKKEDRILCELLRKGTFVYAIKLHVIRGKDL

SEQ ID NO: 20354 - DNA, 579 bp, Arabidopsis thaliana
  misc_feature (1)..(579): Ceres Seq. ID no. 12606011
  misc_feature: MA Experiment ID: 20000179 Result: Up-regulated in Transcription
  misc_feature: MA Experiment 20000179 PARAMETER Experiment Name: At_Germinating_Seeds_P Parameter: Age (hr) Value: 6 vs. 0
  misc_feature: MA Experiment 20000179 PARAMETER Experiment Name: At_Germinating_Seeds_P Parameter: Tissue Value: Germinating Seeds
  misc_feature: MA Experiment ID: 20000180 Result: Up-regulated in Transcription
  misc_feature: MA Experiment 20000180 PARAMETER Experiment Name: At_Germinating_Seeds_P Parameter: Age (hr) Value: 24 vs. 0
  misc_feature: MA Experiment 20000180 PARAMETER Experiment Name: At_Germinating_Seeds_P Parameter: Tissue Value: Germinating Seeds
  misc_feature: MA Experiment ID: 20000794 Result: Down-regulated in Transcription
  misc_feature: MA Experiment 20000794 PARAMETER Experiment Name: At_Petals_P Parameter: Age (day) Value: 23-25 days
  misc_feature: MA Experiment 20000794 PARAMETER Experiment Name: At_Petals_P Parameter: Plant Line Value: WS
  misc_feature: MA Experiment 20000794 PARAMETER Experiment Name: At_Petals_P Parameter: Tissue Value: Petals vs. Whole plant
  misc_feature: MA Experiment ID: 20001911 Result: Down-regulated in Transcription
  misc_feature: MA Experiment 20001911 PARAMETER Experiment Name: At_Drought_Reproduction_P Parameter: Age (day) Value: 40
  misc_feature: MA Experiment 20001911 PARAMETER Experiment Name: At_Drought_Reproduction_P Parameter: Organism Value: A. thaliana
  misc_feature: MA Experiment 20001911 PARAMETER Experiment Name: At_Drought_Reproduction_P Parameter: Plant Line Value: WS
  misc_feature: MA Experiment 20001911 PARAMETER Experiment Name: At_Drought_Reproduction_P Parameter: Timepoint (day) Value: 10
  misc_feature: MA Experiment 20001911 PARAMETER Experiment Name: At_Drought_Reproduction_P Parameter: Tissue Value: Flowers
  misc_feature: MA Experiment 20001911 PARAMETER Experiment Name: At_Drought_Reproduction_P Parameter: Treatment Value: Drought vs. No Drought
aaaaaaaaaattcatttcgtttccgatcgcacttcttctcaagtaaatttaatagacgtttgttgggtgatttaagaagatgggtcagatccagtactccgacaaatatttcgatgatactttcgaatacaggcacgttgtacttcctccggaagttgctaagcttttacctaagaatcgtattctttcggaaagtgaatggagagccatcggagtgcagcaaagtcgtggatgggttcattacgcgattcatcgtcctgagccacatatcatgctctttaggaggcctcttaactaccagcaggagcaccaagctcagattgctaagtagaagaattatgcaaaattctccctaatctctgtttatgtctctcgtaaacgaggttttaaaatactactctgatgttttgttcctgtagttttttttattgtgttcatgaattctcttcagtggagaatcatgtgagtttggtagaacaacttttaatgttatgttaagtctggtcctttgctagactttggttggatccacgtttgaacttcttcatggttaagaatgaagacgttatttctcatgct

SEQ ID NO: 20355 - protein, 117 aa, Arabidopsis thaliana
  peptide (1)..(117): Ceres Seq. ID no. 12606012
KKNSFRFRSHFFSSKFNRRLLGDLRRWVRSSTPTNISMILSNTGTLYFLRKLLSFYLRIVFFRKVNGEPSECSKVVDGFITRFIVLSHISCSLGGLLTTSRSTKLRLLSRRIMQNSP

SEQ ID NO: 20356 - protein, 83 aa, Arabidopsis thaliana
  peptide (1)..(83): Ceres Seq. ID no. 12606013
  misc_feature (1)..(72): Pfam Name: Cyclin-dependent kinase regulatory subunit Pfam Description: Cyclin-dependent kinase regulatory subunit
  misc_feature (3)..(71): Homolog of NCBI NO: 30585357 NR Description: Homo sapiens CDC28 protein kinase regulatory
  misc_feature (3)..(71): Homolog of NCBI NO: 12847359 NR Description: unnamed protein product [Mus musculus]
  misc_feature (3)..(71): Homolog of NCBI NO: 4502857 NR Description: CDC28 protein kinase 1B
  misc_feature (4)..(77): Homolog of NCBI NO: 18158610 NR Description: CDC28 protein kinase 1-like protein
  misc_feature (4)..(69): Homolog of NCBI NO: 2493727 NR Description: PROBABLE CYCLIN-DEPENDENT KINASES REGULATORY
  misc_feature (1)..(83): Homolog of NCBI NO: 27435806 NR Description: CKS1 protein [Populus tremula x Populus
  misc_feature (1)..(82): Homolog of NCBI NO: 40641585 NR Description: putative cyclin-dependent kinase regulatory
  misc_feature (1)..(82): Homolog of NCBI NO: 15451612 NR Description: Putative cyclin-dependent kinase regulatory
  misc_feature (1)..(80): Homolog of NCBI NO: 15226294 NR Description: CDK-subunit 1; protein id: At2g27960.1, supported
  misc_feature (1)..(83): Homolog of NCBI NO: 15226297 NR Description: CDK-subunit 2; protein id: At2g27970.1
MGQIQYSDKYFDDTFEYRHVVLPPEVAKLLPKNRILSESEWRAIGVQQSRGWVHYAIHRPEPHIMLFRRPLNYQQEHQAQIAK

SEQ ID NO: 20357 - protein, 80 aa, Arabidopsis thaliana
  peptide (1)..(80): Ceres Seq. ID no. 12606014
MILSNTGTLYFLRKLLSFYLRIVFFRKVNGEPSECSKVVDGFITRFIVLSHISCSLGGLLTTSRSTKLRLLSRRIMQNSP

SEQ ID NO: 20358 - DNA, 950 bp, Arabidopsis thaliana
  misc_feature (1)..(950): Ceres Seq. ID no. 13647678
  misc_feature: MA Experiment ID: 20000180 Result: Down-regulated in Transcription
  misc_feature: MA Experiment 20000180 PARAMETER Experiment Name: At_Germinating_Seeds_P Parameter: Age (hr) Value: 24 vs. 0
  misc_feature: MA Experiment 20000180 PARAMETER Experiment Name: At_Germinating_Seeds_P Parameter: Tissue Value: Germinating Seeds
  misc_feature: MA Experiment ID: 20001451 Result: Down-regulated in Transcription
  misc_feature: MA Experiment 20001451 PARAMETER Experiment Name: At_Far-red-induction_P Parameter: Age (day) Value: 7
  misc_feature: MA Experiment 20001451 PARAMETER Experiment Name: At_Far-red-induction_P Parameter: Light Value: Far-red vs. White
  misc_feature: MA Experiment 20001451 PARAMETER Experiment Name: At_Far-red-induction_P Parameter: Organism Value: A. thaliana
  misc_feature: MA Experiment 20001451 PARAMETER Experiment Name: At_Far-red-induction_P Parameter: Plant Line Value: Columbia
  misc_feature: MA Experiment 20001451 PARAMETER Experiment Name: At_Far-red-induction_P Parameter: Timepoint (hr) Value: 24
  misc_feature: MA Experiment 20001451 PARAMETER Experiment Name: At_Far-red-induction_P Parameter: Tissue Value: Whole Plant
  misc_feature: MA Experiment ID: 20001905 Result: Down-regulated in Transcription
  misc_feature: MA Experiment 20001905 PARAMETER Experiment Name: At_Drought_Reproduction_P Parameter: Age (day) Value: 40
  misc_feature: MA Experiment 20001905 PARAMETER Experiment Name: At_Drought_Reproduction_P Parameter: Organism Value: A. thaliana
  misc_feature: MA Experiment 20001905 PARAMETER Experiment Name: At_Drought_Reproduction_P Parameter: Plant Line Value: WS
  misc_feature: MA Experiment 20001905 PARAMETER Experiment Name: At_Drought_Reproduction_P Parameter: Timepoint (day) Value: 10
  misc_feature: MA Experiment 20001905 PARAMETER Experiment Name: At_Drought_Reproduction_P Parameter: Tissue Value: Rosettes
  misc_feature: MA Experiment 20001905 PARAMETER Experiment Name: At_Drought_Reproduction_P Parameter: Treatment Value: Drought vs. No Drought
gtcgttttagcttcccgacttcacttctaatctcagactctgcgacgctctttacaaaccgccggaaaaccgccatgaactttgtcgtcagacgggtaggctccattttgccgtcgatacgtcacggcggcgtttcccagattcgactcgcgagaacagaggcaggtcagccgagacggcgaaacaagttgccttctcttccgctaaagaagaaggaagagaaatccgagtggtggatagtagacggagagatgcacgagatcggtgatcacgtccctcctcgtgagcgtttcacaatccccagggacaacattccgaacaaacgccgtaagcagctccgtgaccagttcatgcgccgcactcgcctcgtccttaaagaatcggaacatgagccatggtgcaaaaagtatatggaactatataacgagcttagagaaaactgggagaggctttattgggatgaagggtattcaaagaaactcgcaagtgatcatgcaaattatgaatccgctgaagaagacgatgaagattttaatccatacaggaacaggcggtctttcagcgatcaaacaaaggagcaagggtttaatagaactacacaaggtgataattgggagaaagtcagtcaaatcagggataagtttgagtatgatagagaaaggaggatgagagataaagcctttgcaccaatgaatgcagcaccagaatctcaagaatctagggacttgaattggaatgcacaaagacggccatttgatcctgatagattcgcaagggattgaatacccttaacatcacatggtagagcaggcgaagaatgagcaggctgctctgaagaaatagaataatataagtttgggtttagtttttactttatgcagtgaatatactttcatgtaagcaaattgcgtgctgcagatttttccaagttttcctgtattagttttttt

SEQ ID NO: 20359 - protein, 259 aa, Arabidopsis thaliana
  peptide (1)..(259): Ceres Seq. ID no. 13647679
  misc_feature (28)..(217): Homolog of NCBI NO: 26452083 NR Description: unknown protein [Arabidopsis thaliana]
  misc_feature (25)..(259): Homolog of NCBI NO: 15231465 NR Description: expressed protein [Arabidopsis thaliana]
RFSFPTSLLISDSATLFTNRRKTAMNFVVRRVGSILPSIRHGGVSQIRLARTEAGQPRRRNKLPSLPLKKKEEKSEWWIVDGEMHEIGDHVPPRERFTIPRDNIPNKRRKQLRDQFMRRTRLVLKESEHEPWCKKYMELYNELRENWERLYWDEGYSKKLASDHANYESAEEDDEDFNPYRNRRSFSDQTKEQGFNRTTQGDNWEKVSQIRDKFEYDRERRMRDKAFAPMNAAPESQESRDLNWNAQRRPFDPDRFARD

SEQ ID NO: 20360 - protein, 235 aa, Arabidopsis thaliana
  peptide (1)..(235): Ceres Seq. ID no. 13647680
  misc_feature (4)..(193): Homolog of NCBI NO: 26452083 NR Description: unknown protein [Arabidopsis thaliana]
  misc_feature (1)..(235): Homolog of NCBI NO: 15231465 NR Description: expressed protein [Arabidopsis thaliana]
MNFVVRRVGSILPSIRHGGVSQIRLARTEAGQPRRRNKLPSLPLKKKEEKSEWWIVDGEMHEIGDHVPPRERFTIPRDNIPNKRRKQLRDQFMRRTRLVLKESEHEPWCKKYMELYNELRENWERLYWDEGYSKKLASDHANYESAEEDDEDFNPYRNRRSFSDQTKEQGFNRTTQGDNWEKVSQIRDKFEYDRERRMRDKAFAPMNAAPESQESRDLNWNAQRRPFDPDRFARD

SEQ ID NO: 20361 - protein, 176 aa, Arabidopsis thaliana
  peptide (1)..(176): Ceres Seq. ID no. 13647681
  misc_feature (1)..(134): Homolog of NCBI NO: 26452083 NR Description: unknown protein [Arabidopsis thaliana]
  misc_feature (1)..(176): Homolog of NCBI NO: 15231465 NR Description: expressed protein [Arabidopsis thaliana]
MHEIGDHVPPRERFTIPRDNIPNKRRKQLRDQFMRRTRLVLKESEHEPWCKKYMELYNELRENWERLYWDEGYSKKLASDHANYESAEEDDEDFNPYRNRRSFSDQTKEQGFNRTTQGDNWEKVSQIRDKFEYDRERRMRDKAFAPMNAAPESQESRDLNWNAQRRPFDPDRFARD

SEQ ID NO: 20362 - DNA, 1824 bp, Arabidopsis thaliana
  misc_feature (1)..(1824): Ceres Seq. ID no. 13648124
  misc_feature: MA Experiment ID: 20000440 Result: Up-regulated in Transcription
  misc_feature: MA Experiment 20000440 PARAMETER Experiment Name: At_Closed-Flower__Sub_P Parameter: Tissue Value: Closed Flower vs. Whole Plant
gttttgtatagaaagctgagaaaggttatttttttacattacagaagtaagggatacaaagttgttagttcatcttctctccgctcagaagaagaaaaacttaaaaaaattcaacgtctgaatatggctaatccacttctctattctccgatcaacccacaattcttccaaccacttcttcccggtttcgccaaccacctggacattcctgtggcgttcttcttgaagtacttagtgggaactaacgtaggaaaaacggctgagctcagatcagatgcatcggagatgacatggaaagtgaagatagacggccggagactctctaatggttgggaagatttcacaatcgcacatgatctccgagttggtgacattgttgttttcagacaagaaggagagttagtgttccatgtcacagctttaggaccaagttgctgtgagattcaatacggagaagatacccttgaagaggataaaattgagaaactttgtgatacagagaatgtttcaagtaagaaaaagagtctaaagagagaagctgagtctgcaccagacaattcactagattcttgttttgtggccactgtcacgggttcgaatctaaagcgcgatacattgtatatcccgaaagagtttgcattgtcaaatggtctgatgaacaaatatcagattgtgttaatgaatgaagaaggagaatcatggaagatagacttgagacgcgaggcatataattacggccggttttacatgagaagaggctggagaagtttctgtattgctaatgggaagaaacctggagacgtttttgcattcagattggtcaaaaatgaagaaacacctgtgatacagttgttccctatgaccattgaagatttagacaaacttcagagccttccaagacacaagattcgaaaaacagaagcagctccttcttcaccagacctttcttcttttgtagccactgttacggcttcaaatctaagccgcgatagactgtatcttcccaagacgttcattatgtcaaatggtttgttgaagaaatttcagatgtgtctaatgaatgaagagggagaatcatggacgatagatgtgaaacatgaggcacatacaggccggtttttaacgataagaggttggagaagattctgtgtggctaatgggaagaaaccaggagacttgctcaaattcaaattagtccataacgaagaaacacctgtgctccagttgttacccttgaaaagtgaagatctacacaaacttgatcctagcaatgacacaaggcatggacagagtttagaagttaccaaaaaagagtttcttggcacagaagccacagaaaatgagtttcttggcgcagaagtttaccgcaatgactcctttaaagctagcgagaaagatactcttccttttgctgaacctatcaatgaagatgtaaggcaaggacaatgttcacaagctattaaacaagaatatgtttccacagaagagaaaaactcaacaagccaaaaccgatttgtgaccttaacacttacacattcaagtaaacttaatcttccgtttgaattcatgaaggggaatggaatcaaaaaggcggggaagataacgatggttgatagatacgatgcaaaatggcggacgtcactactgatggacaagatcggagcaatgagtttaggaagaggttcaaaaggtttctgtgaggttaatggtgttgagatgaatgagtcgtttgtcttggagttgatttgggaagacacagttcctcttcttaagttttgttccaaagtttgagaaccatattaacaatgtctaggatcatcgctc

SEQ ID NO: 20363 - protein, 596 aa, Arabidopsis thaliana
  peptide (1)..(596): Ceres Seq. ID no. 13648125
  misc_feature (191)..(291): Pfam Name: B3 DNA binding domain Pfam Description: B3 DNA binding domain
  misc_feature (498)..(596): Homolog of NCBI NO: 15224180 NR Description: transcriptional factor B3 family [Arabidopsis
  misc_feature (308)..(416): Homolog of NCBI NO: 15224180 NR Description: transcriptional factor B3 family [Arabidopsis
  misc_feature (69)..(290): Homolog of NCBI NO: 15224180 NR Description: transcriptional factor B3 family [Arabidopsis
  misc_feature (457)..(596): Homolog of NCBI NO: 25403268 NR Description: protein T24P13.6 [imported] - Arabidopsis
  misc_feature (46)..(439): Homolog of NCBI NO: 25403268 NR Description: protein T24P13.6 [imported] - Arabidopsis
  misc_feature (498)..(596): Homolog of NCBI NO: 26450115 NR Description: unknown protein [Arabidopsis thaliana]
  misc_feature (308)..(415): Homolog of NCBI NO: 26450115 NR Description: unknown protein [Arabidopsis thaliana]
  misc_feature (52)..(290): Homolog of NCBI NO: 26450115 NR Description: unknown protein [Arabidopsis thaliana]
  misc_feature (42)..(177): Homolog of NCBI NO: 15224604 NR Description: transcriptional factor B3 family [Arabidopsis
  misc_feature (161)..(576): Homolog of NCBI NO: 15224604 NR Description: transcriptional factor B3 family [Arabidopsis
VLYRKLRKVIFLHYRSKGYKVVSSSSLRSEEEKLKKIQRLNMANPLLYSPINPQFFQPLLPGFANHLDIPVAFFLKYLVGTNVGKTAELRSDASEMTWKVKIDGRRLSNGWEDFTIAHDLRVGDIVVFRQEGELVFHVTALGPSCCEIQYGEDTLEEDKIEKLCDTENVSSKKKSLKREAESAPDNSLDSCFVATVTGSNLKRDTLYIPKEFALSNGLMNKYQIVLMNEEGESWKIDLRREAYNYGRFYMRRGWRSFCIANGKKPGDVFAFRLVKNEETPVIQLFPMTIEDLDKLQSLPRHKIRKTEAAPSSPDLSSFVATVTASNLSRDRLYLPKTFIMSNGLLKKFQMCLMNEEGESWTIDVKHEAHTGRFLTIRGWRRFCVANGKKPGDLLKFKLVHNEETPVLQLLPLKSEDLHKLDPSNDTRHGQSLEVTKKEFLGTEATENEFLGAEVYRNDSFKASEKDTLPFAEPINEDVRQGQCSQAIKQEYVSTEEKNSTSQNRFVTLTLTHSSKLNLPFEFMKGNGIKKAGKITMVDRYDAKWRTSLLMDKIGAMSLGRGSKGFCEVNGVEMNESFVLELIWEDTVPLLKFCSKV

SEQ ID NO: 20364 - protein, 555 aa, Arabidopsis thaliana
  peptide (1)..(555): Ceres Seq. ID no. 13648126
  misc_feature (150)..(250): Pfam Name: B3 DNA binding domain Pfam Description: B3 DNA binding domain
  misc_feature (457)..(555): Homolog of NCBI NO: 15224180 NR Description: transcriptional factor B3 family [Arabidopsis
  misc_feature (267)..(375): Homolog of NCBI NO: 15224180 NR Description: transcriptional factor B3 family [Arabidopsis
  misc_feature (28)..(249): Homolog of NCBI NO: 15224180 NR Description: transcriptional factor B3 family [Arabidopsis
  misc_feature (416)..(555): Homolog of NCBI NO: 25403268 NR Description: protein T24P13.6 [imported] - Arabidopsis
  misc_feature (5)..(398): Homolog of NCBI NO: 25403268 NR Description: protein T24P13.6 [imported] - Arabidopsis
  misc_feature (457)..(555): Homolog of NCBI NO: 26450115 NR Description: unknown protein [Arabidopsis thaliana]
  misc_feature (267)..(374): Homolog of NCBI NO: 26450115 NR Description: unknown protein [Arabidopsis thaliana]
  misc_feature (11)..(249): Homolog of NCBI NO: 26450115 NR Description: unknown protein [Arabidopsis thaliana]
  misc_feature (1)..(136): Homolog of NCBI NO: 15224604 NR Description: transcriptional factor B3 family [Arabidopsis
  misc_feature (120)..(535): Homolog of NCBI NO: 15224604 NR Description: transcriptional factor B3 family [Arabidopsis
MANPLLYSPINPQFFQPLLPGFANHLDIPVAFFLKYLVGTNVGKTAELRSDASEMTWKVKIDGRRLSNGWEDFTIAHDLRVGDIVVFRQEGELVFHVTALGPSCCEIQYGEDTLEEDKIEKLCDTENVSSKKKSLKREAESAPDNSLDSCFVATVTGSNLKRDTLYIPKEFALSNGLMNKYQIVLMNEEGESWKIDLRREAYNYGRFYMRRGWRSFCIANGKKPGDVFAFRLVKNEETPVIQLFPMTIEDLDKLQSLPRHKIRKTEAAPSSPDLSSFVATVTASNLSRDRLYLPKTFIMSNGLLKKFQMCLMNEEGESWTIDVKHEAHTGRFLTIRGWRRFCVANGKKPGDLLKFKLVHNEETPVLQLLPLKSEDLHKLDPSNDTRHGQSLEVTKKEFLGTEATENEFLGAEVYRNDSFKASEKDTLPFAEPINEDVRQGQCSQAIKQEYVSTEEKNSTSQNRFVTLTLTHSSKLNLPFEFMKGNGIKKAGKITMVDRYDAKWRTSLLMDKIGAMSLGRGSKGFCEVNGVEMNESFVLELIWEDTVPLLKFCSKV

SEQ ID NO: 20365 - protein, 501 aa, Arabidopsis thaliana
  peptide (1)..(501): Ceres Seq. ID no. 13648127
  misc_feature (96)..(196): Pfam Name: B3 DNA binding domain Pfam Description: B3 DNA binding domain
  misc_feature (403)..(501): Homolog of NCBI NO: 15224180 NR Description: transcriptional factor B3 family [Arabidopsis
  misc_feature (213)..(321): Homolog of NCBI NO: 15224180 NR Description: transcriptional factor B3 family [Arabidopsis
  misc_feature (1)..(195): Homolog of NCBI NO: 15224180 NR Description: transcriptional factor B3 family [Arabidopsis
  misc_feature (362)..(501): Homolog of NCBI NO: 25403268 NR Description: protein T24P13.6 [imported] - Arabidopsis
  misc_feature (1)..(344): Homolog of NCBI NO: 25403268 NR Description: protein T24P13.6 [imported] - Arabidopsis
  misc_feature (403)..(501): Homolog of NCBI NO: 26450115 NR Description: unknown protein [Arabidopsis thaliana]
  misc_feature (213)..(320): Homolog of NCBI NO: 26450115 NR Description: unknown protein [Arabidopsis thaliana]
  misc_feature (1)..(195): Homolog of NCBI NO: 26450115 NR Description: unknown protein [Arabidopsis thaliana]
  misc_feature (1)..(82): Homolog of NCBI NO: 15224604 NR Description: transcriptional factor B3 family [Arabidopsis
  misc_feature (66)..(481): Homolog of NCBI NO: 15224604 NR Description: transcriptional factor B3 family [Arabidopsis
MTWKVKIDGRRLSNGWEDFTIAHDLRVGDIVVFRQEGELVFHVTALGPSCCEIQYGEDTLEEDKIEKLCDTENVSSKKKSLKREAESAPDNSLDSCFVATVTGSNLKRDTLYIPKEFALSNGLMNKYQIVLMNEEGESWKIDLRREAYNYGRFYMRRGWRSFCIANGKKPGDVFAFRLVKNEETPVIQLFPMTIEDLDKLQSLPRHKIRKTEAAPSSPDLSSFVATVTASNLSRDRLYLPKTFIMSNGLLKKFQMCLMNEEGESWTIDVKHEAHTGRFLTIRGWRRFCVANGKKPGDLLKFKLVHNEETPVLQLLPLKSEDLHKLDPSNDTRHGQSLEVTKKEFLGTEATENEFLGAEVYRNDSFKASEKDTLPFAEPINEDVRQGQCSQAIKQEYVSTEEKNSTSQNRFVTLTLTHSSKLNLPFEFMKGNGIKKAGKITMVDRYDAKWRTSLLMDKIGAMSLGRGSKGFCEVNGVEMNESFVLELIWEDTVPLLKFCSKV

SEQ ID NO: 20366 - DNA, 931 bp, Arabidopsis thaliana
  misc_feature (1)..(931): Ceres Seq. ID no. 13593410
  misc_feature: MA Experiment ID: 108435 Result: Down-regulated in Transcription
  misc_feature: MA Experiment 108435 PARAMETER Experiment Name: At_stm_Mutants_cDNA_P Parameter: Plant Line Value: wt Landsburg vs stm
  misc_feature: MA Experiment 108435 PARAMETER Experiment Name: At_stm_Mutants_cDNA_P Parameter: Tissue Value: Shoot Apical Meristem Region
  misc_feature: MA Experiment ID: 108488 Result: Up-regulated in Transcription
  misc_feature: MA Experiment ID: 108573 Result: Down-regulated in Transcription
  misc_feature: MA Experiment 108573 PARAMETER Experiment Name: At_Drought_cDNA_P Parameter: Timepoint (hr) Value: 6
  misc_feature: MA Experiment 108573 PARAMETER Experiment Name: At_Drought_cDNA_P Parameter: Tissue Value: Aerial
  misc_feature: MA Experiment 108573 PARAMETER Experiment Name: At_Drought_cDNA_P Parameter: Treatment Value: Drought vs. No Drought
  misc_feature: MA Experiment ID: 108585 Result: Down-regulated in Transcription
  misc_feature: MA Experiment 108585 PARAMETER Experiment Name: At_5mM_NaNP_cDNA_P Parameter: Timepoint (hr) Value: 6
  misc_feature: MA Experiment 108585 PARAMETER Experiment Name: At_5mM_NaNP_cDNA_P Parameter: Tissue Value: Aerial
  misc_feature: MA Experiment 108585 PARAMETER Experiment Name: At_5mM_NaNP_cDNA_P Parameter: Treatment Value: null
  misc_feature: MA Experiment ID: 108595 Result: Down-regulated in Transcription
  misc_feature: MA Experiment 108595 PARAMETER Experiment Name: At_Ler-pi_Ovule_cDNA_P Parameter: Plant Line Value: null
  misc_feature: MA Experiment ID: 108607 Result: Down-regulated in Transcription
  misc_feature: MA Experiment 108607 PARAMETER Experiment Name: At_100uM_ABA_cDNA_P Parameter: Timepoint (hr) Value: 4
  misc_feature: MA Experiment 108607 PARAMETER Experiment Name: At_100uM_ABA_cDNA_P Parameter: Tissue Value: Aerial
  misc_feature: MA Experiment 108607 PARAMETER Experiment Name: At_100uM_ABA_cDNA_P Parameter: Treatment Value: 100uM ABA vs. No Treatment
  misc_feature: MA Experiment ID: 20000069 Result: Down-regulated in Transcription
  misc_feature: MA Experiment 20000069 PARAMETER Experiment Name: At_100uM_ABA_Mutants_cDNA_P Parameter: Plant Line Value: CS23
  misc_feature: MA Experiment 20000069 PARAMETER Experiment Name: At_100uM_ABA_Mutants_cDNA_P Parameter: Timepoint (hr) Value: 6
  misc_feature: MA Experiment 20000069 PARAMETER Experiment Name: At_100uM_ABA_Mutants_cDNA_P Parameter: Tissue Value: Aerial
  misc_feature: MA Experiment 20000069 PARAMETER Experiment Name: At_100uM_ABA_Mutants_cDNA_P Parameter: Treatment Value: 100uM ABA vs. No Treatment
  misc_feature: MA Experiment ID: 20000070 Result: Down-regulated in Transcription
  misc_feature: MA Experiment 20000070 PARAMETER Experiment Name: At_100uM_ABA_Mutants_cDNA_P Parameter: Plant Line Value: CS24
  misc_feature: MA Experiment 20000070 PARAMETER Experiment Name: At_100uM_ABA_Mutants_cDNA_P Parameter: Timepoint (hr) Value: 6
  misc_feature: MA Experiment 20000070 PARAMETER Experiment Name: At_100uM_ABA_Mutants_cDNA_P Parameter: Tissue Value: Aerial
  misc_feature: MA Experiment 20000070 PARAMETER Experiment Name: At_100uM_ABA_Mutants_cDNA_P Parameter: Treatment Value: 100uM ABA vs. No Treatment
  misc_feature: MA Experiment ID: 20000071 Result: Down-regulated in Transcription
  misc_feature: MA Experiment 20000071 PARAMETER Experiment Name: At_100uM_ABA_Mutants_cDNA_P Parameter: Plant Line Value: CS8104
  misc_feature: MA Experiment 20000071 PARAMETER Experiment Name: At_100uM_ABA_Mutants_cDNA_P Parameter: Timepoint (hr) Value: 6
  misc_feature: MA Experiment 20000071 PARAMETER Experiment Name: At_100uM_ABA_Mutants_cDNA_P Parameter: Tissue Value: Aerial
  misc_feature: MA Experiment 20000071 PARAMETER Experiment Name: At_100uM_ABA_Mutants_cDNA_P Parameter: Treatment Value: 100uM ABA vs. No Treatment
  misc_feature: MA Experiment ID: 20000072 Result: Down-regulated in Transcription
  misc_feature: MA Experiment 20000072 PARAMETER Experiment Name: At_100uM_ABA_Mutants_cDNA_P Parameter: Plant Line Value: CS8105
  misc_feature: MA Experiment 20000072 PARAMETER Experiment Name: At_100uM_ABA_Mutants_cDNA_P Parameter: Timepoint (hr) Value: 6
  misc_feature: MA Experiment 20000072 PARAMETER Experiment Name: At_100uM_ABA_Mutants_cDNA_P Parameter: Tissue Value: Aerial
  misc_feature: MA Experiment 20000072 PARAMETER Experiment Name: At_100uM_ABA_Mutants_cDNA_P Parameter: Treatment Value: 100uM ABA vs. No Treatment
  misc_feature: MA Experiment ID: 20000087 Result: Down-regulated in Transcription
  misc_feature: MA Experiment 20000087 PARAMETER Experiment Name: At_100uM_ABA_Mutants_cDNA_P Parameter: Plant Line Value: WS
  misc_feature: MA Experiment 20000087 PARAMETER Experiment Name: At_100uM_ABA_Mutants_cDNA_P Parameter: Timepoint (hr) Value: 6
  misc_feature: MA Experiment 20000087 PARAMETER Experiment Name: At_100uM_ABA_Mutants_cDNA_P Parameter: Tissue Value: Aerial
  misc_feature: MA Experiment 20000087 PARAMETER Experiment Name: At_100uM_ABA_Mutants_cDNA_P Parameter: Treatment Value: 100uM ABA vs. No Treatment
  misc_feature: MA Experiment ID: 20000113 Result: Up-regulated in Transcription
  misc_feature: MA Experiment 20000113 PARAMETER Experiment Name: At_42deg_Heat_cDNA_P Parameter: Temperature (deg C) Value: 42 vs. 22
  misc_feature: MA Experiment 20000113 PARAMETER Experiment Name: At_42deg_Heat_cDNA_P Parameter: Timepoint (hr) Value: 8
  misc_feature: MA Experiment 20000113 PARAMETER Experiment Name: At_42deg_Heat_cDNA_P Parameter: Tissue Value: Aerial
  misc_feature: MA Experiment ID: 20000117 Result: Down-regulated in Transcription
  misc_feature: MA Experiment 20000117 PARAMETER Experiment Name: At_100uM_ABA_Mutants_cDNA_P Parameter: Plant Line Value: Columbia
  misc_feature: MA Experiment 20000117 PARAMETER Experiment Name: At_100uM_ABA_Mutants_cDNA_P Parameter: Timepoint (hr) Value: 6
  misc_feature: MA Experiment 20000117 PARAMETER Experiment Name: At_100uM_ABA_Mutants_cDNA_P Parameter: Tissue Value: Aerial
  misc_feature: MA Experiment 20000117 PARAMETER Experiment Name: At_100uM_ABA_Mutants_cDNA_P Parameter: Treatment Value: 100uM ABA vs. No Treatment
  misc_feature: MA Experiment ID: 20000185 Result: Down-regulated in Transcription
  misc_feature: MA Experiment 20000185 PARAMETER Experiment Name: At_Roots__P Parameter: Age (day) Value: 7 vs. 21
  misc_feature: MA Experiment 20000185 PARAMETER Experiment Name: At_Roots__P Parameter: Organism Value: A. thaliana
  misc_feature: MA Experiment 20000185 PARAMETER Experiment Name: At_Roots__P Parameter: Tissue Value: Roots vs. Whole Plant
  misc_feature: MA Experiment ID: 20000436 Result: Down-regulated in Transcription
  misc_feature: MA Experiment 20000436 PARAMETER Experiment Name: At_Drought_P Parameter: Age (day) Value: 7
  misc_feature: MA Experiment 20000436 PARAMETER Experiment Name: At_Drought_P Parameter: Organism Value: A. thaliana
  misc_feature: MA Experiment 20000436 PARAMETER Experiment Name: At_Drought_P Parameter: Plant Line Value: WS
  misc_feature: MA Experiment 20000436 PARAMETER Experiment Name: At_Drought_P Parameter: Timepoint (hr) Value: 12
  misc_feature: MA Experiment 20000436 PARAMETER Experiment Name: At_Drought_P Parameter: Tissue Value: Whole Plant
  misc_feature: MA Experiment 20000436 PARAMETER Experiment Name: At_Drought_P Parameter: Treatment Value: Drought vs. No Drought
  misc_feature: MA Experiment ID: 20000437 Result: Down-regulated in Transcription
  misc_feature: MA Experiment 20000437 PARAMETER Experiment Name: At_Drought_P Parameter: Age (day) Value: 8
  misc_feature: MA Experiment 20000437 PARAMETER Experiment Name: At_Drought_P Parameter: Organism Value: A. thaliana
  misc_feature: MA Experiment 20000437 PARAMETER Experiment Name: At_Drought_P Parameter: Plant Line Value: WS
  misc_feature: MA Experiment 20000437 PARAMETER Experiment Name: At_Drought_P Parameter: Timepoint (hr) Value: 24
  misc_feature: MA Experiment 20000437 PARAMETER Experiment Name: At_Drought_P Parameter: Tissue Value: Whole Plant
  misc_feature: MA Experiment 20000437 PARAMETER Experiment Name: At_Drought_P Parameter: Treatment Value: Drought vs. No Drought
  misc_feature: MA Experiment ID: 20000439 Result: Down-regulated in Transcription
  misc_feature: MA Experiment 20000439 PARAMETER Experiment Name: At_Roots__P Parameter: Age (day) Value: 14 vs. 21
  misc_feature: MA Experiment 20000439 PARAMETER Experiment Name: At_Roots__P Parameter: Organism Value: A. thaliana
  misc_feature: MA Experiment 20000439 PARAMETER Experiment Name: At_Roots__P Parameter: Tissue Value: Roots vs. Whole Plant
  misc_feature: MA Experiment ID: 20000527 Result: Up-regulated in Transcription
  misc_feature: MA Experiment 20000527 PARAMETER Experiment Name: At_10percent_PEG_P Parameter: Age (day) Value: 20
  misc_feature: MA Experiment 20000527 PARAMETER Experiment Name: At_10percent_PEG_P Parameter: Organism Value: A. thaliana
  misc_feature: MA Experiment 20000527 PARAMETER Experiment Name: At_10percent_PEG_P Parameter: Plant Line Value: WS
  misc_feature: MA Experiment 20000527 PARAMETER Experiment Name: At_10percent_PEG_P Parameter: Timepoint (day) Value: 20
  misc_feature: MA Experiment 20000527 PARAMETER Experiment Name: At_10percent_PEG_P Parameter: Tissue Value: Whole Plant
  misc_feature: MA Experiment 20000527 PARAMETER Experiment Name: At_10percent_PEG_P Parameter: Treatment Value: 10percent PEG vs. No Treatment
  misc_feature: MA Experiment ID: 20001248 Result: Down-regulated in Transcription
  misc_feature: MA Experiment 20001248 PARAMETER Experiment Name: At_Far-red-induction_P Parameter: Age (day) Value: 7
  misc_feature: MA Experiment 20001248 PARAMETER Experiment Name: At_Far-red-induction_P Parameter: Light Value: Far-red vs. White
  misc_feature: MA Experiment 20001248 PARAMETER Experiment Name: At_Far-red-induction_P Parameter: Organism Value: A. thaliana
  misc_feature: MA Experiment 20001248 PARAMETER Experiment Name: At_Far-red-induction_P Parameter: Plant Line Value: Columbia
  misc_feature: MA Experiment 20001248 PARAMETER Experiment Name: At_Far-red-induction_P Parameter: Timepoint (hr) Value: 4
  misc_feature: MA Experiment 20001248 PARAMETER Experiment Name: At_Far-red-induction_P Parameter: Tissue Value: Whole Plant
  misc_feature: MA Experiment ID: 20001450 Result: Down-regulated in Transcription
  misc_feature: MA Experiment 20001450 PARAMETER Experiment Name: At_Far-red-induction_P Parameter: Age (day) Value: 7
  misc_feature: MA Experiment 20001450 PARAMETER Experiment Name: At_Far-red-induction_P Parameter: Light Value: Far-red vs. White
  misc_feature: MA Experiment 20001450 PARAMETER Experiment Name: At_Far-red-induction_P Parameter: Organism Value: A. thaliana
  misc_feature: MA Experiment 20001450 PARAMETER Experiment Name: At_Far-red-induction_P Parameter: Plant Line Value: Columbia
  misc_feature: MA Experiment 20001450 PARAMETER Experiment Name: At_Far-red-induction_P Parameter: Timepoint (hr) Value: 8
  misc_feature: MA Experiment 20001450 PARAMETER Experiment Name: At_Far-red-induction_P Parameter: Tissue Value: Whole Plant
  misc_feature: MA Experiment ID: 20001560 Result: Up-regulated in Transcription
  misc_feature: MA Experiment 20001560 PARAMETER Experiment Name: At_Drought_Soil_Dry_P Parameter: Age (day) Value: 28
  misc_feature: MA Experiment 20001560 PARAMETER Experiment Name: At_Drought_Soil_Dry_P Parameter: Organism Value: A. thaliana
  misc_feature: MA Experiment 20001560 PARAMETER Experiment Name: At_Drought_Soil_Dry_P Parameter: Plant Line Value: WS
  misc_feature: MA Experiment 20001560 PARAMETER Experiment Name: At_Drought_Soil_Dry_P Parameter: Post Timepoint (hr) Value: None
  misc_feature: MA Experiment 20001560 PARAMETER Experiment Name: At_Drought_Soil_Dry_P Parameter: Post-Treatment Value: None
  misc_feature: MA Experiment 20001560 PARAMETER Experiment Name: At_Drought_Soil_Dry_P Parameter: Timepoint (day) Value: 14
  misc_feature: MA Experiment 20001560 PARAMETER Experiment Name: At_Drought_Soil_Dry_P Parameter: Treatment Value: Drought vs. No Drought
  misc_feature: MA Experiment ID: 20001757 Result: Up-regulated in Transcription
  misc_feature: MA Experiment 20001757 PARAMETER Experiment Name: At_50mM_NH4NO3_L-to-H_P Parameter: Timepoint (hr) Value: 6
  misc_feature: MA Experiment 20001757 PARAMETER Experiment Name: At_50mM_NH4NO3_L-to-H_P Parameter: Tissue Value: Leaf
  misc_feature: MA Experiment 20001757 PARAMETER Experiment Name: At_50mM_NH4NO3_L-to-H_P Parameter: Treatment Value: 50mM NH4NO3 vs 100mM Mannitol
gcacaatggcggccaacctgatttctcccccggtggcttgcccgtgcgttacttcctgagagggggtagtcaatgggcttcctccccggagaaaaaaatggatggtcacgaagagaaacagagtctctgctgtcacggccatgattgtggagccactttctgttgtttcttcttcagcaattcagattcatcaatggtgggaacaaaaccctaattcgttactgttaatgacggaggctactggtggttattcgttggctagctattatacgtctttgggtttgtttgttatctctgttcctggtctttggtctctaatcaaacgctctgttaaatcaaagatagtgagaaagacgtttgttgttaatgacgtcaagaaggagccaaagcaagtagctggagagattctatctttcttcacaaggaagaatttcaatatcactgatcgtggagaaacaatcacatttgaaggaaagatggttccaagtagaggacaagctgctctgcttacgttttgtacatgtataagcttagcaagtgttggtcttgtcttaaccattacagttcctgattttggaaacaattggttcttcatcattctccttagtccactcgcaggagtgtattactggaaaaaggcgtcgaggaaagaggagataaaagtgaagatgatggtgggatcaaaagggagattggatgagattgtggttcaaggagatgatgttcaggtcgaagaaatgaggaaagagcttcagcttaatgagaaaggcatggtttatgtcaaaggtctctttgagagatcatcataatgataacattttagcctcccatttttgccttttggggaatgtgtctatacttgttttattaaggttgagattaatgactttttaactcatttcccatacttcatactaaacgaatcgatttg

SEQ ID NO: 20367 - protein, 235 aa, Arabidopsis thaliana
  peptide (1)..(235): Ceres Seq. ID no. 13593411
  misc_feature (55)..(208): Homolog of NCBI NO: 22298167 NR Description: ORF_ID:tll0625~hypothetical protein
  misc_feature (62)..(190): Homolog of NCBI NO: 23039442 NR Description: hypothetical protein [Trichodesmium erythraeum
  misc_feature (57)..(190): Homolog of NCBI NO: 16332307 NR Description: unknown protein [Synechocystis sp. PCC 6803]
  misc_feature (57)..(219): Homolog of NCBI NO: 23123893 NR Description: hypothetical protein [Nostoc punctiforme]
  misc_feature (61)..(219): Homolog of NCBI NO: 17231472 NR Description: hypothetical protein [Nostoc sp. PCC 7120]
  misc_feature (57)..(210): Homolog of NCBI NO: 37523332 NR Description: hypothetical protein glr3763 [Gloeobacter
  misc_feature (171)..(235): Homolog of NCBI NO: 1402889 NR Description: unknown [Arabidopsis thaliana]
  misc_feature (1)..(121): Homolog of NCBI NO: 1402889 NR Description: unknown [Arabidopsis thaliana]
  misc_feature (1)..(235): Homolog of NCBI NO: 18405058 NR Description: expressed protein [Arabidopsis thaliana]
MVTKRNRVSAVTAMIVEPLSVVSSSAIQIHQWWEQNPNSLLLMTEATGGYSLASYYTSLGLFVISVPGLWSLIKRSVKSKIVRKTFVVNDVKKEPKQVAGEILSFFTRKNFNITDRGETITFEGKMVPSRGQAALLTFCTCISLASVGLVLTITVPDFGNNWFFIILLSPLAGVYYWKKASRKEEIKVKMMVGSKGRLDEIVVQGDDVQVEEMRKELQLNEKGMVYVKGLFERSS

SEQ ID NO: 20368 - protein, 222 aa, Arabidopsis thaliana
  peptide (1)..(222): Ceres Seq. ID no. 13593412
  misc_feature (42)..(195): Homolog of NCBI NO: 22298167 NR Description: ORF_ID:tll0625~hypothetical protein
  misc_feature (49)..(177): Homolog of NCBI NO: 23039442 NR Description: hypothetical protein [Trichodesmium erythraeum
  misc_feature (44)..(177): Homolog of NCBI NO: 16332307 NR Description: unknown protein [Synechocystis sp. PCC 6803]
  misc_feature (44)..(206): Homolog of NCBI NO: 23123893 NR Description: hypothetical protein [Nostoc punctiforme]
  misc_feature (48)..(206): Homolog of NCBI NO: 17231472 NR Description: hypothetical protein [Nostoc sp. PCC 7120]
  misc_feature (44)..(197): Homolog of NCBI NO: 37523332 NR Description: hypothetical protein glr3763 [Gloeobacter
  misc_feature (158)..(222): Homolog of NCBI NO: 1402889 NR Description: unknown [Arabidopsis thaliana]
  misc_feature (1)..(108): Homolog of NCBI NO: 1402889 NR Description: unknown [Arabidopsis thaliana]
  misc_feature (1)..(222): Homolog of NCBI NO: 18405058 NR Description: expressed protein [Arabidopsis thaliana]
MIVEPLSVVSSSAIQIHQWWEQNPNSLLLMTEATGGYSLASYYTSLGLFVISVPGLWSLIKRSVKSKIVRKTFVVNDVKKEPKQVAGEILSFFTRKNFNITDRGETITFEGKMVPSRGQAALLTFCTCISLASVGLVLTITVPDFGNNWFFIILLSPLAGVYYWKKASRKEEIKVKMMVGSKGRLDEIVVQGDDVQVEEMRKELQLNEKGMVYVKGLFERSS

SEQ ID NO: 20369 - protein, 193 aa, Arabidopsis thaliana
  peptide (1)..(193): Ceres Seq. ID no. 13593413
  misc_feature (13)..(166): Homolog of NCBI NO: 22298167 NR Description: ORF_ID:tll0625~hypothetical protein
  misc_feature (20)..(148): Homolog of NCBI NO: 23039442 NR Description: hypothetical protein [Trichodesmium erythraeum
  misc_feature (15)..(148): Homolog of NCBI NO: 16332307 NR Description: unknown protein [Synechocystis sp. PCC 6803]
  misc_feature (15)..(177): Homolog of NCBI NO: 23123893 NR Description: hypothetical protein [Nostoc punctiforme]
  misc_feature (19)..(177): Homolog of NCBI NO: 17231472 NR Description: hypothetical protein [Nostoc sp. PCC 7120]
  misc_feature (15)..(168): Homolog of NCBI NO: 37523332 NR Description: hypothetical protein glr3763 [Gloeobacter
  misc_feature (129)..(193): Homolog of NCBI NO: 1402889 NR Description: unknown [Arabidopsis thaliana]
  misc_feature (1)..(79): Homolog of NCBI NO: 1402889 NR Description: unknown [Arabidopsis thaliana]
  misc_feature (1)..(193): Homolog of NCBI NO: 18405058 NR Description: expressed protein [Arabidopsis thaliana]
MTEATGGYSLASYYTSLGLFVISVPGLWSLIKRSVKSKIVRKTFVVNDVKKEPKQVAGEILSFFTRKNFNITDRGETITFEGKMVPSRGQAALLTFCTCISLASVGLVLTITVPDFGNNWFFIILLSPLAGVYYWKKASRKEEIKVKMMVGSKGRLDEIVVQGDDVQVEEMRKELQLNEKGMVYVKGLFERSS

SEQ ID NO: 20370 - DNA, 857 bp, Arabidopsis thaliana
  misc_feature (1)..(857): Ceres Seq. ID no. 13647395
gaaactctctttttgtctctattgttgaaaaaatggaagtgagaggcccagtgatatggatgttcttaatgtgttgcatatttggtcacttaattgtaagtcataagaatgacttagtggaagccaaaagcttttcaaaatctgaagatttggaaatcgagaagagactacagactatcaacaaacccgccgtcaagatcatcaagactattgatggagaaatatacggatgtgtggatttcttcaagcaaccagcatttgatcatccttctatgaagaatcacacataccattacaagatgcgtctaatctggaaagaaatgggagaaagagagacaaacaatactgcttttggttacttatgggagaatggtgtgggttgtcccattggtacagtccctatggaaagagtcaccaaagacgatattttaagattagactcatttggtgataatcataaaccctgtggttcctggaacactaccacttatgatcctaataatgttgttcattacaaccaacatcgttttgcggtagctcgaacgaagaacataggaaggaggttcaatggagcaacgatggaactttgtataaccgctcctaaggttaagccaacccaattcagtgcttcaagacttcacattcagatgggaagggatttcctccaagccggtttgactgtaaatccagtattgtacaaggacaagcaacctcgaacttttgtctatacagatgtgagtcagtcacattattctagtcaattctttttctaatattttttttgaatatatatatatatgaaagaattaacatggatggaaaaaaaaaaaaaaaaaaaactcgagggggggcccggt

SEQ ID NO: 20371 - protein, 256 aa, Arabidopsis thaliana
  peptide (1)..(256): Ceres Seq. ID no. 13647396
  misc_feature (182)..(224): Homolog of NCBI NO: 22328638 NR Description: hypothetical protein [Arabidopsis thaliana]
  misc_feature (11)..(132): Homolog of NCBI NO: 22328638 NR Description: hypothetical protein [Arabidopsis thaliana]
  misc_feature (61)..(252): Homolog of NCBI NO: 11358466 NR Description: IB1C3-1 protein [imported] - Arabidopsis thaliana
  misc_feature (17)..(70): Homolog of NCBI NO: 7485045 NR Description: hypothetical protein - Arabidopsis thaliana
  misc_feature (69)..(226): Homolog of NCBI NO: 7485045 NR Description: hypothetical protein - Arabidopsis thaliana
  misc_feature (17)..(252): Homolog of NCBI NO: 30683101 NR Description: expressed protein [Arabidopsis thaliana]
  misc_feature (225)..(252): Homolog of NCBI NO: 25345694 NR Description: protein F14N23.7 [imported] - Arabidopsis
  misc_feature (17)..(227): Homolog of NCBI NO: 25345694 NR Description: protein F14N23.7 [imported] - Arabidopsis
  misc_feature (17)..(244): Homolog of NCBI NO: 15218449 NR Description: expressed protein [Arabidopsis thaliana]
  misc_feature (11)..(244): Homolog of NCBI NO: 22328636 NR Description: hypothetical protein [Arabidopsis thaliana]
NSLFVSIVEKMEVRGPVIWMFLMCCIFGHLIVSHKNDLVEAKSFSKSEDLEIEKRLQTINKPAVKIIKTIDGEIYGCVDFFKQPAFDHPSMKNHTYHYKMRLIWKEMGERETNNTAFGYLWENGVGCPIGTVPMERVTKDDILRLDSFGDNHKPCGSWNTTTYDPNNVVHYNQHRFAVARTKNIGRRFNGATMELCITAPKVKPTQFSASRLHIQMGRDFLQAGLTVNPVLYKDKQPRTFVYTDVSQSHYSSQFFF

SEQ ID NO: 20372 - protein, 246 aa, Arabidopsis thaliana
  peptide (1)..(246): Ceres Seq. ID no. 13647397
  misc_feature (172)..(214): Homolog of NCBI NO: 22328638 NR Description: hypothetical protein [Arabidopsis thaliana]
  misc_feature (1)..(122): Homolog of NCBI NO: 22328638 NR Description: hypothetical protein [Arabidopsis thaliana]
  misc_feature (51)..(242): Homolog of NCBI NO: 11358466 NR Description: IB1C3-1 protein [imported] - Arabidopsis thaliana
  misc_feature (7)..(60): Homolog of NCBI NO: 7485045 NR Description: hypothetical protein - Arabidopsis thaliana
  misc_feature (59)..(216): Homolog of NCBI NO: 7485045 NR Description: hypothetical protein - Arabidopsis thaliana
  misc_feature (7)..(242): Homolog of NCBI NO: 30683101 NR Description: expressed protein [Arabidopsis thaliana]
  misc_feature (215)..(242): Homolog of NCBI NO: 25345694 NR Description: protein F14N23.7 [imported] - Arabidopsis
  misc_feature (7)..(217): Homolog of NCBI NO: 25345694 NR Description: protein F14N23.7 [imported] - Arabidopsis
  misc_feature (7)..(234): Homolog of NCBI NO: 15218449 NR Description: expressed protein [Arabidopsis thaliana]
  misc_feature (1)..(234): Homolog of NCBI NO: 22328636 NR Description: hypothetical protein [Arabidopsis thaliana]
MEVRGPVIWMFLMCCIFGHLIVSHKNDLVEAKSFSKSEDLEIEKRLQTINKPAVKIIKTIDGEIYGCVDFFKQPAFDHPSMKNHTYHYKMRLIWKEMGERETNNTAFGYLWENGVGCPIGTVPMERVTKDDILRLDSFGDNHKPCGSWNTTTYDPNNVVHYNQHRFAVARTKNIGRRFNGATMELCITAPKVKPTQFSASRLHIQMGRDFLQAGLTVNPVLYKDKQPRTFVYTDVSQSHYSSQFFF

SEQ ID NO: 20373 - protein, 237 aa, Arabidopsis thaliana
  peptide (1)..(237): Ceres Seq. ID no. 13647398
  misc_feature (206)..(233): Homolog of NCBI NO: 25345694 NR Description: protein F14N23.7 [imported] - Arabidopsis
  misc_feature (1)..(208): Homolog of NCBI NO: 25345694 NR Description: protein F14N23.7 [imported] - Arabidopsis
  misc_feature (1)..(225): Homolog of NCBI NO: 15218449 NR Description: expressed protein [Arabidopsis thaliana]
  misc_feature (1)..(225): Homolog of NCBI NO: 22328636 NR Description: hypothetical protein [Arabidopsis thaliana]
  misc_feature (163)..(205): Homolog of NCBI NO: 22328638 NR Description: hypothetical protein [Arabidopsis thaliana]
  misc_feature (1)..(113): Homolog of NCBI NO: 22328638 NR Description: hypothetical protein [Arabidopsis thaliana]
  misc_feature (42)..(233): Homolog of NCBI NO: 11358466 NR Description: IB1C3-1 protein [imported] - Arabidopsis thaliana
  misc_feature (1)..(51): Homolog of NCBI NO: 7485045 NR Description: hypothetical protein - Arabidopsis thaliana
  misc_feature (50)..(207): Homolog of NCBI NO: 7485045 NR Description: hypothetical protein - Arabidopsis thaliana
  misc_feature (1)..(233): Homolog of NCBI NO: 30683101 NR Description: expressed protein [Arabidopsis thaliana]
MFLMCCIFGHLIVSHKNDLVEAKSFSKSEDLEIEKRLQTINKPAVKIIKTIDGEIYGCVDFFKQPAFDHPSMKNHTYHYKMRLIWKEMGERETNNTAFGYLWENGVGCPIGTVPMERVTKDDILRLDSFGDNHKPCGSWNTTTYDPNNVVHYNQHRFAVARTKNIGRRFNGATMELCITAPKVKPTQFSASRLHIQMGRDFLQAGLTVNPVLYKDKQPRTFVYTDVSQSHYSSQFFF

SEQ ID NO: 20374 - DNA, 551 bp, Arabidopsis thaliana
  misc_feature (1)..(551): Ceres Seq. ID no. 13648206
agctcactagtcccccccccccccccgccaaaattaaacctcaccgacggattcaattctctcgttctcaggccgtcttcatcgccggagcgttttcttacgaaaagaatgggcttctggacattgttaaaaggtctgctgctctttgcaaatgcactggcaatcctcaacgaagaccgtttccttgttccaagaggatggacactcggagaactccaccaaaccggtagaagaaactctcccaaaggccaaatcattggtctgatccatgcctgccagtacatgaggctacccctcatgctcattaacacagcagtcatcgtcttgaagcttatctccggttgaagattttgtgtagatgaagataaactacattgcgttcttcaaatgattgtgattagttacaaatctattttgtgtaggagttggaatttgtttttgtcatccctcgcactcaagtttggtgtgcattctacaacattcttctcatatttttacatgccaaatcaaaccaaaaaaaaaaaaaaaaaaaactcgagggggggcccggt

SEQ ID NO: 20375 - protein, 114 aa, Arabidopsis thaliana
  peptide (1)..(114): Ceres Seq. ID no. 13648207
  misc_feature (40)..(114): Homolog of NCBI NO: 24662435 NR Description: CG32069-PA [Drosophila melanogaster]
  misc_feature (40)..(114): Homolog of NCBI NO: 7705819 NR Description: HSPC039 protein [Homo sapiens]
  misc_feature (38)..(114): Homolog of NCBI NO: 19114695 NR Description: hypothetical protein [Schizosaccharomyces pombe]
  misc_feature (37)..(114): Homolog of NCBI NO: 18404604 NR Description: expressed protein [Arabidopsis thaliana]
  misc_feature (37)..(114): Homolog of NCBI NO: 26450605 NR Description: unknown protein [Arabidopsis thaliana]
SSLVPPPPPPKLNLTDGFNSLVLRPSSSPERFLTKRMGFWTLLKGLLLFANALAILNEDRFLVPRGWTLGELHQTGRRNSPKGQIIGLIHACQYMRLPLMLINTAVIVLKLISG

SEQ ID NO: 20376 - protein, 78 aa, Arabidopsis thaliana
  peptide (1)..(78): Ceres Seq. ID no. 13648208
  misc_feature (4)..(78): Homolog of NCBI NO: 24662435 NR Description: CG32069-PA [Drosophila melanogaster]
  misc_feature (4)..(78): Homolog of NCBI NO: 7705819 NR Description: HSPC039 protein [Homo sapiens]
  misc_feature (2)..(78): Homolog of NCBI NO: 19114695 NR Description: hypothetical protein [Schizosaccharomyces pombe]
  misc_feature (1)..(78): Homolog of NCBI NO: 18404604 NR Description: expressed protein [Arabidopsis thaliana]
  misc_feature (1)..(78): Homolog of NCBI NO: 26450605 NR Description: unknown protein [Arabidopsis thaliana]
MGFWTLLKGLLLFANALAILNEDRFLVPRGWTLGELHQTGRRNSPKGQIIGLIHACQYMRLPLMLINTAVIVLKLISG

SEQ ID NO: 20377 - protein, 75 aa, Arabidopsis thaliana
  peptide (1)..(75): Ceres Seq. ID no. 13648209
LTSPPPPPAKIKPHRRIQFSRSQAVFIAGAFSYEKNGLLDIVKRSAALCKCTGNPQRRPFPCSKRMDTRRTPPNR

SEQ ID NO: 20378 - DNA, 1233 bp, Arabidopsis thaliana
  misc_feature (1)..(1233): Ceres Seq. ID no. 12605597
  misc_feature: MA Experiment ID: 20000184 Result: Down-regulated in Transcription
  misc_feature: MA Experiment 20000184 PARAMETER Experiment Name: At_Shoots__P Parameter: Age (day) Value: 7
  misc_feature: MA Experiment 20000184 PARAMETER Experiment Name: At_Shoots__P Parameter: Tissue Value: Shoots vs. Whole Plant
  misc_feature: MA Experiment ID: 20000185 Result: Down-regulated in Transcription
  misc_feature: MA Experiment 20000185 PARAMETER Experiment Name: At_Roots__P Parameter: Age (day) Value: 7 vs. 21
  misc_feature: MA Experiment 20000185 PARAMETER Experiment Name: At_Roots__P Parameter: Organism Value: A. thaliana
  misc_feature: MA Experiment 20000185 PARAMETER Experiment Name: At_Roots__P Parameter: Tissue Value: Roots vs. Whole Plant
  misc_feature: MA Experiment ID: 20000439 Result: Down-regulated in Transcription
  misc_feature: MA Experiment 20000439 PARAMETER Experiment Name: At_Roots__P Parameter: Age (day) Value: 14 vs. 21
  misc_feature: MA Experiment 20000439 PARAMETER Experiment Name: At_Roots__P Parameter: Organism Value: A. thaliana
  misc_feature: MA Experiment 20000439 PARAMETER Experiment Name: At_Roots__P Parameter: Tissue Value: Roots vs. Whole Plant
  misc_feature: MA Experiment ID: 20001450 Result: Down-regulated in Transcription
  misc_feature: MA Experiment 20001450 PARAMETER Experiment Name: At_Far-red-induction_P Parameter: Age (day) Value: 7
  misc_feature: MA Experiment 20001450 PARAMETER Experiment Name: At_Far-red-induction_P Parameter: Light Value: Far-red vs. White
  misc_feature: MA Experiment 20001450 PARAMETER Experiment Name: At_Far-red-induction_P Parameter: Organism Value: A. thaliana
  misc_feature: MA Experiment 20001450 PARAMETER Experiment Name: At_Far-red-induction_P Parameter: Plant Line Value: Columbia
  misc_feature: MA Experiment 20001450 PARAMETER Experiment Name: At_Far-red-induction_P Parameter: Timepoint (hr) Value: 8
  misc_feature: MA Experiment 20001450 PARAMETER Experiment Name: At_Far-red-induction_P Parameter: Tissue Value: Whole Plant
  misc_feature: MA Experiment ID: 20001451 Result: Down-regulated in Transcription
  misc_feature: MA Experiment 20001451 PARAMETER Experiment Name: At_Far-red-induction_P Parameter: Age (day) Value: 7
  misc_feature: MA Experiment 20001451 PARAMETER Experiment Name: At_Far-red-induction_P Parameter: Light Value: Far-red vs. White
  misc_feature: MA Experiment 20001451 PARAMETER Experiment Name: At_Far-red-induction_P Parameter: Organism Value: A. thaliana
  misc_feature: MA Experiment 20001451 PARAMETER Experiment Name: At_Far-red-induction_P Parameter: Plant Line Value: Columbia
  misc_feature: MA Experiment 20001451 PARAMETER Experiment Name: At_Far-red-induction_P Parameter: Timepoint (hr) Value: 24
  misc_feature: MA Experiment 20001451 PARAMETER Experiment Name: At_Far-red-induction_P Parameter: Tissue Value: Whole Plant
  misc_feature: MA Experiment ID: 20001556 Result: Up-regulated in Transcription
  misc_feature: MA Experiment 20001556 PARAMETER Experiment Name: At_Drought_Soil_Dry_P Parameter: Age (day) Value: 26
  misc_feature: MA Experiment 20001556 PARAMETER Experiment Name: At_Drought_Soil_Dry_P Parameter: Organism Value: A. thaliana
  misc_feature: MA Experiment 20001556 PARAMETER Experiment Name: At_Drought_Soil_Dry_P Parameter: Plant Line Value: WS
  misc_feature: MA Experiment 20001556 PARAMETER Experiment Name: At_Drought_Soil_Dry_P Parameter: Post Timepoint (hr) Value: None
  misc_feature: MA Experiment 20001556 PARAMETER Experiment Name: At_Drought_Soil_Dry_P Parameter: Post-Treatment Value: None
  misc_feature: MA Experiment 20001556 PARAMETER Experiment Name: At_Drought_Soil_Dry_P Parameter: Timepoint (day) Value: 12
  misc_feature: MA Experiment 20001556 PARAMETER Experiment Name: At_Drought_Soil_Dry_P Parameter: Treatment Value: Drought vs. No Drought
aaagatatgcccaattgaagcaaaagccagaacagcttttaaattgcaatggtctcttcggttttatccatccctccacaaacttgtctacttccacgattacccatctctgattctgtcaattgcaaatcgaaaatagtgtactatcgctccacaagtgtccgaggaagctccgtcaagagacaatcaacggccagaactcgaagtttcactgagacaaatcgtcgaacaccttccgtgcaatccaaacatgaattctgggaagacccagatgatggtagcgacagtgaaagcgaatatgaaggagacgaagaaggtggtattggaaatgatttagattacgagagtgattgggaagatgactcgagagcccagaagcttactactacagacaattacgaggaagagcttgcaaaagaggttgaacaacttcttgaacctgaagaaagagtaattcttcagcaaaatgagaaaccaaatctcaagatgatctcaacaaagagttggaagccacttcagacacttgctctgtcaatgcagattcagttaatggataatcttattgaaaacggactagacattgatgatgttgacaaggacaaccaaaccgctcttcacaaagcaatcattggtaaaaaagaagcggtgattagtcatcttttgaggaaaggagctaataatcatcttcaagatcgtggcggtgcagctgcgattcatcatgcagcacaagaaggagcatcgcagccggtagtaatactattcaagtacaacgtagtcgtcaatgttgcagataatgaaggatgatgtccgttgcatataatagttcaaagcagaagtcgtggcatcacaaagatattgttgtccaacggtggtgataatacaacacgacggaaggatgagaaattatctttggacttggctctgtgctttggaagagatttcaagtcatatgatctggtcaagctattgaagattatgcccaccggggatatatagaaagagctggtgagattttgaatgatcaggttgagattactaaactgcatttgccattgcttggtttgattgtaatctacaccggtataagtggttaaggtagaagaaacccgattgagtttgtaattactgcttttatatattcgtggatgaacttgttattcgggtgtgtgtatcataatgtgcataacaaagatacacattgttatgtcatatatattaaattacaagcattgc

SEQ ID NO: 20379 - protein, 251 aa, Arabidopsis thaliana
  peptide (1)..(251): Ceres Seq. ID no. 12605598
  misc_feature (184)..(216): Pfam Name: Ankyrin repeat Pfam Description: Ankyrin repeat
  misc_feature (153)..(251): Homolog of NCBI NO: 39654744 NR Description: Chain A, X-Ray Structure Of Human Gankyrin
  misc_feature (153)..(251): Homolog of NCBI NO: 4506217 NR Description: proteasome 26S non-ATPase subunit 10 isoform 1
  misc_feature (153)..(251): Homolog of NCBI NO: 18777724 NR Description: cyclin dependent kinase inhibitor 2C
  misc_feature (153)..(251): Homolog of NCBI NO: 18644714 NR Description: cyclin-dependent kinase inhibitor 2c [Rattus
  misc_feature (171)..(251): Homolog of NCBI NO: 28373666 NR Description: Chain A, Sank E3_5: An Artificial Ankyrin Repeat
  misc_feature (110)..(251): Homolog of NCBI NO: 322461 NR Description: ankyrin-repeat protein - Arabidopsis thaliana
  misc_feature (123)..(251): Homolog of NCBI NO: 22758264 NR Description: Putative ankyrin-repeat protein
  misc_feature (70)..(251): Homolog of NCBI NO: 30698188 NR Description: expressed protein [Arabidopsis thaliana]
  misc_feature (70)..(251): Homolog of NCBI NO: 26450056 NR Description: unknown protein [Arabidopsis thaliana]
  misc_feature (1)..(251): Homolog of NCBI NO: 15242597 NR Description: ankyrin repeat protein EMB506
MVSSVLSIPPQTCLLPRLPISDSVNCKSKIVYYRSTSVRGSSVKRQSTARTRSFTETNRRTPSVQSKHEFWEDPDDGSDSESEYEGDEEGGIGNDLDYESDWEDDSRAQKLTTTDNYEEELAKEVEQLLEPEERVILQQNEKPNLKMISTKSWKPLQTLALSMQIQLMDNLIENGLDIDDVDKDNQTALHKAIIGKKEAVISHLLRKGANNHLQDRGGAAAIHHAAQEGASQPVVILFKYNVVVNVADNEG

SEQ ID NO: 20380 - DNA, 672 bp, Arabidopsis thaliana
  misc_feature (1)..(672): Ceres Seq. ID no. 14304353
  misc_feature: MA Experiment ID: 20000182 Result: Up-regulated in Transcription
  misc_feature: MA Experiment 20000182 PARAMETER Experiment Name: At_2mM_SA_P Parameter: Age (day) Value: 14
  misc_feature: MA Experiment 20000182 PARAMETER Experiment Name: At_2mM_SA_P Parameter: Organism Value: A. thaliana
  misc_feature: MA Experiment 20000182 PARAMETER Experiment Name: At_2mM_SA_P Parameter: Plant Line Value: WS
  misc_feature: MA Experiment 20000182 PARAMETER Experiment Name: At_2mM_SA_P Parameter: Timepoint (hr) Value: 6
  misc_feature: MA Experiment 20000182 PARAMETER Experiment Name: At_2mM_SA_P Parameter: Tissue Value: Aerial
  misc_feature: MA Experiment 20000182 PARAMETER Experiment Name: At_2mM_SA_P Parameter: Treatment Value: 2mM SA vs. No Treatment
  misc_feature: MA Experiment ID: 20000185 Result: Down-regulated in Transcription
  misc_feature: MA Experiment 20000185 PARAMETER Experiment Name: At_Roots__P Parameter: Age (day) Value: 7 vs. 21
  misc_feature: MA Experiment 20000185 PARAMETER Experiment Name: At_Roots__P Parameter: Organism Value: A. thaliana
  misc_feature: MA Experiment 20000185 PARAMETER Experiment Name: At_Roots__P Parameter: Tissue Value: Roots vs. Whole Plant
  misc_feature: MA Experiment ID: 20000234 Result: Down-regulated in Transcription
  misc_feature: MA Experiment 20000234 PARAMETER Experiment Name: At_Siliques_P Parameter: Age (day) Value: 21
  misc_feature: MA Experiment 20000234 PARAMETER Experiment Name: At_Siliques_P Parameter: Organism Value: A. thaliana
  misc_feature: MA Experiment 20000234 PARAMETER Experiment Name: At_Siliques_P Parameter: Plant Line Value: WS
  misc_feature: MA Experiment 20000234 PARAMETER Experiment Name: At_Siliques_P Parameter: Tissue Value: Less Than 5mm Siliques vs. Whole Plant
  misc_feature: MA Experiment ID: 20000264 Result: Down-regulated in Transcription
  misc_feature: MA Experiment 20000264 PARAMETER Experiment Name: At_Open_Flower_P Parameter: Age (day) Value: 21
  misc_feature: MA Experiment 20000264 PARAMETER Experiment Name: At_Open_Flower_P Parameter: Plant Line Value: WS
  misc_feature: MA Experiment 20000264 PARAMETER Experiment Name: At_Open_Flower_P Parameter: Tissue Value: Open Flower vs. Whole Plant
  misc_feature: MA Experiment ID: 20000265 Result: Down-regulated in Transcription
  misc_feature: MA Experiment 20000265 PARAMETER Experiment Name: At_Open_Flower_P Parameter: Age (day) Value: 21
  misc_feature: MA Experiment 20000265 PARAMETER Experiment Name: At_Open_Flower_P Parameter: Plant Line Value: WS
  misc_feature: MA Experiment 20000265 PARAMETER Experiment Name: At_Open_Flower_P Parameter: Tissue Value: Closed Flower vs. Whole Plant
  misc_feature: MA Experiment ID: 20000269 Result: Down-regulated in Transcription
  misc_feature: MA Experiment 20000269 PARAMETER Experiment Name: At_1mM_KNO3_L-vs-H_Roots_P Parameter: Age (day) Value: 7,10,12
  misc_feature: MA Experiment 20000269 PARAMETER Experiment Name: At_1mM_KNO3_L-vs-H_Roots_P Parameter: Organism Value: A. thaliana
  misc_feature: MA Experiment 20000269 PARAMETER Experiment Name: At_1mM_KNO3_L-vs-H_Roots_P Parameter: Plant Line Value: WS
  misc_feature: MA Experiment 20000269 PARAMETER Experiment Name: At_1mM_KNO3_L-vs-H_Roots_P Parameter: Timepoint (day) Value: 7,10,12
  misc_feature: MA Experiment 20000269 PARAMETER Experiment Name: At_1mM_KNO3_L-vs-H_Roots_P Parameter: Tissue Value: Roots
  misc_feature: MA Experiment 20000269 PARAMETER Experiment Name: At_1mM_KNO3_L-vs-H_Roots_P Parameter: Treatment Value: 1mM KNO3 vs. 50mM KNO3
  misc_feature: MA Experiment ID: 20000286 Result: Down-regulated in Transcription
  misc_feature: MA Experiment 20000286 PARAMETER Experiment Name: At_Open_Flower_P Parameter: Age (day) Value: 21
  misc_feature: MA Experiment 20000286 PARAMETER Experiment Name: At_Open_Flower_P Parameter: Plant Line Value: WS
  misc_feature: MA Experiment 20000286 PARAMETER Experiment Name: At_Open_Flower_P Parameter: Tissue Value: Half Open vs. Whole Plant
  misc_feature: MA Experiment ID: 20000439 Result: Down-regulated in Transcription
  misc_feature: MA Experiment 20000439 PARAMETER Experiment Name: At_Roots__P Parameter: Age (day) Value: 14 vs. 21
  misc_feature: MA Experiment 20000439 PARAMETER Experiment Name: At_Roots__P Parameter: Organism Value: A. thaliana
  misc_feature: MA Experiment 20000439 PARAMETER Experiment Name: At_Roots__P Parameter: Tissue Value: Roots vs. Whole Plant
  misc_feature: MA Experiment ID: 20000794 Result: Down-regulated in Transcription
  misc_feature: MA Experiment 20000794 PARAMETER Experiment Name: At_Petals_P Parameter: Age (day) Value: 23-25 days
  misc_feature: MA Experiment 20000794 PARAMETER Experiment Name: At_Petals_P Parameter: Plant Line Value: WS
  misc_feature: MA Experiment 20000794 PARAMETER Experiment Name: At_Petals_P Parameter: Tissue Value: Petals vs. Whole plant
  misc_feature: MA Experiment ID: 20001458 Result: Up-regulated in Transcription
  misc_feature: MA Experiment 20001458 PARAMETER Experiment Name: At_50mM_NH4NO3_L-to-H_P Parameter: Age (day) Value: Undefined
  misc_feature: MA Experiment 20001458 PARAMETER Experiment Name: At_50mM_NH4NO3_L-to-H_P Parameter: Organism Value: Undefined
  misc_feature: MA Experiment 20001458 PARAMETER Experiment Name: At_50mM_NH4NO3_L-to-H_P Parameter: Plant Line Value: Undefined
  misc_feature: MA Experiment 20001458 PARAMETER Experiment Name: At_50mM_NH4NO3_L-to-H_P Parameter: Timepoint (hr) Value: 2
  misc_feature: MA Experiment 20001458 PARAMETER Experiment Name: At_50mM_NH4NO3_L-to-H_P Parameter: Tissue Value: Siliques
  misc_feature: MA Experiment 20001458 PARAMETER Experiment Name: At_50mM_NH4NO3_L-to-H_P Parameter: Treatment Value: 50mM NH4NO3 vs. 100mM Manitol
  misc_feature: MA Experiment ID: 20001555 Result: Up-regulated in Transcription
  misc_feature: MA Experiment 20001555 PARAMETER Experiment Name: At_Drought_Soil_Dry_P Parameter: Age (day) Value: 24
  misc_feature: MA Experiment 20001555 PARAMETER Experiment Name: At_Drought_Soil_Dry_P Parameter: Organism Value: A. thaliana
  misc_feature: MA Experiment 20001555 PARAMETER Experiment Name: At_Drought_Soil_Dry_P Parameter: Plant Line Value: WS
  misc_feature: MA Experiment 20001555 PARAMETER Experiment Name: At_Drought_Soil_Dry_P Parameter: Post Timepoint (hr) Value: None
  misc_feature: MA Experiment 20001555 PARAMETER Experiment Name: At_Drought_Soil_Dry_P Parameter: Post-Treatment Value: None
  misc_feature: MA Experiment 20001555 PARAMETER Experiment Name: At_Drought_Soil_Dry_P Parameter: Timepoint (day) Value: 10
  misc_feature: MA Experiment 20001555 PARAMETER Experiment Name: At_Drought_Soil_Dry_P Parameter: Treatment Value: Drought vs. No Drought
  misc_feature: MA Experiment ID: 20001757 Result: Up-regulated in Transcription
  misc_feature: MA Experiment 20001757 PARAMETER Experiment Name: At_50mM_NH4NO3_L-to-H_P Parameter: Timepoint (hr) Value: 6
  misc_feature: MA Experiment 20001757 PARAMETER Experiment Name: At_50mM_NH4NO3_L-to-H_P Parameter: Tissue Value: Leaf
  misc_feature: MA Experiment 20001757 PARAMETER Experiment Name: At_50mM_NH4NO3_L-to-H_P Parameter: Treatment Value: 50mM NH4NO3 vs 100mM Mannitol
  misc_feature: MA Experiment ID: 20001760 Result: Down-regulated in Transcription
  misc_feature: MA Experiment 20001760 PARAMETER Experiment Name: At_50mM_NH4NO3_L-to-H_P Parameter: Timepoint (hr) Value: 2
  misc_feature: MA Experiment 20001760 PARAMETER Experiment Name: At_50mM_NH4NO3_L-to-H_P Parameter: Tissue Value: Siliques
  misc_feature: MA Experiment 20001760 PARAMETER Experiment Name: At_50mM_NH4NO3_L-to-H_P Parameter: Treatment Value: 50mM NH4NO3 vs 100mM Mannitol
  misc_feature: MA Experiment ID: 20001906 Result: Up-regulated in Transcription
  misc_feature: MA Experiment 20001906 PARAMETER Experiment Name: At_Drought_Reproduction_P Parameter: Age (day) Value: 35
  misc_feature: MA Experiment 20001906 PARAMETER Experiment Name: At_Drought_Reproduction_P Parameter: Organism Value: A. thaliana
  misc_feature: MA Experiment 20001906 PARAMETER Experiment Name: At_Drought_Reproduction_P Parameter: Plant Line Value: WS
  misc_feature: MA Experiment 20001906 PARAMETER Experiment Name: At_Drought_Reproduction_P Parameter: Timepoint (day) Value: 5
  misc_feature: MA Experiment 20001906 PARAMETER Experiment Name: At_Drought_Reproduction_P Parameter: Tissue Value: Siliques
  misc_feature: MA Experiment 20001906 PARAMETER Experiment Name: At_Drought_Reproduction_P Parameter: Treatment Value: Drought vs. No Drought
  misc_feature: MA Experiment ID: 20001910 Result: Up-regulated in Transcription
  misc_feature: MA Experiment 20001910 PARAMETER Experiment Name: At_Drought_Reproduction_P Parameter: Age (day) Value: 37
  misc_feature: MA Experiment 20001910 PARAMETER Experiment Name: At_Drought_Reproduction_P Parameter: Organism Value: A. thaliana
  misc_feature: MA Experiment 20001910 PARAMETER Experiment Name: At_Drought_Reproduction_P Parameter: Plant Line Value: WS
  misc_feature: MA Experiment 20001910 PARAMETER Experiment Name: At_Drought_Reproduction_P Parameter: Timepoint (day) Value: 7
  misc_feature: MA Experiment 20001910 PARAMETER Experiment Name: At_Drought_Reproduction_P Parameter: Tissue Value: Flowers
  misc_feature: MA Experiment 20001910 PARAMETER Experiment Name: At_Drought_Reproduction_P Parameter: Treatment Value: Drought vs. No Drought
gagagagagcactagtccccccccccccgatgcatcacttgtttctccataataagagagttttaagcatttgaaacaaaaaaaatggcttccaaggctttggttctgttgggtctctttgctgttcttctcgtcgtctcagaagtagccgcggcatcttctgccacagtgaattcagagagtaaggaaactgtgaaacctgatcaacgtggctacggtgacaatggaggaaattacaataacggaggaggttaccagggaggagggggtaattaccaaggaggaggaggtaattaccaaggaggaggaggtaattaccaaggaggaggaggaagataccaaggaggaggaggacggtaccaaggaggaggaggacgataccaaggaggcggtgggcgacaaggaggagggggaagtgggggaagttactgccgccacggctgctgctacagaggttacaacggctgctcaagatgctgctcgtatgccggagaagctgttcagactcagcccggtcactaaaacaatatattaaccaatcaccaccatgcatgtattgcattatgtatgtatgattttaagtaaaccatggtgcgtttgtaatgaactgcctcaagtttttgaggcactatagattaagaagagaactatgggaataaagtttgattatgc

SEQ ID NO: 20381 - protein, 145 aa, Arabidopsis thaliana
  peptide (1)..(145): Ceres Seq. ID no. 14304354
  misc_feature (40)..(119): Pfam Name: Dehydrin Pfam Description: Dehydrin
  misc_feature (57)..(145): Homolog of NCBI NO: 18266043 NR Description: glycine-rich protein [Brassica oleracea]
  misc_feature (8)..(139): Homolog of NCBI NO: 13443598 NR Description: glycine-rich protein 1 [Cicer arietinum]
  misc_feature (65)..(145): Homolog of NCBI NO: 20466662 NR Description: unknown protein [Arabidopsis thaliana]
  misc_feature (65)..(145): Homolog of NCBI NO: 18396043 NR Description: glycine-rich protein [Arabidopsis thaliana]
  misc_feature (1)..(144): Homolog of NCBI NO: 30678191 NR Description: glycine-rich protein [Arabidopsis thaliana]
  misc_feature (65)..(145): Homolog of NCBI NO: 4206767 NR Description: glycine-rich protein 3 short isoform [Arabidopsis
  misc_feature (1)..(77): Homolog of NCBI NO: 24417446 NR Description: unknown [Arabidopsis thaliana]
  misc_feature (1)..(145): Homolog of NCBI NO: 81625 NR Description: glycine-rich protein 3 precursor - Arabidopsis
  misc_feature (1)..(145): Homolog of NCBI NO: 259447 NR Description: glycine-rich protein; atGRP [Arabidopsis thaliana]
  misc_feature (1)..(145): Homolog of NCBI NO: 15224548 NR Description: glycine-rich protein (GRP) [Arabidopsis thaliana]
MASKALVLLGLFAVLLVVSEVAAASSATVNSESKETVKPDQRGYGDNGGNYNNGGGYQGGGGNYQGGGGNYQGGGGNYQGGGGRYQGGGGRYQGGGGRYQGGGGRQGGGGSGGSYCRHGCCYRGYNGCSRCCSYAGEAVQTQPGH

SEQ ID NO: 20382 - protein, 103 aa, Arabidopsis thaliana
  peptide (1)..(103): Ceres Seq. ID no. 14304355
  misc_feature (24)..(101): Homolog of NCBI NO: 25411166 NR Description: hypothetical protein At2g05380 [imported] -
MEEITITEEVTREEGVITKEEEVITKEEEVITKEEEEDTKEEEDGTKEEEDDTKEAVGDKEEGEVGEVTAATAAATEVTTAAQDAARMPEKLFRLSPVTKTIY

SEQ ID NO: 20383 - DNA, 1347 bp, Arabidopsis thaliana
  misc_feature (1)..(1347): Ceres Seq. ID no. 13648367
  misc_feature: MA Experiment ID: 20001451 Result: Down-regulated in Transcription
  misc_feature: MA Experiment 20001451 PARAMETER Experiment Name: At_Far-red-induction_P Parameter: Age (day) Value: 7
  misc_feature: MA Experiment 20001451 PARAMETER Experiment Name: At_Far-red-induction_P Parameter: Light Value: Far-red vs. White
  misc_feature: MA Experiment 20001451 PARAMETER Experiment Name: At_Far-red-induction_P Parameter: Organism Value: A. thaliana
  misc_feature: MA Experiment 20001451 PARAMETER Experiment Name: At_Far-red-induction_P Parameter: Plant Line Value: Columbia
  misc_feature: MA Experiment 20001451 PARAMETER Experiment Name: At_Far-red-induction_P Parameter: Timepoint (hr) Value: 24
  misc_feature: MA Experiment 20001451 PARAMETER Experiment Name: At_Far-red-induction_P Parameter: Tissue Value: Whole Plant
gagaagaaaaatagtgctttgagaagaagaaaaaaaccgttgccctagaattaaaatccacttctcagtgtcataggcgtcgtcggtttgggaattttataaagttggtctcttttgaattcatcagtttcgtcattctccttcaaatctggaaaccaaagcgagtgtgttttgctctcttgaatcgaattttgagcagaaaatggaagctctctacgccaagctctacgacaaatacaccaaactccagaagaagaaatattccgaatacgatgagattaataaggaacaagaagagaaattccttacctttgtttcagcctcagaggagttgatggaacatttgagtggtgaaaatcagagttctctggagatggttgagaagttgaggaatgaaatcatttcaatcagatctggcagggacgacaagtttctggagtgtcaaaagcttctcatggaagaagaactaaagaacaaatcactttctgaagaagttgtcaagctaaaagaagaagttgtcaagctaaaagagctggtccaagaggaacatcctcgcaactatgaagatcaaagtggaaaaaaacaaaagagaaagactcctgaaagtgctcgagttacaacgagaagcatgataaaacgtagcagactgtcagaagatttggtggaaacggatatggtatcacctgacattagcaaacatcataaagcaaaggagcctctcttggtttctcagccacaatgctgcagaacaacctacgatggatcaagtagttctgctagttgtacatttcaagctcttggcaaacacttgctaggaatgaaattatcaactaataataagggcaaacgcgcctgcattgtagcctcacacccaacaaccggtttatccttcagcctaacttttataaataacccaaatggtgaagaatctgagctgctttacaagcctgcatcactcggaacatttcaaagagtggcaccggaatggatgagagaagttataaagttcagcacaagtatgtgtcccatcttctttgaaagagtctctcgagtcattaagctcaattgttgatcggtaccgtatgtacatctccctccccttatcttgtgtagtcatctctgatggcttcttagtgtgatgtttctcaataggtttgaaaagctagggaagttatcattgtatctatagaaatgtgtctctctttaactttggaattagtttcaaagatagtgtgtccttgtgatgaatcatattgtaacaagatcttgatttatcctttgctctcgataccctctcctcttgtagacctcataaatctctgatctattgagcattttacatgattc

SEQ ID NO: 20384 - protein, 289 aa, Arabidopsis thaliana
  peptide (1)..(289): Ceres Seq. ID no. 13648368
  misc_feature (161)..(285): Homolog of NCBI NO: 13194678 NR Description: unknown [Pennisetum ciliare]
  misc_feature (1)..(289): Homolog of NCBI NO: 22331190 NR Description: expressed protein [Arabidopsis thaliana]
MEALYAKLYDKYTKLQKKKYSEYDEINKEQEEKFLTFVSASEELMEHLSGENQSSLEMVEKLRNEIISIRSGRDDKFLECQKLLMEEELKNKSLSEEVVKLKEEVVKLKELVQEEHPRNYEDQSGKKQKRKTPESARVTTRSMIKRSRLSEDLVETDMVSPDISKHHKAKEPLLVSQPQCCRTTYDGSSSSASCTFQALGKHLLGMKLSTNNKGKRACIVASHPTTGLSFSLTFINNPNGEESELLYKPASLGTFQRVAPEWMREVIKFSTSMCPIFFERVSRVIKLNC

SEQ ID NO: 20385 - protein, 245 aa, Arabidopsis thaliana
  peptide (1)..(245): Ceres Seq. ID no. 13648369
  misc_feature (117)..(241): Homolog of NCBI NO: 13194678 NR Description: unknown [Pennisetum ciliare]
  misc_feature (1)..(245): Homolog of NCBI NO: 22331190 NR Description: expressed protein [Arabidopsis thaliana]
MEHLSGENQSSLEMVEKLRNEIISIRSGRDDKFLECQKLLMEEELKNKSLSEEVVKLKEEVVKLKELVQEEHPRNYEDQSGKKQKRKTPESARVTTRSMIKRSRLSEDLVETDMVSPDISKHHKAKEPLLVSQPQCCRTTYDGSSSSASCTFQALGKHLLGMKLSTNNKGKRACIVASHPTTGLSFSLTFINNPNGEESELLYKPASLGTFQRVAPEWMREVIKFSTSMCPIFFERVSRVIKLNC

SEQ ID NO: 20386 - protein, 232 aa, Arabidopsis thaliana
  peptide (1)..(232): Ceres Seq. ID no. 13648370
  misc_feature (104)..(228): Homolog of NCBI NO: 13194678 NR Description: unknown [Pennisetum ciliare]
  misc_feature (1)..(232): Homolog of NCBI NO: 22331190 NR Description: expressed protein [Arabidopsis thaliana]
MVEKLRNEIISIRSGRDDKFLECQKLLMEEELKNKSLSEEVVKLKEEVVKLKELVQEEHPRNYEDQSGKKQKRKTPESARVTTRSMIKRSRLSEDLVETDMVSPDISKHHKAKEPLLVSQPQCCRTTYDGSSSSASCTFQALGKHLLGMKLSTNNKGKRACIVASHPTTGLSFSLTFINNPNGEESELLYKPASLGTFQRVAPEWMREVIKFSTSMCPIFFERVSRVIKLNC

SEQ ID NO: 20387 - DNA, 778 bp, Arabidopsis thaliana
  misc_feature (1)..(778): Ceres Seq. ID no. 13648212
  misc_feature: MA Experiment ID: 20000185 Result: Down-regulated in Transcription
  misc_feature: MA Experiment 20000185 PARAMETER Experiment Name: At_Roots__P Parameter: Age (day) Value: 7 vs. 21
  misc_feature: MA Experiment 20000185 PARAMETER Experiment Name: At_Roots__P Parameter: Organism Value: A. thaliana
  misc_feature: MA Experiment 20000185 PARAMETER Experiment Name: At_Roots__P Parameter: Tissue Value: Roots vs. Whole Plant
  misc_feature: MA Experiment ID: 20000234 Result: Down-regulated in Transcription
  misc_feature: MA Experiment 20000234 PARAMETER Experiment Name: At_Siliques_P Parameter: Age (day) Value: 21
  misc_feature: MA Experiment 20000234 PARAMETER Experiment Name: At_Siliques_P Parameter: Organism Value: A. thaliana
  misc_feature: MA Experiment 20000234 PARAMETER Experiment Name: At_Siliques_P Parameter: Plant Line Value: WS
  misc_feature: MA Experiment 20000234 PARAMETER Experiment Name: At_Siliques_P Parameter: Tissue Value: Less Than 5mm Siliques vs. Whole Plant
  misc_feature: MA Experiment ID: 20000235 Result: Down-regulated in Transcription
  misc_feature: MA Experiment 20000235 PARAMETER Experiment Name: At_Siliques_P Parameter: Age (day) Value: 21
  misc_feature: MA Experiment 20000235 PARAMETER Experiment Name: At_Siliques_P Parameter: Organism Value: A. thaliana
  misc_feature: MA Experiment 20000235 PARAMETER Experiment Name: At_Siliques_P Parameter: Plant Line Value: WS
  misc_feature: MA Experiment 20000235 PARAMETER Experiment Name: At_Siliques_P Parameter: Tissue Value: 5-10mm Siliques vs. Whole Plant
  misc_feature: MA Experiment ID: 20000264 Result: Down-regulated in Transcription
  misc_feature: MA Experiment 20000264 PARAMETER Experiment Name: At_Open_Flower_P Parameter: Age (day) Value: 21
  misc_feature: MA Experiment 20000264 PARAMETER Experiment Name: At_Open_Flower_P Parameter: Plant Line Value: WS
  misc_feature: MA Experiment 20000264 PARAMETER Experiment Name: At_Open_Flower_P Parameter: Tissue Value: Open Flower vs. Whole Plant
  misc_feature: MA Experiment ID: 20000265 Result: Down-regulated in Transcription
  misc_feature: MA Experiment 20000265 PARAMETER Experiment Name: At_Open_Flower_P Parameter: Age (day) Value: 21
  misc_feature: MA Experiment 20000265 PARAMETER Experiment Name: At_Open_Flower_P Parameter: Plant Line Value: WS
  misc_feature: MA Experiment 20000265 PARAMETER Experiment Name: At_Open_Flower_P Parameter: Tissue Value: Closed Flower vs. Whole Plant
  misc_feature: MA Experiment ID: 20000268 Result: Down-regulated in Transcription
  misc_feature: MA Experiment 20000268 PARAMETER Experiment Name: At_100mM_NaCl__P Parameter: Age (day) Value: 14
  misc_feature: MA Experiment 20000268 PARAMETER Experiment Name: At_100mM_NaCl__P Parameter: Organism Value: A. thaliana
  misc_feature: MA Experiment 20000268 PARAMETER Experiment Name: At_100mM_NaCl__P Parameter: Plant Line Value: WS
  misc_feature: MA Experiment 20000268 PARAMETER Experiment Name: At_100mM_NaCl__P Parameter: Timepoint (hr) Value: 6
  misc_feature: MA Experiment 20000268 PARAMETER Experiment Name: At_100mM_NaCl__P Parameter: Tissue Value: Whole Plant
  misc_feature: MA Experiment 20000268 PARAMETER Experiment Name: At_100mM_NaCl__P Parameter: Treatment Value: 100mM NaCl vs. No Treatment
  misc_feature: MA Experiment ID: 20000286 Result: Down-regulated in Transcription
  misc_feature: MA Experiment 20000286 PARAMETER Experiment Name: At_Open_Flower_P Parameter: Age (day) Value: 21
  misc_feature: MA Experiment 20000286 PARAMETER Experiment Name: At_Open_Flower_P Parameter: Plant Line Value: WS
  misc_feature: MA Experiment 20000286 PARAMETER Experiment Name: At_Open_Flower_P Parameter: Tissue Value: Half Open vs. Whole Plant
  misc_feature: MA Experiment ID: 20000436 Result: Down-regulated in Transcription
  misc_feature: MA Experiment 20000436 PARAMETER Experiment Name: At_Drought_P Parameter: Age (day) Value: 7
  misc_feature: MA Experiment 20000436 PARAMETER Experiment Name: At_Drought_P Parameter: Organism Value: A. thaliana
  misc_feature: MA Experiment 20000436 PARAMETER Experiment Name: At_Drought_P Parameter: Plant Line Value: WS
  misc_feature: MA Experiment 20000436 PARAMETER Experiment Name: At_Drought_P Parameter: Timepoint (hr) Value: 12
  misc_feature: MA Experiment 20000436 PARAMETER Experiment Name: At_Drought_P Parameter: Tissue Value: Whole Plant
  misc_feature: MA Experiment 20000436 PARAMETER Experiment Name: At_Drought_P Parameter: Treatment Value: Drought vs. No Drought
  misc_feature: MA Experiment ID: 20000437 Result: Down-regulated in Transcription
  misc_feature: MA Experiment 20000437 PARAMETER Experiment Name: At_Drought_P Parameter: Age (day) Value: 8
  misc_feature: MA Experiment 20000437 PARAMETER Experiment Name: At_Drought_P Parameter: Organism Value: A. thaliana
  misc_feature: MA Experiment 20000437 PARAMETER Experiment Name: At_Drought_P Parameter: Plant Line Value: WS
  misc_feature: MA Experiment 20000437 PARAMETER Experiment Name: At_Drought_P Parameter: Timepoint (hr) Value: 24
  misc_feature: MA Experiment 20000437 PARAMETER Experiment Name: At_Drought_P Parameter: Tissue Value: Whole Plant
  misc_feature: MA Experiment 20000437 PARAMETER Experiment Name: At_Drought_P Parameter: Treatment Value: Drought vs. No Drought
  misc_feature: MA Experiment ID: 20000439 Result: Down-regulated in Transcription
  misc_feature: MA Experiment 20000439 PARAMETER Experiment Name: At_Roots__P Parameter: Age (day) Value: 14 vs. 21
  misc_feature: MA Experiment 20000439 PARAMETER Experiment Name: At_Roots__P Parameter: Organism Value: A. thaliana
  misc_feature: MA Experiment 20000439 PARAMETER Experiment Name: At_Roots__P Parameter: Tissue Value: Roots vs. Whole Plant
  misc_feature: MA Experiment ID: 20000794 Result: Down-regulated in Transcription
  misc_feature: MA Experiment 20000794 PARAMETER Experiment Name: At_Petals_P Parameter: Age (day) Value: 23-25 days
  misc_feature: MA Experiment 20000794 PARAMETER Experiment Name: At_Petals_P Parameter: Plant Line Value: WS
  misc_feature: MA Experiment 20000794 PARAMETER Experiment Name: At_Petals_P Parameter: Tissue Value: Petals vs. Whole plant
  misc_feature: MA Experiment ID: 20001248 Result: Down-regulated in Transcription
  misc_feature: MA Experiment 20001248 PARAMETER Experiment Name: At_Far-red-induction_P Parameter: Age (day) Value: 7
  misc_feature: MA Experiment 20001248 PARAMETER Experiment Name: At_Far-red-induction_P Parameter: Light Value: Far-red vs. White
  misc_feature: MA Experiment 20001248 PARAMETER Experiment Name: At_Far-red-induction_P Parameter: Organism Value: A. thaliana
  misc_feature: MA Experiment 20001248 PARAMETER Experiment Name: At_Far-red-induction_P Parameter: Plant Line Value: Columbia
  misc_feature: MA Experiment 20001248 PARAMETER Experiment Name: At_Far-red-induction_P Parameter: Timepoint (hr) Value: 4
  misc_feature: MA Experiment 20001248 PARAMETER Experiment Name: At_Far-red-induction_P Parameter: Tissue Value: Whole Plant
  misc_feature: MA Experiment ID: 20001557 Result: Down-regulated in Transcription
  misc_feature: MA Experiment 20001557 PARAMETER Experiment Name: At_Drought_Soil_Dry_P Parameter: Age (day) Value: 27
  misc_feature: MA Experiment 20001557 PARAMETER Experiment Name: At_Drought_Soil_Dry_P Parameter: Organism Value: A. thaliana
  misc_feature: MA Experiment 20001557 PARAMETER Experiment Name: At_Drought_Soil_Dry_P Parameter: Plant Line Value: WS
  misc_feature: MA Experiment 20001557 PARAMETER Experiment Name: At_Drought_Soil_Dry_P Parameter: Post Timepoint (hr) Value: 3
  misc_feature: MA Experiment 20001557 PARAMETER Experiment Name: At_Drought_Soil_Dry_P Parameter: Post-Treatment Value: Re-Water vs. No Drought
  misc_feature: MA Experiment 20001557 PARAMETER Experiment Name: At_Drought_Soil_Dry_P Parameter: Timepoint (day) Value: 13
  misc_feature: MA Experiment 20001557 PARAMETER Experiment Name: At_Drought_Soil_Dry_P Parameter: Treatment Value: Drought vs. No Drought
  misc_feature: MA Experiment ID: 20001560 Result: Down-regulated in Transcription
  misc_feature: MA Experiment 20001560 PARAMETER Experiment Name: At_Drought_Soil_Dry_P Parameter: Age (day) Value: 28
  misc_feature: MA Experiment 20001560 PARAMETER Experiment Name: At_Drought_Soil_Dry_P Parameter: Organism Value: A. thaliana
  misc_feature: MA Experiment 20001560 PARAMETER Experiment Name: At_Drought_Soil_Dry_P Parameter: Plant Line Value: WS
  misc_feature: MA Experiment 20001560 PARAMETER Experiment Name: At_Drought_Soil_Dry_P Parameter: Post Timepoint (hr) Value: None
  misc_feature: MA Experiment 20001560 PARAMETER Experiment Name: At_Drought_Soil_Dry_P Parameter: Post-Treatment Value: None
  misc_feature: MA Experiment 20001560 PARAMETER Experiment Name: At_Drought_Soil_Dry_P Parameter: Timepoint (day) Value: 14
  misc_feature: MA Experiment 20001560 PARAMETER Experiment Name: At_Drought_Soil_Dry_P Parameter: Treatment Value: Drought vs. No Drought
  misc_feature: MA Experiment ID: 20001756 Result: Up-regulated in Transcription
  misc_feature: MA Experiment 20001756 PARAMETER Experiment Name: At_50mM_NH4NO3_L-to-H_P Parameter: Timepoint (hr) Value: 4
  misc_feature: MA Experiment 20001756 PARAMETER Experiment Name: At_50mM_NH4NO3_L-to-H_P Parameter: Tissue Value: Leaf
  misc_feature: MA Experiment 20001756 PARAMETER Experiment Name: At_50mM_NH4NO3_L-to-H_P Parameter: Treatment Value: 50mM NH4NO3 vs 100mM Mannitol
  misc_feature: MA Experiment ID: 20001757 Result: Up-regulated in Transcription
  misc_feature: MA Experiment 20001757 PARAMETER Experiment Name: At_50mM_NH4NO3_L-to-H_P Parameter: Timepoint (hr) Value: 6
  misc_feature: MA Experiment 20001757 PARAMETER Experiment Name: At_50mM_NH4NO3_L-to-H_P Parameter: Tissue Value: Leaf
  misc_feature: MA Experiment 20001757 PARAMETER Experiment Name: At_50mM_NH4NO3_L-to-H_P Parameter: Treatment Value: 50mM NH4NO3 vs 100mM Mannitol
  misc_feature: MA Experiment ID: 20001905 Result: Down-regulated in Transcription
  misc_feature: MA Experiment 20001905 PARAMETER Experiment Name: At_Drought_Reproduction_P Parameter: Age (day) Value: 40
  misc_feature: MA Experiment 20001905 PARAMETER Experiment Name: At_Drought_Reproduction_P Parameter: Organism Value: A. thaliana
  misc_feature: MA Experiment 20001905 PARAMETER Experiment Name: At_Drought_Reproduction_P Parameter: Plant Line Value: WS
  misc_feature: MA Experiment 20001905 PARAMETER Experiment Name: At_Drought_Reproduction_P Parameter: Timepoint (day) Value: 10
  misc_feature: MA Experiment 20001905 PARAMETER Experiment Name: At_Drought_Reproduction_P Parameter: Tissue Value: Rosettes
  misc_feature: MA Experiment 20001905 PARAMETER Experiment Name: At_Drought_Reproduction_P Parameter: Treatment Value: Drought vs. No Drought
agagctcactagtccccccccccccccccgaagataatgtatctaggtttgcttatgattatacatgtgatatttaatacatggcacaggttcgtcgagtttcacagccataggtacaatagaaggcaaattcgattgtggttatctggtaaaagttaagttgggctcagagattcttaacggcgttctttatcattcggcccagcccggcccatcatcatctccaaccgctgttctaaacaatgccgttgtaccttatgttgaaactgggaggagacggcgtcgtttaggtaaaagacgaagaagcagacgcagagaagatccgaattacccgaaaccgaaccggagcggttacaatttcttctttgctgagaaacattgcaagctcaaatcactttatcccaacaaggagagagagtttacgaaacttatcggagaatcgtggagcaatctctctaccgaagaacgaatggtttatcaagacattggattgaaggataaggaaaggtatcagagggagttgaatgagtacagagaaacgttgaggcttagggatggtgacatgacaaacggcaaggctttttaggtgatttatttaaaacggcaactcgttttgttgtaggtcgtttctctcttttaagattggacgcctcgccgtttcttttattttctagcttattgtagttgtccatgcttgcttaactaggctcagtgagaggctagacttgccaaacttgaagagtctttatttatttaagaattttagatgttctaatgt

SEQ ID NO: 20388 - protein, 40 aa, Arabidopsis thaliana
  peptide (1)..(40): Ceres Seq. ID no. 13648213
MYLGLLMIIHVIFNTWHRFVEFHSHRYNRRQIRLWLSGKS

SEQ ID NO: 20389 - protein, 38 aa, Arabidopsis thaliana
  peptide (1)..(38): Ceres Seq. ID no. 13648214
  misc_feature (1)..(21): Homolog of NCBI NO: 790198 NR Description: high mobility group protein
  misc_feature (1)..(23): Homolog of NCBI NO: 730136 NR Description: HIGH MOBILITY GROUP PROTEIN HOMOLOG NHP1
  misc_feature (1)..(22): Homolog of NCBI NO: 27882654 NR Description: Similar to high mobility group box 3 [Xenopus
  misc_feature (1)..(37): Homolog of NCBI NO: 19114226 NR Description: nonhistone chromosomal protein
  misc_feature (1)..(28): Homolog of NCBI NO: 15222755 NR Description: hypothetical protein [Arabidopsis thaliana]
  misc_feature (1)..(28): Homolog of NCBI NO: 25405992 NR Description: protein F20N2.8 [imported] - Arabidopsis thaliana
  misc_feature (1)..(24): Homolog of NCBI NO: 18399977 NR Description: expressed protein [Arabidopsis thaliana]
  misc_feature (1)..(23): Homolog of NCBI NO: 15220344 NR Description: expressed protein [Arabidopsis thaliana]
  misc_feature (1)..(32): Homolog of NCBI NO: 32490476 NR Description: glutathione S-transferase GST 16 - like protein
  misc_feature (1)..(38): Homolog of NCBI NO: 15222957 NR Description: expressed protein [Arabidopsis thaliana]
MVYQDIGLKDKERYQRELNEYRETLRLRDGDMTNGKAF

SEQ ID NO: 20390 - protein, 34 aa, Arabidopsis thaliana
  peptide (1)..(34): Ceres Seq. ID no. 13648215
MIIHVIFNTWHRFVEFHSHRYNRRQIRLWLSGKS

SEQ ID NO: 20391 - DNA, 408 bp, Arabidopsis thaliana
  misc_feature (1)..(408): Ceres Seq. ID no. 12606252
  misc_feature: MA Experiment ID: 20000184 Result: Down-regulated in Transcription
  misc_feature: MA Experiment 20000184 PARAMETER Experiment Name: At_Shoots__P Parameter: Age (day) Value: 7
  misc_feature: MA Experiment 20000184 PARAMETER Experiment Name: At_Shoots__P Parameter: Tissue Value: Shoots vs. Whole Plant
  misc_feature: MA Experiment ID: 20001451 Result: Up-regulated in Transcription
  misc_feature: MA Experiment 20001451 PARAMETER Experiment Name: At_Far-red-induction_P Parameter: Age (day) Value: 7
  misc_feature: MA Experiment 20001451 PARAMETER Experiment Name: At_Far-red-induction_P Parameter: Light Value: Far-red vs. White
  misc_feature: MA Experiment 20001451 PARAMETER Experiment Name: At_Far-red-induction_P Parameter: Organism Value: A. thaliana
  misc_feature: MA Experiment 20001451 PARAMETER Experiment Name: At_Far-red-induction_P Parameter: Plant Line Value: Columbia
  misc_feature: MA Experiment 20001451 PARAMETER Experiment Name: At_Far-red-induction_P Parameter: Timepoint (hr) Value: 24
  misc_feature: MA Experiment 20001451 PARAMETER Experiment Name: At_Far-red-induction_P Parameter: Tissue Value: Whole Plant
ggaaacgaattctctctctctcagcttatagatacccaaattaagaagaagtgaaagatgcatcctccacttacaccacatagacatccaatgtgtctggagataattgaggaatttcaaaagtgtcatatagaccatccgattgggaaattctttggagaatgtacagagctgaaagtaaagcttgatcgatgtttccgccaagagaaagctgtgaagcggaaggtaaatttcgaacaaagcaagaaacttcaagaaagactgaaagctataaggaaagaagaaaccgcagagacttgagcattgttgtataataatcctataaagaacatgtgcgtgtgtctatttcaaaagaacacatttctaaattgatccacaaagaagagttttgatactcttttgcctcgt

SEQ ID NO: 20392 - protein, 80 aa, Arabidopsis thaliana
  peptide (1)..(80): Ceres Seq. ID no. 12606253
  misc_feature (1)..(69): Homolog of NCBI NO: 26378936 NR Description: unnamed protein product [Mus musculus]
  misc_feature (1)..(69): Homolog of NCBI NO: 33457314 NR Description: RIKEN cDNA 1110046L09 [Mus musculus]
  misc_feature (1)..(79): Homolog of NCBI NO: 19112798 NR Description: very hypothetical protein [Schizosaccharomyces
MHPPLTPHRHPMCLEIIEEFQKCHIDHPIGKFFGECTELKVKLDRCFRQEKAVKRKVNFEQSKKLQERLKAIRKEETAET

SEQ ID NO: 20393 - protein, 69 aa, Arabidopsis thaliana
  peptide (1)..(69): Ceres Seq. ID no. 12606254
  misc_feature (1)..(58): Homolog of NCBI NO: 26378936 NR Description: unnamed protein product [Mus musculus]
  misc_feature (1)..(58): Homolog of NCBI NO: 33457314 NR Description: RIKEN cDNA 1110046L09 [Mus musculus]
  misc_feature (1)..(68): Homolog of NCBI NO: 19112798 NR Description: very hypothetical protein [Schizosaccharomyces
MCLEIIEEFQKCHIDHPIGKFFGECTELKVKLDRCFRQEKAVKRKVNFEQSKKLQERLKAIRKEETAET

SEQ ID NO: 20394 - protein, 40 aa, Arabidopsis thaliana
  peptide (1)..(40): Ceres Seq. ID no. 12606255
MFPPRESCEAEGKFRTKQETSRKTESYKERRNRRDLSIVV

SEQ ID NO: 20395 - DNA, 452 bp, Arabidopsis thaliana
  misc_feature (1)..(452): Ceres Seq. ID no. 12605645
gagacctgcgagaaacaaaaaataataaaagtaaacaaaactaccaaaaaaaaaaaaacagaaaaaaacctttcaggtctcaactagcaatggagatgaagaagattgcctgcggagtcgttttcgctgctgcttccatgaccgccgtcatggctgcagaggtcggagcacctgcaccaggacccgccgcaagtggagcctccgtagctgttccggctcttggctctttggttggagcttcccttgtgtctctcttcgcctactacttgaactaagcttttctatttaaagcaaaaaaagaagaaatatcgatgtctctgtcaatttctatgatgtccaattttgtgtgtgttgtttagacaggcaaagtgaataaaaacgaaagataatttgattacggtcagacatgtttttatgtaatgctgattaataaataaatattatataccctg

SEQ ID NO: 20396 - protein, 90 aa, Arabidopsis thaliana
  peptide (1)..(90): Ceres Seq. ID no. 12605646
  misc_feature (30)..(77): Homolog of NCBI NO: 4455102 NR Description: pollen-specific protein BAN102 [Brassica rapa]
  misc_feature (30)..(90): Homolog of NCBI NO: 20279095 NR Description: arabinogalactan-peptide AGP23 [Arabidopsis
  misc_feature (30)..(90): Homolog of NCBI NO: 15230372 NR Description: arabinogalactan-protein, putative (AGP23)
DLRETKNNKSKQNYQKKKNRKKPFRSQLAMEMKKIACGVVFAAASMTAVMAAEVGAPAPGPAASGASVAVPALGSLVGASLVSLFAYYLN

SEQ ID NO: 20397 - protein, 61 aa, Arabidopsis thaliana
  peptide (1)..(61): Ceres Seq. ID no. 12605647
  misc_feature (1)..(48): Homolog of NCBI NO: 4455102 NR Description: pollen-specific protein BAN102 [Brassica rapa]
  misc_feature (1)..(61): Homolog of NCBI NO: 20279095 NR Description: arabinogalactan-peptide AGP23 [Arabidopsis
  misc_feature (1)..(61): Homolog of NCBI NO: 15230372 NR Description: arabinogalactan-protein, putative (AGP23)
MEMKKIACGVVFAAASMTAVMAAEVGAPAPGPAASGASVAVPALGSLVGASLVSLFAYYLN

SEQ ID NO: 20398 - protein, 59 aa, Arabidopsis thaliana
  peptide (1)..(59): Ceres Seq. ID no. 12605648
  misc_feature (1)..(46): Homolog of NCBI NO: 4455102 NR Description: pollen-specific protein BAN102 [Brassica rapa]
  misc_feature (1)..(59): Homolog of NCBI NO: 20279095 NR Description: arabinogalactan-peptide AGP23 [Arabidopsis
  misc_feature (1)..(59): Homolog of NCBI NO: 15230372 NR Description: arabinogalactan-protein, putative (AGP23)
MKKIACGVVFAAASMTAVMAAEVGAPAPGPAASGASVAVPALGSLVGASLVSLFAYYLN

SEQ ID NO: 20399 - DNA, 1324 bp, Arabidopsis thaliana
  misc_feature (1)..(1324): Ceres Seq. ID no. 14307631
ggagagtagaagaagcagaagcagtaatggtacgagcttcatcgtcgaagaaaggaggatcaaaaggaggagacaaagacgacgcagagtcaaaacagaggaagagattaaaaaccctagctctcgataaccaattgctctctgattctccggcgaaatctcattcctctctcaaaccttcaaagcaagttctcaaacaccatggcaccgacatcatccgcaaatctcagcgcaagaatcgctttctcttctctttccctggtcttctcgctcctatctccgccgctaccatcggcgatctcgatcgattatctaccaaaaaccctgtcctctaccttaatttccctcagggtcggatgaaactttttggaacgattttgtatccgaagaacaggtacttgactcttcaattttccagaggaggcaaaaatgtcttatgtgatgattattttgataacatgattgtgttctctgagtcatggtggattgggacaaaagaggagaatcctgaagaagctcgtcttgatttccctaaagaactagctcaggcagagaatactgagtttgatttccaaggcggtgctggaggagcagcttccgtcaagacgatggcaactcctgaaactggtagccaaccaacagagacagactcacctgaagttgacatggaggatgttttgtctgaggatggagaattcttggacgataagatccaagtaacaccaccagtccaattaacaccaccaatccaagtaacaccagtccgacagtctcagagaaattctgggaagaaattcaactttgcagaaacttccccagaggcctcctctggtgaaagtgaaggcaatacatctgatgaagatgagaaacctctgttggaacctgaatcttcaacaagaggtcgtgaggaatctcaagatggtaatggtgttactgcatcagcaagcaagttgcctacagaacttccggctaaaaaggaaaaaccaaaaagcaaagacagtaagctcgttcaagctactttgtctaaccttttcaagaaagctgaggagaaaacagctggaacttccaaggcgaaatcatcctcaaaagcttaaagaactcttttccagaagaaaatagaggtctgttgtttcttttgctgtgagaatatacagttttcagttcttttagttatgtttgagtgagatgagtaatgagaaattgctacaagactgatgattatgtttcacaaatcaagaattggataatgtattcatcatgcttaatcgatcgatagtttgtgttcaccgagcaatgtataaatcatctctgctcattttaatac

SEQ ID NO: 20400 - protein, 363 aa, Arabidopsis thaliana
  peptide (1)..(363): Ceres Seq. ID no. 14307632
  misc_feature (21)..(326): Homolog of NCBI NO: 34394443 NR Description: putative root hairless 1 [Oryza sativa (japonica
  misc_feature (9)..(363): Homolog of NCBI NO: 3811320 NR Description: ROOT HAIRLESS 1 [Arabidopsis thaliana]
  misc_feature (9)..(363): Homolog of NCBI NO: 18402164 NR Description: root hairless 1 (RHL1) [Arabidopsis thaliana]
RVEEAEAVMVRASSSKKGGSKGGDKDDAESKQRKRLKTLALDNQLLSDSPAKSHSSLKPSKQVLKHHGTDIIRKSQRKNRFLFSFPGLLAPISAATIGDLDRLSTKNPVLYLNFPQGRMKLFGTILYPKNRYLTLQFSRGGKNVLCDDYFDNMIVFSESWWIGTKEENPEEARLDFPKELAQAENTEFDFQGGAGGAASVKTMATPETGSQPTETDSPEVDMEDVLSEDGEFLDDKIQVTPPVQLTPPIQVTPVRQSQRNSGKKFNFAETSPEASSGESEGNTSDEDEKPLLEPESSTRGREESQDGNGVTASASKLPTELPAKKEKPKSKDSKLVQATLSNLFKKAEEKTAGTSKAKSSSKA

SEQ ID NO: 20401 - protein, 355 aa, Arabidopsis thaliana
  peptide (1)..(355): Ceres Seq. ID no. 14307633
  misc_feature (13)..(318): Homolog of NCBI NO: 34394443 NR Description: putative root hairless 1 [Oryza sativa (japonica
  misc_feature (1)..(355): Homolog of NCBI NO: 3811320 NR Description: ROOT HAIRLESS 1 [Arabidopsis thaliana]
  misc_feature (1)..(355): Homolog of NCBI NO: 18402164 NR Description: root hairless 1 (RHL1) [Arabidopsis thaliana]
MVRASSSKKGGSKGGDKDDAESKQRKRLKTLALDNQLLSDSPAKSHSSLKPSKQVLKHHGTDIIRKSQRKNRFLFSFPGLLAPISAATIGDLDRLSTKNPVLYLNFPQGRMKLFGTILYPKNRYLTLQFSRGGKNVLCDDYFDNMIVFSESWWIGTKEENPEEARLDFPKELAQAENTEFDFQGGAGGAASVKTMATPETGSQPTETDSPEVDMEDVLSEDGEFLDDKIQVTPPVQLTPPIQVTPVRQSQRNSGKKFNFAETSPEASSGESEGNTSDEDEKPLLEPESSTRGREESQDGNGVTASASKLPTELPAKKEKPKSKDSKLVQATLSNLFKKAEEKTAGTSKAKSSSKA

SEQ ID NO: 20402 - protein, 245 aa, Arabidopsis thaliana
  peptide (1)..(245): Ceres Seq. ID no. 14307634
  misc_feature (1)..(208): Homolog of NCBI NO: 34394443 NR Description: putative root hairless 1 [Oryza sativa (japonica
  misc_feature (1)..(245): Homolog of NCBI NO: 3811320 NR Description: ROOT HAIRLESS 1 [Arabidopsis thaliana]
  misc_feature (1)..(245): Homolog of NCBI NO: 18402164 NR Description: root hairless 1 (RHL1) [Arabidopsis thaliana]
MKLFGTILYPKNRYLTLQFSRGGKNVLCDDYFDNMIVFSESWWIGTKEENPEEARLDFPKELAQAENTEFDFQGGAGGAASVKTMATPETGSQPTETDSPEVDMEDVLSEDGEFLDDKIQVTPPVQLTPPIQVTPVRQSQRNSGKKFNFAETSPEASSGESEGNTSDEDEKPLLEPESSTRGREESQDGNGVTASASKLPTELPAKKEKPKSKDSKLVQATLSNLFKKAEEKTAGTSKAKSSSKA

SEQ ID NO: 20403 - DNA, 1114 bp, Arabidopsis thaliana
  misc_feature (1)..(1114): Ceres Seq. ID no. 13647714
aaaacaaacgcaggaggcctggaaaaaagaaagataacgggactcgagagattgagattacggagccacccactttcatggagtctacactctcagctttctcaaccgtcaaggcaacagcgatggctcgaagtagtggtggtccttcattacctctcctcactatttctaaagcacttaaccgccactttaccggcgccagacacctccatcctttattgctcgctcgctgttctccctccgtgcgacgtcttggtgggtttcatggcagtcgatttacttcgtcgaattcagctttgagaagcttgggagctgctgttttgccggtaatccgacaccgtttagagtgtttgtcgagctcatcgccgtctttcaggagtatctcaagtggcggcggttctggatttggggggtataatggtggaagcggcggtggtggtggcggaggatcggagagtggtgattccaagtcaaaactgggtgctaatgcaagtgatggtgtctctgttccgtcgtcagatatcattattctcgatgttggagggatgacatgtggagggtgttcagcaagtgtgaagaagatactggaaagccaacctcaagttgcttcagctagtgttaatctcaccaccgagacggcaattgtgtggcctgtaccggaagctaaaagtgtacctgattggcaaaagagtttaggcgagacgcttgcaaaccatctgaccaattgcgggtttcagtctactcctcgaggggaagttcctgaagatattgcaggagagtttgcaccttgatagtacaaaagatttttccagcagcaatcattattgatatgatgattaagagcagctgctcatggcgaatggattgtaaacctaaatttctggtgctagtagttccatttatgttgattttgttgtcagtccttgtgatctaagggcgtgtatttatcttctgttgtcgattgctgacataccttctccgaaccagacagcataactctgtagtgatgatcttgttctattatggtcgattttccaaaagaatacattgaaagctataaaattccatattaaagaaaaaaaaaaaaaaaaaaactcgagggggggcccggtac

SEQ ID NO: 20404 - protein, 262 aa, Arabidopsis thaliana
  peptide (1)..(262): Ceres Seq. ID no. 13647715
  misc_feature (168)..(249): Homolog of NCBI NO: 31616607 NR Description: Paa2 P-type ATPase [Arabidopsis thaliana]
  misc_feature (168)..(249): Homolog of NCBI NO: 22326934 NR Description: ATPase, E1-E2 type family [Arabidopsis thaliana]
  misc_feature (168)..(249): Homolog of NCBI NO: 26453112 NR Description: putative metal-transporting ATPase [Arabidopsis
  misc_feature (154)..(262): Homolog of NCBI NO: 33113965 NR Description: putative metal-transporting ATPase [Zea mays]
  misc_feature (125)..(246): Homolog of NCBI NO: 33146620 NR Description: metal-transporting P-type ATPase-like protein
  misc_feature (105)..(255): Homolog of NCBI NO: 3549654 NR Description: metal-transporting P-type ATPase (fragment)
  misc_feature (26)..(255): Homolog of NCBI NO: 2668492 NR Description: metal-transporting P-type ATPase [Arabidopsis
  misc_feature (26)..(255): Homolog of NCBI NO: 12643855 NR Description: Potential copper-transporting ATPase PAA1
  misc_feature (26)..(262): Homolog of NCBI NO: 18418230 NR Description: metal-transporting P-type ATPase (PAA1), putative
NKRRRPGKKKDNGTREIEITEPPTFMESTLSAFSTVKATAMARSSGGPSLPLLTISKALNRHFTGARHLHPLLLARCSPSVRRLGGFHGSRFTSSNSALRSLGAAVLPVIRHRLECLSSSSPSFRSISSGGGSGFGGYNGGSGGGGGGGSESGDSKSKLGANASDGVSVPSSDIIILDVGGMTCGGCSASVKKILESQPQVASASVNLTTETAIVWPVPEAKSVPDWQKSLGETLANHLTNCGFQSTPRGEVPEDIAGEFAP

SEQ ID NO: 20405 - protein, 237 aa, Arabidopsis thaliana
  peptide (1)..(237): Ceres Seq. ID no. 13647716
  misc_feature (1)..(237): Homolog of NCBI NO: 18418230 NR Description: metal-transporting P-type ATPase (PAA1), putative
  misc_feature (143)..(224): Homolog of NCBI NO: 31616607 NR Description: Paa2 P-type ATPase [Arabidopsis thaliana]
  misc_feature (143)..(224): Homolog of NCBI NO: 22326934 NR Description: ATPase, E1-E2 type family [Arabidopsis thaliana]
  misc_feature (143)..(224): Homolog of NCBI NO: 26453112 NR Description: putative metal-transporting ATPase [Arabidopsis
  misc_feature (129)..(237): Homolog of NCBI NO: 33113965 NR Description: putative metal-transporting ATPase [Zea mays]
  misc_feature (100)..(221): Homolog of NCBI NO: 33146620 NR Description: metal-transporting P-type ATPase-like protein
  misc_feature (80)..(230): Homolog of NCBI NO: 3549654 NR Description: metal-transporting P-type ATPase (fragment)
  misc_feature (1)..(230): Homolog of NCBI NO: 2668492 NR Description: metal-transporting P-type ATPase [Arabidopsis
  misc_feature (1)..(230): Homolog of NCBI NO: 12643855 NR Description: Potential copper-transporting ATPase PAA1
MESTLSAFSTVKATAMARSSGGPSLPLLTISKALNRHFTGARHLHPLLLARCSPSVRRLGGFHGSRFTSSNSALRSLGAAVLPVIRHRLECLSSSSPSFRSISSGGGSGFGGYNGGSGGGGGGGSESGDSKSKLGANASDGVSVPSSDIIILDVGGMTCGGCSASVKKILESQPQVASASVNLTTETAIVWPVPEAKSVPDWQKSLGETLANHLTNCGFQSTPRGEVPEDIAGEFAP

SEQ ID NO: 20406 - protein, 222 aa, Arabidopsis thaliana
  peptide (1)..(222): Ceres Seq. ID no. 13647717
  misc_feature (128)..(209): Homolog of NCBI NO: 31616607 NR Description: Paa2 P-type ATPase [Arabidopsis thaliana]
  misc_feature (128)..(209): Homolog of NCBI NO: 22326934 NR Description: ATPase, E1-E2 type family [Arabidopsis thaliana]
  misc_feature (128)..(209): Homolog of NCBI NO: 26453112 NR Description: putative metal-transporting ATPase [Arabidopsis
  misc_feature (114)..(222): Homolog of NCBI NO: 33113965 NR Description: putative metal-transporting ATPase [Zea mays]
  misc_feature (85)..(206): Homolog of NCBI NO: 33146620 NR Description: metal-transporting P-type ATPase-like protein
  misc_feature (65)..(215): Homolog of NCBI NO: 3549654 NR Description: metal-transporting P-type ATPase (fragment)
  misc_feature (1)..(215): Homolog of NCBI NO: 2668492 NR Description: metal-transporting P-type ATPase [Arabidopsis
  misc_feature (1)..(215): Homolog of NCBI NO: 12643855 NR Description: Potential copper-transporting ATPase PAA1
  misc_feature (1)..(222): Homolog of NCBI NO: 18418230 NR Description: metal-transporting P-type ATPase (PAA1), putative
MARSSGGPSLPLLTISKALNRHFTGARHLHPLLLARCSPSVRRLGGFHGSRFTSSNSALRSLGAAVLPVIRHRLECLSSSSPSFRSISSGGGSGFGGYNGGSGGGGGGGSESGDSKSKLGANASDGVSVPSSDIIILDVGGMTCGGCSASVKKILESQPQVASASVNLTTETAIVWPVPEAKSVPDWQKSLGETLANHLTNCGFQSTPRGEVPEDIAGEFAP

SEQ ID NO: 20407 - DNA, 1631 bp, Arabidopsis thaliana
  misc_feature (1)..(1631): Ceres Seq. ID no. 13648575
  misc_feature: MA Experiment ID: 20000180 Result: Up-regulated in Transcription
  misc_feature: MA Experiment 20000180 PARAMETER Experiment Name: At_Germinating_Seeds_P Parameter: Age (hr) Value: 24 vs. 0
  misc_feature: MA Experiment 20000180 PARAMETER Experiment Name: At_Germinating_Seeds_P Parameter: Tissue Value: Germinating Seeds
  misc_feature: MA Experiment ID: 20000234 Result: Up-regulated in Transcription
  misc_feature: MA Experiment 20000234 PARAMETER Experiment Name: At_Siliques_P Parameter: Age (day) Value: 21
  misc_feature: MA Experiment 20000234 PARAMETER Experiment Name: At_Siliques_P Parameter: Organism Value: A. thaliana
  misc_feature: MA Experiment 20000234 PARAMETER Experiment Name: At_Siliques_P Parameter: Plant Line Value: WS
  misc_feature: MA Experiment 20000234 PARAMETER Experiment Name: At_Siliques_P Parameter: Tissue Value: Less Than 5mm Siliques vs. Whole Plant
  misc_feature: MA Experiment ID: 20000495 Result: Up-regulated in Transcription
  misc_feature: MA Experiment 20000495 PARAMETER Experiment Name: At_Guard_Cells_P Parameter: Harvest Date Value: 8/2/2002
  misc_feature: MA Experiment 20000495 PARAMETER Experiment Name: At_Guard_Cells_P Parameter: Organism Value: A. thaliana
  misc_feature: MA Experiment 20000495 PARAMETER Experiment Name: At_Guard_Cells_P Parameter: Tissue Value: Guard Cells vs. Leaves
gagagatctttcatcttctaaatcgaagatggttcctaagatcgcatcaatggcgtctactagacctctcagttcacttccttacttgttcctctccttgtctctcctcttcgtcgtctcgcttctcttcttcttctccaattccttaatctccaatccaaatccgagcatttcacacaatactctccaaaacggtatcaatgtctatgtagctgagcttccaagatccctaaactatggtcttctcgacaaatactggtcctcttctactccagattcacgtatacccaccgacccagatcacccgacccgtaaaacccatttacccaaacccgatacacacccaccgtacccagagaatccgttgatcaagcaatacagtgctgagtactggatcatgggagacctagaaacctcaccagagaaacgaattggatcttttgctaaaagggttttcagtgaatctgacgctgatgtagtcttcgtgcccttctttgccacgttaagtgcagagatggagcttggaaatggtaaaggttcgtttagaaagaagtccggtaacgaagattatcaaagacagagacaagtgcttgattttctcaagaacactaaagcttggaaacgatctaatggtcgtgatcacgtttttgttctaactgaccctgttgcaatgtggcatgttcgtgaggagattgctttatctattcttcttgtggtggattttggaggatggtttaggcaagattctaagtcgtctaatgggactagcttgccggagaggattgagcatactcaagtctctgtcattaaggatgtgattgttccatatacgcatctgcttcctagattggatttgtctcagaaccagagacgtcatagccttctttatttcaaaggagctaagcacagacatcggggagggttaatcagagaaaaactatgggacttgttggtcaatgagcctggcgttgtcatggaagaaggttttcctaatgcaacaggaaaggaacagtcaataagaggaatgagaaactcagagttctgcttacatccagctggtgacactcccacttcatgccgtctctttgatgccattcaaagtctatgtatccctgtgattgtcagtgacaccatagagctcccgtttgagggaataatcgattactcagaattctcggtttttgcctctgtaagtgatgcattaacacctaagtggttggctaatcatctcagaaggttctctgaaagagagaaggaaacattgagaagtagaatagcaaaggttcagtcagtttttgtgtatgataatgggcatgccgatgggattggacctattgaaccagatggtgcggtgaatcacatatggaagaaggttcagcagaaggtgccaatggtgaaggaagcagtgattagggagaggagaaaaccagcaggggcttccgttccacttcgatgtcaatgtatctaaataatgcaaccaatccaaaagatagaaagtgttcctttgattttgttggtcttttcttttgtacttgtttcgtttacgaacattgttatggccactttaaaatccatgttccttagggttcaaagaaaaaaaaaaaaaaaaaaaactcgagggggggcccggt

SEQ ID NO: 20408 - protein, 488 aa, Arabidopsis thaliana
  peptide (1)..(488): Ceres Seq. ID no. 13648576
  misc_feature (68)..(425): Pfam Name: Exostosin family Pfam Description: Exostosin family
  misc_feature (113)..(474): Homolog of NCBI NO: 18410670 NR Description: Exostosin family [Arabidopsis thaliana]
  misc_feature (160)..(487): Homolog of NCBI NO: 15241619 NR Description: Exostosin family [Arabidopsis thaliana]
  misc_feature (337)..(462): Homolog of NCBI NO: 7487224 NR Description: hypothetical protein T1F15.13 - Arabidopsis
  misc_feature (115)..(362): Homolog of NCBI NO: 7487224 NR Description: hypothetical protein T1F15.13 - Arabidopsis
  misc_feature (185)..(488): Homolog of NCBI NO: 30686300 NR Description: Exostosin family [Arabidopsis thaliana]
  misc_feature (115)..(474): Homolog of NCBI NO: 19386797 NR Description: OJ1485_B09.5 [Oryza sativa (japonica
  misc_feature (115)..(474): Homolog of NCBI NO: 22330483 NR Description: Exostosin family [Arabidopsis thaliana]
  misc_feature (125)..(488): Homolog of NCBI NO: 34899802 NR Description: OJ1092_A07.9 [Oryza sativa (japonica
  misc_feature (33)..(487): Homolog of NCBI NO: 32488405 NR Description: OSJNBa0043A12.35 [Oryza sativa (japonica
  misc_feature (10)..(488): Homolog of NCBI NO: 18399194 NR Description: Exostosin family [Arabidopsis thaliana]
RDLSSSKSKMVPKIASMASTRPLSSLPYLFLSLSLLFVVSLLFFFSNSLISNPNPSISHNTLQNGINVYVAELPRSLNYGLLDKYWSSSTPDSRIPTDPDHPTRKTHLPKPDTHPPYPENPLIKQYSAEYWIMGDLETSPEKRIGSFAKRVFSESDADVVFVPFFATLSAEMELGNGKGSFRKKSGNEDYQRQRQVLDFLKNTKAWKRSNGRDHVFVLTDPVAMWHVREEIALSILLVVDFGGWFRQDSKSSNGTSLPERIEHTQVSVIKDVIVPYTHLLPRLDLSQNQRRHSLLYFKGAKHRHRGGLIREKLWDLLVNEPGVVMEEGFPNATGKEQSIRGMRNSEFCLHPAGDTPTSCRLFDAIQSLCIPVIVSDTIELPFEGIIDYSEFSVFASVSDALTPKWLANHLRRFSEREKETLRSRIAKVQSVFVYDNGHADGIGPIEPDGAVNHIWKKVQQKVPMVKEAVIRERRKPAGASVPLRCQCI

SEQ ID NO: 20409 - protein, 479 aa, Arabidopsis thaliana
  peptide (1)..(479): Ceres Seq. ID no. 13648577
  misc_feature (59)..(416): Pfam Name: Exostosin family Pfam Description: Exostosin family
  misc_feature (104)..(465): Homolog of NCBI NO: 18410670 NR Description: Exostosin family [Arabidopsis thaliana]
  misc_feature (151)..(478): Homolog of NCBI NO: 15241619 NR Description: Exostosin family [Arabidopsis thaliana]
  misc_feature (328)..(453): Homolog of NCBI NO: 7487224 NR Description: hypothetical protein T1F15.13 - Arabidopsis
  misc_feature (106)..(353): Homolog of NCBI NO: 7487224 NR Description: hypothetical protein T1F15.13 - Arabidopsis
  misc_feature (176)..(479): Homolog of NCBI NO: 30686300 NR Description: Exostosin family [Arabidopsis thaliana]
  misc_feature (106)..(465): Homolog of NCBI NO: 19386797 NR Description: OJ1485_B09.5 [Oryza sativa (japonica
  misc_feature (106)..(465): Homolog of NCBI NO: 22330483 NR Description: Exostosin family [Arabidopsis thaliana]
  misc_feature (116)..(479): Homolog of NCBI NO: 34899802 NR Description: OJ1092_A07.9 [Oryza sativa (japonica
  misc_feature (24)..(478): Homolog of NCBI NO: 32488405 NR Description: OSJNBa0043A12.35 [Oryza sativa (japonica
  misc_feature (1)..(479): Homolog of NCBI NO: 18399194 NR Description: Exostosin family [Arabidopsis thaliana]
MVPKIASMASTRPLSSLPYLFLSLSLLFVVSLLFFFSNSLISNPNPSISHNTLQNGINVYVAELPRSLNYGLLDKYWSSSTPDSRIPTDPDHPTRKTHLPKPDTHPPYPENPLIKQYSAEYWIMGDLETSPEKRIGSFAKRVFSESDADVVFVPFFATLSAEMELGNGKGSFRKKSGNEDYQRQRQVLDFLKNTKAWKRSNGRDHVFVLTDPVAMWHVREEIALSILLVVDFGGWFRQDSKSSNGTSLPERIEHTQVSVIKDVIVPYTHLLPRLDLSQNQRRHSLLYFKGAKHRHRGGLIREKLWDLLVNEPGVVMEEGFPNATGKEQSIRGMRNSEFCLHPAGDTPTSCRLFDAIQSLCIPVIVSDTIELPFEGIIDYSEFSVFASVSDALTPKWLANHLRRFSEREKETLRSRIAKVQSVFVYDNGHADGIGPIEPDGAVNHIWKKVQQKVPMVKEAVIRERRKPAGASVPLRCQCI

SEQ ID NO: 20410 - protein, 472 aa, Arabidopsis thaliana
  peptide (1)..(472): Ceres Seq. ID no. 13648578
  misc_feature (52)..(409): Pfam Name: Exostosin family Pfam Description: Exostosin family
  misc_feature (97)..(458): Homolog of NCBI NO: 18410670 NR Description: Exostosin family [Arabidopsis thaliana]
  misc_feature (144)..(471): Homolog of NCBI NO: 15241619 NR Description: Exostosin family [Arabidopsis thaliana]
  misc_feature (321)..(446): Homolog of NCBI NO: 7487224 NR Description: hypothetical protein T1F15.13 - Arabidopsis
  misc_feature (99)..(346): Homolog of NCBI NO: 7487224 NR Description: hypothetical protein T1F15.13 - Arabidopsis
  misc_feature (169)..(472): Homolog of NCBI NO: 30686300 NR Description: Exostosin family [Arabidopsis thaliana]
  misc_feature (99)..(458): Homolog of NCBI NO: 19386797 NR Description: OJ1485_B09.5 [Oryza sativa (japonica
  misc_feature (99)..(458): Homolog of NCBI NO: 22330483 NR Description: Exostosin family [Arabidopsis thaliana]
  misc_feature (109)..(472): Homolog of NCBI NO: 34899802 NR Description: OJ1092_A07.9 [Oryza sativa (japonica
  misc_feature (17)..(471): Homolog of NCBI NO: 32488405 NR Description: OSJNBa0043A12.35 [Oryza sativa (japonica
  misc_feature (1)..(472): Homolog of NCBI NO: 18399194 NR Description: Exostosin family [Arabidopsis thaliana]
MASTRPLSSLPYLFLSLSLLFVVSLLFFFSNSLISNPNPSISHNTLQNGINVYVAELPRSLNYGLLDKYWSSSTPDSRIPTDPDHPTRKTHLPKPDTHPPYPENPLIKQYSAEYWIMGDLETSPEKRIGSFAKRVFSESDADVVFVPFFATLSAEMELGNGKGSFRKKSGNEDYQRQRQVLDFLKNTKAWKRSNGRDHVFVLTDPVAMWHVREEIALSILLVVDFGGWFRQDSKSSNGTSLPERIEHTQVSVIKDVIVPYTHLLPRLDLSQNQRRHSLLYFKGAKHRHRGGLIREKLWDLLVNEPGVVMEEGFPNATGKEQSIRGMRNSEFCLHPAGDTPTSCRLFDAIQSLCIPVIVSDTIELPFEGIIDYSEFSVFASVSDALTPKWLANHLRRFSEREKETLRSRIAKVQSVFVYDNGHADGIGPIEPDGAVNHIWKKVQQKVPMVKEAVIRERRKPAGASVPLRCQCI

SEQ ID NO: 20411 - DNA, 1196 bp, Arabidopsis thaliana
  misc_feature (1)..(1196): Ceres Seq. ID no. 14307619
  misc_feature: MA Experiment ID: 20000171 Result: Down-regulated in Transcription
  misc_feature: MA Experiment 20000171 PARAMETER Experiment Name: At_42deg_Heat_P Parameter: Age (day) Value: 14
  misc_feature: MA Experiment 20000171 PARAMETER Experiment Name: At_42deg_Heat_P Parameter: Organism Value: A. thaliana
  misc_feature: MA Experiment 20000171 PARAMETER Experiment Name: At_42deg_Heat_P Parameter: Plant Line Value: WS
  misc_feature: MA Experiment 20000171 PARAMETER Experiment Name: At_42deg_Heat_P Parameter: Temperature (deg C) Value: 42 vs. 22
  misc_feature: MA Experiment 20000171 PARAMETER Experiment Name: At_42deg_Heat_P Parameter: Timepoint (hr) Value: 1
  misc_feature: MA Experiment 20000171 PARAMETER Experiment Name: At_42deg_Heat_P Parameter: Tissue Value: Aerial
  misc_feature: MA Experiment ID: 20000173 Result: Down-regulated in Transcription
  misc_feature: MA Experiment 20000173 PARAMETER Experiment Name: At_42deg_Heat_P Parameter: Age (day) Value: 14
  misc_feature: MA Experiment 20000173 PARAMETER Experiment Name: At_42deg_Heat_P Parameter: Organism Value: A. thaliana
  misc_feature: MA Experiment 20000173 PARAMETER Experiment Name: At_42deg_Heat_P Parameter: Plant Line Value: WS
  misc_feature: MA Experiment 20000173 PARAMETER Experiment Name: At_42deg_Heat_P Parameter: Temperature (deg C) Value: 42 vs. 22
  misc_feature: MA Experiment 20000173 PARAMETER Experiment Name: At_42deg_Heat_P Parameter: Timepoint (hr) Value: 6
  misc_feature: MA Experiment 20000173 PARAMETER Experiment Name: At_42deg_Heat_P Parameter: Tissue Value: Aerial
  misc_feature: MA Experiment ID: 20000182 Result: Down-regulated in Transcription
  misc_feature: MA Experiment 20000182 PARAMETER Experiment Name: At_2mM_SA_P Parameter: Age (day) Value: 14
  misc_feature: MA Experiment 20000182 PARAMETER Experiment Name: At_2mM_SA_P Parameter: Organism Value: A. thaliana
  misc_feature: MA Experiment 20000182 PARAMETER Experiment Name: At_2mM_SA_P Parameter: Plant Line Value: WS
  misc_feature: MA Experiment 20000182 PARAMETER Experiment Name: At_2mM_SA_P Parameter: Timepoint (hr) Value: 6
  misc_feature: MA Experiment 20000182 PARAMETER Experiment Name: At_2mM_SA_P Parameter: Tissue Value: Aerial
  misc_feature: MA Experiment 20000182 PARAMETER Experiment Name: At_2mM_SA_P Parameter: Treatment Value: 2mM SA vs. No Treatment
  misc_feature: MA Experiment ID: 20000184 Result: Up-regulated in Transcription
  misc_feature: MA Experiment 20000184 PARAMETER Experiment Name: At_Shoots__P Parameter: Age (day) Value: 7
  misc_feature: MA Experiment 20000184 PARAMETER Experiment Name: At_Shoots__P Parameter: Tissue Value: Shoots vs. Whole Plant
  misc_feature: MA Experiment ID: 20000185 Result: Down-regulated in Transcription
  misc_feature: MA Experiment 20000185 PARAMETER Experiment Name: At_Roots__P Parameter: Age (day) Value: 7 vs. 21
  misc_feature: MA Experiment 20000185 PARAMETER Experiment Name: At_Roots__P Parameter: Organism Value: A. thaliana
  misc_feature: MA Experiment 20000185 PARAMETER Experiment Name: At_Roots__P Parameter: Tissue Value: Roots vs. Whole Plant
  misc_feature: MA Experiment ID: 20000436 Result: Down-regulated in Transcription
  misc_feature: MA Experiment 20000436 PARAMETER Experiment Name: At_Drought_P Parameter: Age (day) Value: 7
  misc_feature: MA Experiment 20000436 PARAMETER Experiment Name: At_Drought_P Parameter: Organism Value: A. thaliana
  misc_feature: MA Experiment 20000436 PARAMETER Experiment Name: At_Drought_P Parameter: Plant Line Value: WS
  misc_feature: MA Experiment 20000436 PARAMETER Experiment Name: At_Drought_P Parameter: Timepoint (hr) Value: 12
  misc_feature: MA Experiment 20000436 PARAMETER Experiment Name: At_Drought_P Parameter: Tissue Value: Whole Plant
  misc_feature: MA Experiment 20000436 PARAMETER Experiment Name: At_Drought_P Parameter: Treatment Value: Drought vs. No Drought
  misc_feature: MA Experiment ID: 20000437 Result: Down-regulated in Transcription
  misc_feature: MA Experiment 20000437 PARAMETER Experiment Name: At_Drought_P Parameter: Age (day) Value: 8
  misc_feature: MA Experiment 20000437 PARAMETER Experiment Name: At_Drought_P Parameter: Organism Value: A. thaliana
  misc_feature: MA Experiment 20000437 PARAMETER Experiment Name: At_Drought_P Parameter: Plant Line Value: WS
  misc_feature: MA Experiment 20000437 PARAMETER Experiment Name: At_Drought_P Parameter: Timepoint (hr) Value: 24
  misc_feature: MA Experiment 20000437 PARAMETER Experiment Name: At_Drought_P Parameter: Tissue Value: Whole Plant
  misc_feature: MA Experiment 20000437 PARAMETER Experiment Name: At_Drought_P Parameter: Treatment Value: Drought vs. No Drought
  misc_feature: MA Experiment ID: 20000439 Result: Down-regulated in Transcription
  misc_feature: MA Experiment 20000439 PARAMETER Experiment Name: At_Roots__P Parameter: Age (day) Value: 14 vs. 21
  misc_feature: MA Experiment 20000439 PARAMETER Experiment Name: At_Roots__P Parameter: Organism Value: A. thaliana
  misc_feature: MA Experiment 20000439 PARAMETER Experiment Name: At_Roots__P Parameter: Tissue Value: Roots vs. Whole Plant
  misc_feature: MA Experiment ID: 20000794 Result: Down-regulated in Transcription
  misc_feature: MA Experiment 20000794 PARAMETER Experiment Name: At_Petals_P Parameter: Age (day) Value: 23-25 days
  misc_feature: MA Experiment 20000794 PARAMETER Experiment Name: At_Petals_P Parameter: Plant Line Value: WS
  misc_feature: MA Experiment 20000794 PARAMETER Experiment Name: At_Petals_P Parameter: Tissue Value: Petals vs. Whole plant
  misc_feature: MA Experiment ID: 20001757 Result: Up-regulated in Transcription
  misc_feature: MA Experiment 20001757 PARAMETER Experiment Name: At_50mM_NH4NO3_L-to-H_P Parameter: Timepoint (hr) Value: 6
  misc_feature: MA Experiment 20001757 PARAMETER Experiment Name: At_50mM_NH4NO3_L-to-H_P Parameter: Tissue Value: Leaf
  misc_feature: MA Experiment 20001757 PARAMETER Experiment Name: At_50mM_NH4NO3_L-to-H_P Parameter: Treatment Value: 50mM NH4NO3 vs 100mM Mannitol
  misc_feature: MA Experiment ID: 20001905 Result: Down-regulated in Transcription
  misc_feature: MA Experiment 20001905 PARAMETER Experiment Name: At_Drought_Reproduction_P Parameter: Age (day) Value: 40
  misc_feature: MA Experiment 20001905 PARAMETER Experiment Name: At_Drought_Reproduction_P Parameter: Organism Value: A. thaliana
  misc_feature: MA Experiment 20001905 PARAMETER Experiment Name: At_Drought_Reproduction_P Parameter: Plant Line Value: WS
  misc_feature: MA Experiment 20001905 PARAMETER Experiment Name: At_Drought_Reproduction_P Parameter: Timepoint (day) Value: 10
  misc_feature: MA Experiment 20001905 PARAMETER Experiment Name: At_Drought_Reproduction_P Parameter: Tissue Value: Rosettes
  misc_feature: MA Experiment 20001905 PARAMETER Experiment Name: At_Drought_Reproduction_P Parameter: Treatment Value: Drought vs. No Drought
  misc_feature: MA Experiment ID: 20001906 Result: Down-regulated in Transcription
  misc_feature: MA Experiment 20001906 PARAMETER Experiment Name: At_Drought_Reproduction_P Parameter: Age (day) Value: 35
  misc_feature: MA Experiment 20001906 PARAMETER Experiment Name: At_Drought_Reproduction_P Parameter: Organism Value: A. thaliana
  misc_feature: MA Experiment 20001906 PARAMETER Experiment Name: At_Drought_Reproduction_P Parameter: Plant Line Value: WS
  misc_feature: MA Experiment 20001906 PARAMETER Experiment Name: At_Drought_Reproduction_P Parameter: Timepoint (day) Value: 5
  misc_feature: MA Experiment 20001906 PARAMETER Experiment Name: At_Drought_Reproduction_P Parameter: Tissue Value: Siliques
  misc_feature: MA Experiment 20001906 PARAMETER Experiment Name: At_Drought_Reproduction_P Parameter: Treatment Value: Drought vs. No Drought
  misc_feature: MA Experiment ID: 20001911 Result: Down-regulated in Transcription
  misc_feature: MA Experiment 20001911 PARAMETER Experiment Name: At_Drought_Reproduction_P Parameter: Age (day) Value: 40
  misc_feature: MA Experiment 20001911 PARAMETER Experiment Name: At_Drought_Reproduction_P Parameter: Organism Value: A. thaliana
  misc_feature: MA Experiment 20001911 PARAMETER Experiment Name: At_Drought_Reproduction_P Parameter: Plant Line Value: WS
  misc_feature: MA Experiment 20001911 PARAMETER Experiment Name: At_Drought_Reproduction_P Parameter: Timepoint (day) Value: 10
  misc_feature: MA Experiment 20001911 PARAMETER Experiment Name: At_Drought_Reproduction_P Parameter: Tissue Value: Flowers
  misc_feature: MA Experiment 20001911 PARAMETER Experiment Name: At_Drought_Reproduction_P Parameter: Treatment Value: Drought vs. No Drought
ggtggataagcttctcactttcagttcaattggatagccggaaaggctctcctccaagtggcgtttatatggaggtgacaaatacgagcagcatcatgtggttcttcagggacaaaggtttcgatgatccgagtatcgacaagatgttgagaaaatgcaaacagttggaaaaggctcaaagcgatgtggcatcagaaaactgggactacctgagtaacattgttggtatccaagagagaaaactcccttacatcgtctcccgatgccccaaaatcctgactttacgcctcgatgagagactcatccccatggtcgagtgcctctccagtcttggaaggaatcctcgtgaagttgcttccgccattaccaaatttcctccaatactctctcatagcgtggaggagaaactctgtccccttcttgctttctttcaagcgttgggtgtgcctgagactcaacttggcaaaatgatactttttaacccaaggcttatcagctacagcatcgacaccaagctgacagtgatcgtcagctttcttgctagcttggccttgatcaagatgggatgattggcaaagttctggtgaagaacccatttcttatggggtacagtgttgataaaaggttacggcctaccactgaattcttgaaatcatccgttggcctgagtgaggatggcattaagtcggtggtcatgaatttcccacaacttttgtgcagagacgttaacaagattctcaaaccaaattatgattatttgaaggagtgtgggtttggagattcccagatagcaaccatggtcactggttatccccaaatcttgattaagagtgttaagaattcactacagcctaggatcagattcctcgtccaggtgatgggaagaggcatggatgaagtggcttcttatcctgaattctttcaccatggattgaagaagaaggtcgaatcgaggtttaaacttgtcaaaaagaacaacattgactgcagccttagagaaatgctggactgtaacacaaagaaattccatgagaagtttggcttttcggaggtaactgcaagctcctagcttttatatctctctctagttttttccttcatcaggctctctctgtaagctgttttcagcttgtgcaccaatttctagcacgagctttaccttgagtgattgtgatatcaatagagtgttttcttcc

SEQ ID NO: 20412 - protein, 188 aa, Arabidopsis thaliana
  peptide (1)..(188): Ceres Seq. ID no. 14307620
  misc_feature (32)..(188): Pfam Name: mTERF Pfam Description: mTERF
  misc_feature (68)..(188): Homolog of NCBI NO: 15236230 NR Description: expressed protein [Arabidopsis thaliana]
  misc_feature (93)..(164): Homolog of NCBI NO: 7487916 NR Description: hypothetical protein YUP8H12R.46 - Arabidopsis
  misc_feature (69)..(179): Homolog of NCBI NO: 15236230 NR Description: expressed protein [Arabidopsis thaliana]
  misc_feature (93)..(164): Homolog of NCBI NO: 30699372 NR Description: expressed protein [Arabidopsis thaliana]
  misc_feature (93)..(164): Homolog of NCBI NO: 33589698 NR Description: At1g78930 [Arabidopsis thaliana]
  misc_feature (72)..(187): Homolog of NCBI NO: 7487916 NR Description: hypothetical protein YUP8H12R.46 - Arabidopsis
  misc_feature (72)..(187): Homolog of NCBI NO: 30699372 NR Description: expressed protein [Arabidopsis thaliana]
  misc_feature (72)..(187): Homolog of NCBI NO: 33589698 NR Description: At1g78930 [Arabidopsis thaliana]
  misc_feature (26)..(188): Homolog of NCBI NO: 34905080 NR Description: P0686C03.23 [Oryza sativa (japonica
  misc_feature (23)..(188): Homolog of NCBI NO: 15233700 NR Description: expressed protein [Arabidopsis thaliana]
WISFSLSVQLDSRKGSPPSGVYMEVTNTSSIMWFFRDKGFDDPSIDKMLRKCKQLEKAQSDVASENWDYLSNIVGIQERKLPYIVSRCPKILTLRLDERLIPMVECLSSLGRNPREVASAITKFPPILSHSVEEKLCPLLAFFQALGVPETQLGKMILFNPRLISYSIDTKLTVIVSFLASLALIKMG

SEQ ID NO: 20413 - protein, 167 aa, Arabidopsis thaliana
  peptide (1)..(167): Ceres Seq. ID no. 14307621
  misc_feature (1)..(156): Pfam Name: mTERF Pfam Description: mTERF
  misc_feature (1)..(155): Homolog of NCBI NO: 28204784 NR Description: hypothetical protein [Arabidopsis thaliana]
  misc_feature (1)..(155): Homolog of NCBI NO: 15227524 NR Description: hypothetical protein [Arabidopsis thaliana]
  misc_feature (1)..(157): Homolog of NCBI NO: 18406426 NR Description: expressed protein [Arabidopsis thaliana]
  misc_feature (1)..(157): Homolog of NCBI NO: 15227089 NR Description: hypothetical protein [Arabidopsis thaliana]
  misc_feature (5)..(163): Homolog of NCBI NO: 15236230 NR Description: expressed protein [Arabidopsis thaliana]
  misc_feature (1)..(167): Homolog of NCBI NO: 7487916 NR Description: hypothetical protein YUP8H12R.46 - Arabidopsis
  misc_feature (1)..(167): Homolog of NCBI NO: 30699372 NR Description: expressed protein [Arabidopsis thaliana]
  misc_feature (1)..(167): Homolog of NCBI NO: 33589698 NR Description: At1g78930 [Arabidopsis thaliana]
  misc_feature (1)..(159): Homolog of NCBI NO: 34905080 NR Description: P0686C03.23 [Oryza sativa (japonica
  misc_feature (1)..(166): Homolog of NCBI NO: 15233700 NR Description: expressed protein [Arabidopsis thaliana]
MIGKVLVKNPFLMGYSVDKRLRPTTEFLKSSVGLSEDGIKSVVMNFPQLLCRDVNKILKPNYDYLKECGFGDSQIATMVTGYPQILIKSVKNSLQPRIRFLVQVMGRGMDEVASYPEFFHHGLKKKVESRFKLVKKNNIDCSLREMLDCNTKKFHEKFGFSEVTASS

SEQ ID NO: 20414 - protein, 166 aa, Arabidopsis thaliana
  peptide (1)..(166): Ceres Seq. ID no. 14307622
  misc_feature (10)..(166): Pfam Name: mTERF Pfam Description: mTERF
  misc_feature (46)..(166): Homolog of NCBI NO: 15236230 NR Description: expressed protein [Arabidopsis thaliana]
  misc_feature (71)..(142): Homolog of NCBI NO: 7487916 NR Description: hypothetical protein YUP8H12R.46 - Arabidopsis
  misc_feature (47)..(157): Homolog of NCBI NO: 15236230 NR Description: expressed protein [Arabidopsis thaliana]
  misc_feature (71)..(142): Homolog of NCBI NO: 30699372 NR Description: expressed protein [Arabidopsis thaliana]
  misc_feature (71)..(142): Homolog of NCBI NO: 33589698 NR Description: At1g78930 [Arabidopsis thaliana]
  misc_feature (50)..(165): Homolog of NCBI NO: 7487916 NR Description: hypothetical protein YUP8H12R.46 - Arabidopsis
  misc_feature (50)..(165): Homolog of NCBI NO: 30699372 NR Description: expressed protein [Arabidopsis thaliana]
  misc_feature (50)..(165): Homolog of NCBI NO: 33589698 NR Description: At1g78930 [Arabidopsis thaliana]
  misc_feature (4)..(166): Homolog of NCBI NO: 34905080 NR Description: P0686C03.23 [Oryza sativa (japonica
  misc_feature (1)..(166): Homolog of NCBI NO: 15233700 NR Description: expressed protein [Arabidopsis thaliana]
MEVTNTSSIMWFFRDKGFDDPSIDKMLRKCKQLEKAQSDVASENWDYLSNIVGIQERKLPYIVSRCPKILTLRLDERLIPMVECLSSLGRNPREVASAITKFPPILSHSVEEKLCPLLAFFQALGVPETQLGKMILFNPRLISYSIDTKLTVIVSFLASLALIKMG

SEQ ID NO: 20415 - DNA, 558 bp, Arabidopsis thaliana
  misc_feature (1)..(558): Ceres Seq. ID no. 13647754
accagagagagagagagagagagagagctcactagtccccccccccccccccccgaattatcctaaattcagatcataaaaaagctaacttttaatttctttctttctgagaaattggttctcatcgttggaatcgaaaaatgggacgaatcggtttagtagtgactgatctggtattgtcgttcatgtggatatgggcaggagttctggtcaacattttagtccatggagttcttggatttagccggaccgatccttccggtgagatcgttcgttatctcttctctatcatctccatgttcatcttcgcctaccttcaacaagccaccaaaggcgggctttataatcctttgaccgctttggctgctggagtctccggtggcttcagcagtttcatcttctccgtcttcgttcgaatccccgtcgaggtttgtttcgttgactttttttggtttaattgaaattgactcttcgttagagagaggtctcagggtttgtgtaatgttgtaaaatgtcaaattagagaaaaaaaaagagaatttagctgatgggttcttc

SEQ ID NO: 20416 - protein, 106 aa, Arabidopsis thaliana
  peptide (1)..(106): Ceres Seq. ID no. 13647755
  misc_feature (10)..(97): Pfam Name: Major intrinsic protein Pfam Description: Major intrinsic protein
  misc_feature (6)..(97): Homolog of NCBI NO: 13447817 NR Description: small basic membrane integral protein ZmSIP2-1
  misc_feature (1)..(97): Homolog of NCBI NO: 15230175 NR Description: expressed protein [Arabidopsis thaliana]
MGRIGLVVTDLVLSFMWIWAGVLVNILVHGVLGFSRTDPSGEIVRYLFSIISMFIFAYLQQATKGGLYNPLTALAAGVSGGFSSFIFSVFVRIPVEVCFVDFFWFN

SEQ ID NO: 20417 - protein, 91 aa, Arabidopsis thaliana
  peptide (1)..(91): Ceres Seq. ID no. 13647756
  misc_feature (1)..(82): Pfam Name: Major intrinsic protein Pfam Description: Major intrinsic protein
  misc_feature (1)..(82): Homolog of NCBI NO: 13447817 NR Description: small basic membrane integral protein ZmSIP2-1
  misc_feature (1)..(82): Homolog of NCBI NO: 15230175 NR Description: expressed protein [Arabidopsis thaliana]
MWIWAGVLVNILVHGVLGFSRTDPSGEIVRYLFSIISMFIFAYLQQATKGGLYNPLTALAAGVSGGFSSFIFSVFVRIPVEVCFVDFFWFN

SEQ ID NO: 20418 - protein, 54 aa, Arabidopsis thaliana
  peptide (1)..(54): Ceres Seq. ID no. 13647757
  misc_feature (1)..(45): Homolog of NCBI NO: 13447817 NR Description: small basic membrane integral protein ZmSIP2-1
  misc_feature (1)..(45): Homolog of NCBI NO: 15230175 NR Description: expressed protein [Arabidopsis thaliana]
MFIFAYLQQATKGGLYNPLTALAAGVSGGFSSFIFSVFVRIPVEVCFVDFFWFN

SEQ ID NO: 20419 - DNA, 1169 bp, Arabidopsis thaliana
  misc_feature (1)..(1169): Ceres Seq. ID no. 13648488
  misc_feature: MA Experiment ID: 20000307 Result: Up-regulated in Transcription
  misc_feature: MA Experiment 20000307 PARAMETER Experiment Name: At_Germinating_Seeds_Sub_P Parameter: Age (hr) Value: 24 vs. 0
  misc_feature: MA Experiment 20000307 PARAMETER Experiment Name: At_Germinating_Seeds_Sub_P Parameter: Organism Value: A. thaliana
  misc_feature: MA Experiment 20000307 PARAMETER Experiment Name: At_Germinating_Seeds_Sub_P Parameter: Plant Line Value: WS
  misc_feature: MA Experiment 20000307 PARAMETER Experiment Name: At_Germinating_Seeds_Sub_P Parameter: Tissue Value: Germinating Seeds
  misc_feature: MA Experiment ID: 20000314 Result: Up-regulated in Transcription
  misc_feature: MA Experiment 20000314 PARAMETER Experiment Name: At_14day_Shoots-Roots_Sub_P Parameter: Age (day) Value: 14
  misc_feature: MA Experiment 20000314 PARAMETER Experiment Name: At_14day_Shoots-Roots_Sub_P Parameter: Organism Value: A. thaliana
  misc_feature: MA Experiment 20000314 PARAMETER Experiment Name: At_14day_Shoots-Roots_Sub_P Parameter: Plant Line Value: WS
  misc_feature: MA Experiment 20000314 PARAMETER Experiment Name: At_14day_Shoots-Roots_Sub_P Parameter: Tissue Value: Roots vs. Whole Plant
  misc_feature: MA Experiment ID: 20000315 Result: Down-regulated in Transcription
  misc_feature: MA Experiment 20000315 PARAMETER Experiment Name: At_14day_Shoots-Roots_Sub_P Parameter: Age (day) Value: 14
  misc_feature: MA Experiment 20000315 PARAMETER Experiment Name: At_14day_Shoots-Roots_Sub_P Parameter: Organism Value: A. thaliana
  misc_feature: MA Experiment 20000315 PARAMETER Experiment Name: At_14day_Shoots-Roots_Sub_P Parameter: Plant Line Value: WS
  misc_feature: MA Experiment 20000315 PARAMETER Experiment Name: At_14day_Shoots-Roots_Sub_P Parameter: Tissue Value: Shoots vs. Whole Plant
acatctctcaccatcttcaccattgtcgaaacatatcgaaaacgctaaaaccgagagagaaaggaaaacatgaggaataaatcccaatcattcatcagctcaaagcttatattcatttgttgctcaatcttggtgttgttcattctcttcttgaaaagagcaagcttctcttccaattcaaccgcaaccattcgagacgaatatcaccagaaatcgaagtgcccatcaaccccacaacaatgcaccaaattgcccacttctctatccgacgcattggttcactatgtcacctcagagatcacaccacaacaaacgtttgatgaagtctcagtctcaaagagagtcttggacaagaagtctccttgtaacttcctcgtctttggcttaggacacgatagcttgatgtgggcatctctcaatcacggtggacgcactttgttcctcgaggaagatgaagcttggattgagacagtaactaagaaattcccaaacttggaatcctaccacgtcgtatacgacacaaaagtgaaagattccaacaagcttatggagctaaagagaacagaggattgcaaagccgtgtctgatcctagagattccaaatgtgctctgtctctcaagggttttccagctgacgtgtacgagacgcaatgggatgtgataatggtcgatgctcccactggttaccacgatgaagctccagggaggatgagcgctatttacactgcgggtttattggctcgtaaccgttatgacggtggggagactgatgttttcgttcacgatattaaccggccggtggaggacgagttctcggtggcgttcttgtgtggagggtacatgaaagagcagcaaggaagacttaggcatttcaacatccctagccaccgggctagcttcggtacaccgttttgtccggcggatatcagtcgccgcttttgatattgtacaatgagagaaaagtgcaaagaacaataacaagaaaacttggcaaaggactttgaagttgcggaaatgagaattcgatattgatctagtttattctatcaaattagtaaaacttcaaatatacttttgccattttatgtttcgtatgatacaattaatcaagaagaaaagagagatatattttaatacatacgttgtgtgtcaatcttatgcctttaagc

SEQ ID NO: 20420 - protein, 290 aa, Arabidopsis thaliana
  peptide (1)..(290): Ceres Seq. ID no. 13648489
  misc_feature (43)..(282): Pfam Name: Protein of unknown function (DUF579) Pfam Description: Protein of unknown function (DUF579)
  misc_feature (22)..(276): Homolog of NCBI NO: 18396558 NR Description: expressed protein [Arabidopsis thaliana]
  misc_feature (22)..(276): Homolog of NCBI NO: 21537399 NR Description: unknown [Arabidopsis thaliana]
  misc_feature (59)..(272): Homolog of NCBI NO: 15220402 NR Description: expressed protein [Arabidopsis thaliana]
  misc_feature (19)..(283): Homolog of NCBI NO: 25354648 NR Description: hypothetical protein F14O23.3 [imported] -
  misc_feature (19)..(283): Homolog of NCBI NO: 18409879 NR Description: expressed protein [Arabidopsis thaliana]
  misc_feature (34)..(283): Homolog of NCBI NO: 25402555 NR Description: hypothetical protein [imported] - Arabidopsis
  misc_feature (127)..(290): Homolog of NCBI NO: 27754730 NR Description: unknown protein [Arabidopsis thaliana]
  misc_feature (20)..(283): Homolog of NCBI NO: 15217566 NR Description: hypothetical protein [Arabidopsis thaliana]
  misc_feature (1)..(289): Homolog of NCBI NO: 18398986 NR Description: expressed protein [Arabidopsis thaliana]
  misc_feature (1)..(290): Homolog of NCBI NO: 15234881 NR Description: expressed protein [Arabidopsis thaliana]
MRNKSQSFISSKLIFICCSILVLFILFLKRASFSSNSTATIRDEYHQKSKCPSTPQQCTKLPTSLSDALVHYVTSEITPQQTFDEVSVSKRVLDKKSPCNFLVFGLGHDSLMWASLNHGGRTLFLEEDEAWIETVTKKFPNLESYHVVYDTKVKDSNKLMELKRTEDCKAVSDPRDSKCALSLKGFPADVYETQWDVIMVDAPTGYHDEAPGRMSAIYTAGLLARNRYDGGETDVFVHDINRPVEDEFSVAFLCGGYMKEQQGRLRHFNIPSHRASFGTPFCPADISRRF

SEQ ID NO: 20421 - protein, 179 aa, Arabidopsis thaliana
  peptide (1)..(179): Ceres Seq. ID no. 13648490
  misc_feature (1)..(171): Pfam Name: Protein of unknown function (DUF579) Pfam Description: Protein of unknown function (DUF579)
  misc_feature (1)..(165): Homolog of NCBI NO: 18396558 NR Description: expressed protein [Arabidopsis thaliana]
  misc_feature (1)..(165): Homolog of NCBI NO: 21537399 NR Description: unknown [Arabidopsis thaliana]
  misc_feature (1)..(161): Homolog of NCBI NO: 15220402 NR Description: expressed protein [Arabidopsis thaliana]
  misc_feature (1)..(172): Homolog of NCBI NO: 25354648 NR Description: hypothetical protein F14O23.3 [imported] -
  misc_feature (1)..(172): Homolog of NCBI NO: 18409879 NR Description: expressed protein [Arabidopsis thaliana]
  misc_feature (1)..(172): Homolog of NCBI NO: 25402555 NR Description: hypothetical protein [imported] - Arabidopsis
  misc_feature (16)..(179): Homolog of NCBI NO: 27754730 NR Description: unknown protein [Arabidopsis thaliana]
  misc_feature (1)..(172): Homolog of NCBI NO: 15217566 NR Description: hypothetical protein [Arabidopsis thaliana]
  misc_feature (1)..(178): Homolog of NCBI NO: 18398986 NR Description: expressed protein [Arabidopsis thaliana]
  misc_feature (1)..(179): Homolog of NCBI NO: 15234881 NR Description: expressed protein [Arabidopsis thaliana]
MWASLNHGGRTLFLEEDEAWIETVTKKFPNLESYHVVYDTKVKDSNKLMELKRTEDCKAVSDPRDSKCALSLKGFPADVYETQWDVIMVDAPTGYHDEAPGRMSAIYTAGLLARNRYDGGETDVFVHDINRPVEDEFSVAFLCGGYMKEQQGRLRHFNIPSHRASFGTPFCPADISRRF

SEQ ID NO: 20422 - DNA, 1732 bp, Arabidopsis thaliana
  misc_feature (1)..(1732): Ceres Seq. ID no. 12605517
  misc_feature: MA Experiment ID: 20000179 Result: Up-regulated in Transcription
  misc_feature: MA Experiment 20000179 PARAMETER Experiment Name: At_Germinating_Seeds_P Parameter: Age (hr) Value: 6 vs. 0
  misc_feature: MA Experiment 20000179 PARAMETER Experiment Name: At_Germinating_Seeds_P Parameter: Tissue Value: Germinating Seeds
  misc_feature: MA Experiment ID: 20000180 Result: Up-regulated in Transcription
  misc_feature: MA Experiment 20000180 PARAMETER Experiment Name: At_Germinating_Seeds_P Parameter: Age (hr) Value: 24 vs. 0
  misc_feature: MA Experiment 20000180 PARAMETER Experiment Name: At_Germinating_Seeds_P Parameter: Tissue Value: Germinating Seeds
  misc_feature: MA Experiment ID: 20000185 Result: Up-regulated in Transcription
  misc_feature: MA Experiment 20000185 PARAMETER Experiment Name: At_Roots__P Parameter: Age (day) Value: 7 vs. 21
  misc_feature: MA Experiment 20000185 PARAMETER Experiment Name: At_Roots__P Parameter: Organism Value: A. thaliana
  misc_feature: MA Experiment 20000185 PARAMETER Experiment Name: At_Roots__P Parameter: Tissue Value: Roots vs. Whole Plant
  misc_feature: MA Experiment ID: 20000438 Result: Down-regulated in Transcription
  misc_feature: MA Experiment 20000438 PARAMETER Experiment Name: At_Shoots__P Parameter: Age (day) Value: 14
  misc_feature: MA Experiment 20000438 PARAMETER Experiment Name: At_Shoots__P Parameter: Tissue Value: Shoots vs. Whole Plant
  misc_feature: MA Experiment ID: 20000439 Result: Up-regulated in Transcription
  misc_feature: MA Experiment 20000439 PARAMETER Experiment Name: At_Roots__P Parameter: Age (day) Value: 14 vs. 21
  misc_feature: MA Experiment 20000439 PARAMETER Experiment Name: At_Roots__P Parameter: Organism Value: A. thaliana
  misc_feature: MA Experiment 20000439 PARAMETER Experiment Name: At_Roots__P Parameter: Tissue Value: Roots vs. Whole Plant
  misc_feature: MA Experiment ID: 20000794 Result: Up-regulated in Transcription
  misc_feature: MA Experiment 20000794 PARAMETER Experiment Name: At_Petals_P Parameter: Age (day) Value: 23-25 days
  misc_feature: MA Experiment 20000794 PARAMETER Experiment Name: At_Petals_P Parameter: Plant Line Value: WS
  misc_feature: MA Experiment 20000794 PARAMETER Experiment Name: At_Petals_P Parameter: Tissue Value: Petals vs. Whole plant
  misc_feature: MA Experiment ID: 20001905 Result: Up-regulated in Transcription
  misc_feature: MA Experiment 20001905 PARAMETER Experiment Name: At_Drought_Reproduction_P Parameter: Age (day) Value: 40
  misc_feature: MA Experiment 20001905 PARAMETER Experiment Name: At_Drought_Reproduction_P Parameter: Organism Value: A. thaliana
  misc_feature: MA Experiment 20001905 PARAMETER Experiment Name: At_Drought_Reproduction_P Parameter: Plant Line Value: WS
  misc_feature: MA Experiment 20001905 PARAMETER Experiment Name: At_Drought_Reproduction_P Parameter: Timepoint (day) Value: 10
  misc_feature: MA Experiment 20001905 PARAMETER Experiment Name: At_Drought_Reproduction_P Parameter: Tissue Value: Rosettes
  misc_feature: MA Experiment 20001905 PARAMETER Experiment Name: At_Drought_Reproduction_P Parameter: Treatment Value: Drought vs. No Drought
gaaaaaagaaaacaatttcactttttttggaatgtgtgtctctcttccatttccatatattatataaacaccaaatgagatctcatttttctaataaataagaagaaagaagagagaaacaatggcttatcgtcaaattttggccatagttttgtttctttgtgtgtttcaattcttggactgcactgttagctccgccgtagaagagaatgggactgtgtttgtgtacggaagagccgccgttggaacaatagatgaagacttcatttgcgccaccttagactggtggccaccggagaaatgtgactacggcagttgtagttgggaccatgcttcaattctcaatctggatttgaacaacgttattcttcaaaatgcaatcaaagcatttgctccgttgaaaataagaataggaggaacattacaagacatagtgatatatgagacaccagattcgaagcaaccatgtcttccttttaccaaaaactcttcaattctttttggttacacacaaggatgtctacctatgcgtcgatgggacgagctcaatgccttctttcgcaaaaccggaactaaagtcatcttcgggctgaatgcactttctggacgttccataaaatctaacggtgaagccataggagcctggaattacaccaatgctgaatcgttcatccggtttacagcagagaacaattacaccatcgacgggtgggagctcggcaatgagctgtgtggaagtggtgttggtgcacgagttggtgcaaatcaatatgctatagacaccataaatctgcgaaacattgtgaaccgggtttacaagaatgtgagtcccatgccgttggtgataggtccgggtggcttctttgaagttgattggttcacagaatacctgaacaaagcagaaaactctctcaatgctactactcgacatatctacgatctcggtccaggagtcgatgaacatctgatagaaaagattctaaacccttcatatctggaccaagaggcaaaaagttttcgcagtctcaagaacataatcaaaaactcctcaacaaaggctgtggcatgggttggtgagtccggtggtgcctacaacagtgggcggaatcttgtctctaatgctttcgtgtatagtttctggtacctggaccagcttggtatggcatcgctttatgatacaaaaacatactgtagacagtctctgatcggaggaaactatgggctgctaaatactactaacttcacaccaaatccagactattacagtgctctgatctggcgacaacttatgggaagaaaggcattgttcacaaccttttccggaaccaaaaagatacgttcgtacacccattgtgcaagacaatcgaaagggatcacagttttactgatgaaccttgacaatactacaacggttgtagcgaaagtagagttaaataacagtttcagtctgagacatacaaagcacatgaagtcttataaaagagcaagttcccaactttttgggggtcctaatggagtaatccaaagagaagagtaccatttgacagcaaaggatggaaacctacacagtcagactatgctactcaacggaaatgctcttcaggttaattcgatgggtgatttacctcctatagagccgatacatataaattcaacagagccaataacaatagctccatattccattgtgtttgtgcatatgcggaatgttgttgtacctgcatgtgcttaa

SEQ ID NO: 20423 - protein, 536 aa, Arabidopsis thaliana
  peptide (1)..(536): Ceres Seq. ID no. 12605518
  misc_feature (28)..(346): Pfam Name: Glycosyl hydrolase family 79, N-terminal domain Pfam Description: Glycosyl hydrolase family 79, N-terminal domain
  misc_feature (29)..(536): Homolog of NCBI NO: 9757846 NR Description: contains similarity to heparanase~gene_id:MFB13.2
  misc_feature (1)..(536): Homolog of NCBI NO: 10176717 NR Description: contains similarity to heparanase~gene_id:MXM12.7
  misc_feature (9)..(536): Homolog of NCBI NO: 22327999 NR Description: glycosyl hydrolase family 79
  misc_feature (9)..(535): Homolog of NCBI NO: 38174813 NR Description: putative heparanase [Hordeum vulgare subsp.
  misc_feature (1)..(92): Homolog of NCBI NO: 24413987 NR Description: contains ESTs
  misc_feature (77)..(536): Homolog of NCBI NO: 24413987 NR Description: contains ESTs
  misc_feature (1)..(381): Homolog of NCBI NO: 30692673 NR Description: expressed protein [Arabidopsis thaliana]
  misc_feature (136)..(536): Homolog of NCBI NO: 30692666 NR Description: expressed protein [Arabidopsis thaliana]
  misc_feature (1)..(536): Homolog of NCBI NO: 10177640 NR Description: contains similarity to heparanase~gene_id:MGG23.2
  misc_feature (1)..(536): Homolog of NCBI NO: 30692670 NR Description: expressed protein [Arabidopsis thaliana]
MAYRQILAIVLFLCVFQFLDCTVSSAVEENGTVFVYGRAAVGTIDEDFICATLDWWPPEKCDYGSCSWDHASILNLDLNNVILQNAIKAFAPLKIRIGGTLQDIVIYETPDSKQPCLPFTKNSSILFGYTQGCLPMRRWDELNAFFRKTGTKVIFGLNALSGRSIKSNGEAIGAWNYTNAESFIRFTAENNYTIDGWELGNELCGSGVGARVGANQYAIDTINLRNIVNRVYKNVSPMPLVIGPGGFFEVDWFTEYLNKAENSLNATTRHIYDLGPGVDEHLIEKILNPSYLDQEAKSFRSLKNIIKNSSTKAVAWVGESGGAYNSGRNLVSNAFVYSFWYLDQLGMASLYDTKTYCRQSLIGGNYGLLNTTNFTPNPDYYSALIWRQLMGRKALFTTFSGTKKIRSYTHCARQSKGITVLLMNLDNTTTVVAKVELNNSFSLRHTKHMKSYKRASSQLFGGPNGVIQREEYHLTAKDGNLHSQTMLLNGNALQVNSMGDLPPIEPIHINSTEPITIAPYSIVFVHMRNVVVPACA

SEQ ID NO: 20424 - protein, 401 aa, Arabidopsis thaliana
  peptide (1)..(401): Ceres Seq. ID no. 12605519
  misc_feature (1)..(211): Pfam Name: Glycosyl hydrolase family 79, N-terminal domain Pfam Description: Glycosyl hydrolase family 79, N-terminal domain
  misc_feature (1)..(401): Homolog of NCBI NO: 15240869 NR Description: glycosyl hydrolase family 79
  misc_feature (1)..(401): Homolog of NCBI NO: 9757846 NR Description: contains similarity to heparanase~gene_id:MFB13.2
  misc_feature (1)..(401): Homolog of NCBI NO: 10176717 NR Description: contains similarity to heparanase~gene_id:MXM12.7
  misc_feature (1)..(401): Homolog of NCBI NO: 22327999 NR Description: glycosyl hydrolase family 79
  misc_feature (1)..(400): Homolog of NCBI NO: 38174813 NR Description: putative heparanase [Hordeum vulgare subsp.
  misc_feature (1)..(401): Homolog of NCBI NO: 24413987 NR Description: contains ESTs
  misc_feature (1)..(246): Homolog of NCBI NO: 30692673 NR Description: expressed protein [Arabidopsis thaliana]
  misc_feature (1)..(401): Homolog of NCBI NO: 30692666 NR Description: expressed protein [Arabidopsis thaliana]
  misc_feature (1)..(401): Homolog of NCBI NO: 10177640 NR Description: contains similarity to heparanase~gene_id:MGG23.2
  misc_feature (1)..(401): Homolog of NCBI NO: 30692670 NR Description: expressed protein [Arabidopsis thaliana]
MRRWDELNAFFRKTGTKVIFGLNALSGRSIKSNGEAIGAWNYTNAESFIRFTAENNYTIDGWELGNELCGSGVGARVGANQYAIDTINLRNIVNRVYKNVSPMPLVIGPGGFFEVDWFTEYLNKAENSLNATTRHIYDLGPGVDEHLIEKILNPSYLDQEAKSFRSLKNIIKNSSTKAVAWVGESGGAYNSGRNLVSNAFVYSFWYLDQLGMASLYDTKTYCRQSLIGGNYGLLNTTNFTPNPDYYSALIWRQLMGRKALFTTFSGTKKIRSYTHCARQSKGITVLLMNLDNTTTVVAKVELNNSFSLRHTKHMKSYKRASSQLFGGPNGVIQREEYHLTAKDGNLHSQTMLLNGNALQVNSMGDLPPIEPIHINSTEPITIAPYSIVFVHMRNVVVPACA

SEQ ID NO: 20425 - protein, 299 aa, Arabidopsis thaliana
  peptide (1)..(299): Ceres Seq. ID no. 12605520
  misc_feature (1)..(109): Pfam Name: Glycosyl hydrolase family 79, N-terminal domain Pfam Description: Glycosyl hydrolase family 79, N-terminal domain
  misc_feature (1)..(299): Homolog of NCBI NO: 15240869 NR Description: glycosyl hydrolase family 79
  misc_feature (1)..(299): Homolog of NCBI NO: 9757846 NR Description: contains similarity to heparanase~gene_id:MFB13.2
  misc_feature (1)..(299): Homolog of NCBI NO: 10176717 NR Description: contains similarity to heparanase~gene_id:MXM12.7
  misc_feature (1)..(299): Homolog of NCBI NO: 22327999 NR Description: glycosyl hydrolase family 79
  misc_feature (1)..(298): Homolog of NCBI NO: 38174813 NR Description: putative heparanase [Hordeum vulgare subsp.
  misc_feature (1)..(299): Homolog of NCBI NO: 24413987 NR Description: contains ESTs
  misc_feature (1)..(144): Homolog of NCBI NO: 30692673 NR Description: expressed protein [Arabidopsis thaliana]
  misc_feature (1)..(299): Homolog of NCBI NO: 30692666 NR Description: expressed protein [Arabidopsis thaliana]
  misc_feature (1)..(299): Homolog of NCBI NO: 10177640 NR Description: contains similarity to heparanase~gene_id:MGG23.2
  misc_feature (1)..(299): Homolog of NCBI NO: 30692670 NR Description: expressed protein [Arabidopsis thaliana]
MPLVIGPGGFFEVDWFTEYLNKAENSLNATTRHIYDLGPGVDEHLIEKILNPSYLDQEAKSFRSLKNIIKNSSTKAVAWVGESGGAYNSGRNLVSNAFVYSFWYLDQLGMASLYDTKTYCRQSLIGGNYGLLNTTNFTPNPDYYSALIWRQLMGRKALFTTFSGTKKIRSYTHCARQSKGITVLLMNLDNTTTVVAKVELNNSFSLRHTKHMKSYKRASSQLFGGPNGVIQREEYHLTAKDGNLHSQTMLLNGNALQVNSMGDLPPIEPIHINSTEPITIAPYSIVFVHMRNVVVPACA

SEQ ID NO: 20426 - DNA, 1092 bp, Arabidopsis thaliana
  misc_feature (1)..(1092): Ceres Seq. ID no. 13647762
cccccggtatatatgagacattagttatagaagagagactaacatgaagatggatttttcatgtttccaagaatacccttttgagtttcattgcagaggaacaacatttaatgggtttagagaaaacaatgcagtgtctgaaacagtagaagagttctgtaataaaagaaggatgcagaagaagagtgatgatttgaagactaagaagaagaagaaacagagtgtttctagggtttgtagtagaggacattggaggatctctgaagatactcagcttatggagcttgtttcggtttacggtcctcaaaactggaaccacattgcagagagtatgcaaggaagaacaggaaagagctgcagattgaggtggtttaaccagttagatccgaggattaacaagagagctttcagtgatgaagaagaagagagactacttgctgctcatagagcttttggtaacaaatgggctatgattgctaagcttttcaatggaagaacagataatgccttgaagaatcattggcatgttctcatggcaaggaagatgagacagcaatcaagttcttacgtccaaagattcaatggttctgctcatgaatctaacacagatcacaaaatcttcaatctttctcctggtaatgtagatgatgatgaagatgtgaatctgaaaaagtgcagctgggaaatgctaaaagagggaactactaacctgaaagctcagtatctccaagaagaatatagttcttcacgcatgccgatgcagggtccacatcatcactactcaaccttccctgcagattccttggcactgacactgcatgtctccatccaggaaccatcatcatcatcgtcattatcactgccatcatcatcaacaactggagaacatacaatggtgaccagatattttgagaccattaaacctccagcatttatagattttctaggagttggtcactaaagctctaacatttagattgggaactaatcaagaagttgcttactcctgtcattattatcaaagtctctgacttttcttttgttagccattaacatgacaagctaaagacatcaagtatcttttcttttctg

SEQ ID NO: 20427 - protein, 305 aa, Arabidopsis thaliana
  peptide (1)..(305): Ceres Seq. ID no. 13647763
  misc_feature (67)..(113): Pfam Name: Myb-like DNA-binding domain Pfam Description: Myb-like DNA-binding domain
  misc_feature (64)..(191): Homolog of NCBI NO: 31980093 NR Description: MYB transcription factor R2R3 type
  misc_feature (56)..(184): Homolog of NCBI NO: 6979341 NR Description: myb-like protein [Oryza sativa]
  misc_feature (62)..(215): Homolog of NCBI NO: 9759057 NR Description: Myb-like transcription factor-like protein
  misc_feature (30)..(215): Homolog of NCBI NO: 15238028 NR Description: myb family transcription factor (MYB56)
  misc_feature (63)..(186): Homolog of NCBI NO: 34903242 NR Description: unnamed protein product [Oryza sativa (japonica
  misc_feature (38)..(178): Homolog of NCBI NO: 25403271 NR Description: protein T24P13.16 [imported] - Arabidopsis
  misc_feature (38)..(178): Homolog of NCBI NO: 18396049 NR Description: myb family transcription factor [Arabidopsis
  misc_feature (44)..(178): Homolog of NCBI NO: 15222362 NR Description: myb family transcription factor(MYB105)
  misc_feature (3)..(198): Homolog of NCBI NO: 18406019 NR Description: myb family transcription factor(MYB110)
  misc_feature (19)..(305): Homolog of NCBI NO: 7939552 NR Description: MYB transcription factor-like protein
MKMDFSCFQEYPFEFHCRGTTFNGFRENNAVSETVEEFCNKRRMQKKSDDLKTKKKKKQSVSRVCSRGHWRISEDTQLMELVSVYGPQNWNHIAESMQGRTGKSCRLRWFNQLDPRINKRAFSDEEEERLLAAHRAFGNKWAMIAKLFNGRTDNALKNHWHVLMARKMRQQSSSYVQRFNGSAHESNTDHKIFNLSPGNVDDDEDVNLKKCSWEMLKEGTTNLKAQYLQEEYSSSRMPMQGPHHHYSTFPADSLALTLHVSIQEPSSSSSLSLPSSSTTGEHTMVTRYFETIKPPAFIDFLGVGH

SEQ ID NO: 20428 - protein, 303 aa, Arabidopsis thaliana
  peptide (1)..(303): Ceres Seq. ID no. 13647764
  misc_feature (65)..(111): Pfam Name: Myb-like DNA-binding domain Pfam Description: Myb-like DNA-binding domain
  misc_feature (62)..(189): Homolog of NCBI NO: 31980093 NR Description: MYB transcription factor R2R3 type
  misc_feature (54)..(182): Homolog of NCBI NO: 6979341 NR Description: myb-like protein [Oryza sativa]
  misc_feature (60)..(213): Homolog of NCBI NO: 9759057 NR Description: Myb-like transcription factor-like protein
  misc_feature (28)..(213): Homolog of NCBI NO: 15238028 NR Description: myb family transcription factor (MYB56)
  misc_feature (61)..(184): Homolog of NCBI NO: 34903242 NR Description: unnamed protein product [Oryza sativa (japonica
  misc_feature (36)..(176): Homolog of NCBI NO: 25403271 NR Description: protein T24P13.16 [imported] - Arabidopsis
  misc_feature (36)..(176): Homolog of NCBI NO: 18396049 NR Description: myb family transcription factor [Arabidopsis
  misc_feature (42)..(176): Homolog of NCBI NO: 15222362 NR Description: myb family transcription factor(MYB105)
  misc_feature (1)..(196): Homolog of NCBI NO: 18406019 NR Description: myb family transcription factor(MYB110)
  misc_feature (17)..(303): Homolog of NCBI NO: 7939552 NR Description: MYB transcription factor-like protein
MDFSCFQEYPFEFHCRGTTFNGFRENNAVSETVEEFCNKRRMQKKSDDLKTKKKKKQSVSRVCSRGHWRISEDTQLMELVSVYGPQNWNHIAESMQGRTGKSCRLRWFNQLDPRINKRAFSDEEEERLLAAHRAFGNKWAMIAKLFNGRTDNALKNHWHVLMARKMRQQSSSYVQRFNGSAHESNTDHKIFNLSPGNVDDDEDVNLKKCSWEMLKEGTTNLKAQYLQEEYSSSRMPMQGPHHHYSTFPADSLALTLHVSIQEPSSSSSLSLPSSSTTGEHTMVTRYFETIKPPAFIDFLGVGH

SEQ ID NO: 20429 - protein, 262 aa, Arabidopsis thaliana
  peptide (1)..(262): Ceres Seq. ID no. 13647765
  misc_feature (24)..(70): Pfam Name: Myb-like DNA-binding domain Pfam Description: Myb-like DNA-binding domain
  misc_feature (21)..(148): Homolog of NCBI NO: 31980093 NR Description: MYB transcription factor R2R3 type
  misc_feature (13)..(141): Homolog of NCBI NO: 6979341 NR Description: myb-like protein [Oryza sativa]
  misc_feature (19)..(172): Homolog of NCBI NO: 9759057 NR Description: Myb-like transcription factor-like protein
  misc_feature (1)..(172): Homolog of NCBI NO: 15238028 NR Description: myb family transcription factor (MYB56)
  misc_feature (20)..(143): Homolog of NCBI NO: 34903242 NR Description: unnamed protein product [Oryza sativa (japonica
  misc_feature (1)..(135): Homolog of NCBI NO: 25403271 NR Description: protein T24P13.16 [imported] - Arabidopsis
  misc_feature (1)..(135): Homolog of NCBI NO: 18396049 NR Description: myb family transcription factor [Arabidopsis
  misc_feature (1)..(135): Homolog of NCBI NO: 15222362 NR Description: myb family transcription factor(MYB105)
  misc_feature (1)..(155): Homolog of NCBI NO: 18406019 NR Description: myb family transcription factor(MYB110)
  misc_feature (1)..(262): Homolog of NCBI NO: 7939552 NR Description: MYB transcription factor-like protein
MQKKSDDLKTKKKKKQSVSRVCSRGHWRISEDTQLMELVSVYGPQNWNHIAESMQGRTGKSCRLRWFNQLDPRINKRAFSDEEEERLLAAHRAFGNKWAMIAKLFNGRTDNALKNHWHVLMARKMRQQSSSYVQRFNGSAHESNTDHKIFNLSPGNVDDDEDVNLKKCSWEMLKEGTTNLKAQYLQEEYSSSRMPMQGPHHHYSTFPADSLALTLHVSIQEPSSSSSLSLPSSSTTGEHTMVTRYFETIKPPAFIDFLGVGH

SEQ ID NO: 20430 - DNA, 1552 bp, Arabidopsis thaliana
  misc_feature (1)..(1552): Ceres Seq. ID no. 13647847
acaaatcttttgatctgactttcgtctctccaaatctctctcgtctcgtttcttcagaggctatggggatctccttaagcaagcgtcgacgagacaacaacaaccaccaccaccatccacaccacaatccgccgtactattactccgatcctccaccacaacagccgccgcctcaaaacgagtatagctactctcacaattaccccgtttcaactccacagctctctcttcctccaccaccggctcagccaccgtctttttctcagcctcctccgtcgcagattagttacctaccgtacggtcaaaactaccatcaaaaccaatactacccgcaacaagctcctccgtatttcaccggttatcatcacaatgggtttaatccgatgatgaggccggtttatttcggtcctcctccggttgctgttatggaaccgcctgcaccttatgtggagcatcagaccgctaagaaggttaagaacgatgtcaatgtgaataaagctacggtgaggctcgtagctgacgatcttaaccctggtcattatcttgtttccttcgtcttcgatgccttattcgatggcagtttcactatcatattttttggagaagaggaatcaaagtgcataatcgtccctcatttaccagaagctttcccaccaatcaaagtccctttccaaaaaggtgccgggcagaagtttctacaagctccagggacaggaatcgacctaggcttcttttcactggatgatttatcgaaaccatcaccagaagaggtgtacccacttgtaatatcagccgagacagtaatatcaccaagctcggtttcagaggaaccattagttcataagcagatcactcaagcggttttggagaagacgaatgatggatctttcaaagtgaaagtcatgaaacagatcctatggattgaaggagaacgatatgaactacaagagttgtatggaatcgataattcaacaacacaaggtactgctgcatcggggttagaggatactgatggcaaagaatgtgtcatttgcttgactgaacctaaggacacagccgtcatgccttgtagacatttgtgtttgtgcagtgattgcgcagaagaactgaggtttcagacaaacaaatgtcccatttgtagacaacctatccatgagcttgtaaagattaaagtggaaagtagtgatgaacaacactgaaaaagaggtttcttcccttcacttaaacaccatgtttgattctttcttcttcttctttttgaaaaccgtcaaatcgaattctttttcccttttttcttatacaaatgtgttttctcatgtcatactcttgcacatatttgttggtcttagttttgggaaactcaaagaaaaaaaagtcagtaatgtatatatagctccaatggttcttgagaaactttctcttcgtatctttctacttgaaacactcattctgtaactgaatactttttggtttgggcattgctcaaatataacttgcaatcatatgttgtttatcgtaaaaaaaaaaaaaaaaactcgagggggggcccggt

SEQ ID NO: 20431 - protein, 398 aa, Arabidopsis thaliana
  peptide (1)..(398): Ceres Seq. ID no. 13647848
  misc_feature (341)..(379): Pfam Name: Zinc finger, C3HC4 type (RING finger) Pfam Description: Zinc finger, C3HC4 type (RING finger)
  misc_feature (27)..(397): Homolog of NCBI NO: 37532246 NR Description: putative hydroxyproline-rich glycoprotein
  misc_feature (21)..(398): Homolog of NCBI NO: 18397483 NR Description: RING zinc finger protein -related [Arabidopsis
  misc_feature (15)..(398): Homolog of NCBI NO: 6862918 NR Description: putative RING zinc finger protein [Arabidopsis
  misc_feature (66)..(389): Homolog of NCBI NO: 15242675 NR Description: expressed protein [Arabidopsis thaliana]
  misc_feature (138)..(395): Homolog of NCBI NO: 15231808 NR Description: expressed protein [Arabidopsis thaliana]
  misc_feature (28)..(395): Homolog of NCBI NO: 18398633 NR Description: putative RING zinc finger protein [Arabidopsis
  misc_feature (66)..(389): Homolog of NCBI NO: 21618140 NR Description: putative RING zinc finger protein [Arabidopsis
  misc_feature (66)..(389): Homolog of NCBI NO: 26449588 NR Description: unknown protein [Arabidopsis thaliana]
  misc_feature (21)..(398): Homolog of NCBI NO: 21928149 NR Description: AT5g19080/T16G12_120 [Arabidopsis thaliana]
  misc_feature (21)..(398): Homolog of NCBI NO: 15239642 NR Description: expressed protein [Arabidopsis thaliana]
KSFDLTFVSPNLSRLVSSEAMGISLSKRRRDNNNHHHHPHHNPPYYYSDPPPQQPPPQNEYSYSHNYPVSTPQLSLPPPPAQPPSFSQPPPSQISYLPYGQNYHQNQYYPQQAPPYFTGYHHNGFNPMMRPVYFGPPPVAVMEPPAPYVEHQTAKKVKNDVNVNKATVRLVADDLNPGHYLVSFVFDALFDGSFTIIFFGEEESKCIIVPHLPEAFPPIKVPFQKGAGQKFLQAPGTGIDLGFFSLDDLSKPSPEEVYPLVISAETVISPSSVSEEPLVHKQITQAVLEKTNDGSFKVKVMKQILWIEGERYELQELYGIDNSTTQGTAASGLEDTDGKECVICLTEPKDTAVMPCRHLCLCSDCAEELRFQTNKCPICRQPIHELVKIKVESSDEQH

SEQ ID NO: 20432 - protein, 378 aa, Arabidopsis thaliana
  peptide (1)..(378): Ceres Seq. ID no. 13647849
  misc_feature (321)..(359): Pfam Name: Zinc finger, C3HC4 type (RING finger) Pfam Description: Zinc finger, C3HC4 type (RING finger)
  misc_feature (46)..(369): Homolog of NCBI NO: 26449588 NR Description: unknown protein [Arabidopsis thaliana]
  misc_feature (46)..(369): Homolog of NCBI NO: 15242675 NR Description: expressed protein [Arabidopsis thaliana]
  misc_feature (46)..(369): Homolog of NCBI NO: 21618140 NR Description: putative RING zinc finger protein [Arabidopsis
  misc_feature (118)..(375): Homolog of NCBI NO: 15231808 NR Description: expressed protein [Arabidopsis thaliana]
  misc_feature (8)..(375): Homolog of NCBI NO: 18398633 NR Description: putative RING zinc finger protein [Arabidopsis
  misc_feature (7)..(377): Homolog of NCBI NO: 37532246 NR Description: putative hydroxyproline-rich glycoprotein
  misc_feature (1)..(378): Homolog of NCBI NO: 18397483 NR Description: RING zinc finger protein -related [Arabidopsis
  misc_feature (1)..(378): Homolog of NCBI NO: 6862918 NR Description: putative RING zinc finger protein [Arabidopsis
  misc_feature (1)..(378): Homolog of NCBI NO: 21928149 NR Description: AT5g19080/T16G12_120 [Arabidopsis thaliana]
  misc_feature (1)..(378): Homolog of NCBI NO: 15239642 NR Description: expressed protein [Arabidopsis thaliana]
MGISLSKRRRDNNNHHHHPHHNPPYYYSDPPPQQPPPQNEYSYSHNYPVSTPQLSLPPPPAQPPSFSQPPPSQISYLPYGQNYHQNQYYPQQAPPYFTGYHHNGFNPMMRPVYFGPPPVAVMEPPAPYVEHQTAKKVKNDVNVNKATVRLVADDLNPGHYLVSFVFDALFDGSFTIIFFGEEESKCIIVPHLPEAFPPIKVPFQKGAGQKFLQAPGTGIDLGFFSLDDLSKPSPEEVYPLVISAETVISPSSVSEEPLVHKQITQAVLEKTNDGSFKVKVMKQILWIEGERYELQELYGIDNSTTQGTAASGLEDTDGKECVICLTEPKDTAVMPCRHLCLCSDCAEELRFQTNKCPICRQPIHELVKIKVESSDEQH

SEQ ID NO: 20433 - protein, 271 aa, Arabidopsis thaliana
  peptide (1)..(271): Ceres Seq. ID no. 13647850
  misc_feature (214)..(252): Pfam Name: Zinc finger, C3HC4 type (RING finger) Pfam Description: Zinc finger, C3HC4 type (RING finger)
  misc_feature (1)..(262): Homolog of NCBI NO: 26449588 NR Description: unknown protein [Arabidopsis thaliana]
  misc_feature (1)..(262): Homolog of NCBI NO: 15242675 NR Description: expressed protein [Arabidopsis thaliana]
  misc_feature (1)..(262): Homolog of NCBI NO: 21618140 NR Description: putative RING zinc finger protein [Arabidopsis
  misc_feature (11)..(268): Homolog of NCBI NO: 15231808 NR Description: expressed protein [Arabidopsis thaliana]
  misc_feature (1)..(268): Homolog of NCBI NO: 18398633 NR Description: putative RING zinc finger protein [Arabidopsis
  misc_feature (1)..(270): Homolog of NCBI NO: 37532246 NR Description: putative hydroxyproline-rich glycoprotein
  misc_feature (1)..(271): Homolog of NCBI NO: 18397483 NR Description: RING zinc finger protein -related [Arabidopsis
  misc_feature (1)..(271): Homolog of NCBI NO: 6862918 NR Description: putative RING zinc finger protein [Arabidopsis
  misc_feature (1)..(271): Homolog of NCBI NO: 21928149 NR Description: AT5g19080/T16G12_120 [Arabidopsis thaliana]
  misc_feature (1)..(271): Homolog of NCBI NO: 15239642 NR Description: expressed protein [Arabidopsis thaliana]
MMRPVYFGPPPVAVMEPPAPYVEHQTAKKVKNDVNVNKATVRLVADDLNPGHYLVSFVFDALFDGSFTIIFFGEEESKCIIVPHLPEAFPPIKVPFQKGAGQKFLQAPGTGIDLGFFSLDDLSKPSPEEVYPLVISAETVISPSSVSEEPLVHKQITQAVLEKTNDGSFKVKVMKQILWIEGERYELQELYGIDNSTTQGTAASGLEDTDGKECVICLTEPKDTAVMPCRHLCLCSDCAEELRFQTNKCPICRQPIHELVKIKVESSDEQH

SEQ ID NO: 20434 - DNA, 1110 bp, Arabidopsis thaliana
  misc_feature (1)..(1110): Ceres Seq. ID no. 14311243
ggaaacctcctcccgcagtcacacaactgcgcagagccaaaaataaacgaaacctccggcgaaagctacggcgaagagactgcgtctaactccgtttacacgccgattgtcttggagagagagagagagcacgaggtaaatcacgcaagggttagatgggaaaccagaaactaaagttgacggcggaggaagaggaggcgttactcgccggaatcagaaagcacggtcctggaaagtggaagaatattctccgggatccagaattcgctgatcagctcatccatcgctccaacattgacctaaaggataagtggcgtaacttgagtgttccccctggtactcaaagtttaactaataaggcacggccagcaaaagtcaaagaggaaggcgacactccggctgcagatgcaaatgatgctgtcactattccacggcctattcctactattccacctcctcccggtcggcgtactttaccttctgagttgatccctgatgaaaatacaaagaatgctcctaggtatgactgggtgatatttgaagctctctctgctttagccgatggtaatggatctgatgtcagttccatttatcatttcattgagcccaggcatgaagtaccgccaaattttagaagaatccttagtacaagactgaggaggcttgcagctcagagcaaacttgaaaaggttagcaccttcaaatctatacagaacttctataagatacccgatccatcaggaacaaaaataggtgtcccaaaaccaaaggagacacatacgaagctgcgccaagcaaacaatcagacctctgctgattcacaacagatgatcgaggaagctgcaataaccgcagcctgtaaagtcgtagaggcggagaataaaatagacgttgccaaactagcagcagaagagtttgagaagatgacaaagattgcagaagaaaatagaaaactcctggtcatagctactgagatgcatgaactatgttcctgtggggagactatgctcttggcttgaattgaatctatgggacattccttgtagctctcttcagttatctccgtaatggtgttgataataatatataaaaagaaaactaaattaattt

SEQ ID NO: 20435 - protein, 287 aa, Arabidopsis thaliana
  peptide (1)..(287): Ceres Seq. ID no. 14311244
  misc_feature (119)..(193): Pfam Name: linker histone H1 and H5 family Pfam Description: linker histone H1 and H5 family
  misc_feature (1)..(286): Homolog of NCBI NO: 34105717 NR Description: Single myb histone 3 [Zea mays subsp. mays]
  misc_feature (1)..(286): Homolog of NCBI NO: 18463961 NR Description: histone H1-like protein [Zea mays]
  misc_feature (1)..(286): Homolog of NCBI NO: 34105721 NR Description: Single myb histone 4 [Zea mays subsp. mays]
  misc_feature (1)..(286): Homolog of NCBI NO: 27125811 NR Description: MYB28 protein [Oryza sativa (japonica
  misc_feature (1)..(286): Homolog of NCBI NO: 34910440 NR Description: histone H1-like protein [Oryza sativa (japonica
  misc_feature (1)..(228): Homolog of NCBI NO: 8778473 NR Description: F1L3.23 [Arabidopsis thaliana]
  misc_feature (1)..(150): Homolog of NCBI NO: 13937143 NR Description: At1g72740/F28P22_7 [Arabidopsis thaliana]
  misc_feature (1)..(286): Homolog of NCBI NO: 30685367 NR Description: myb-related DNA-binding protein -related
  misc_feature (1)..(286): Homolog of NCBI NO: 26452093 NR Description: putative myb-related DNA-binding protein
  misc_feature (1)..(278): Homolog of NCBI NO: 15218592 NR Description: DNA-binding protein -related [Arabidopsis
MGNQKLKLTAEEEEALLAGIRKHGPGKWKNILRDPEFADQLIHRSNIDLKDKWRNLSVPPGTQSLTNKARPAKVKEEGDTPAADANDAVTIPRPIPTIPPPPGRRTLPSELIPDENTKNAPRYDWVIFEALSALADGNGSDVSSIYHFIEPRHEVPPNFRRILSTRLRRLAAQSKLEKVSTFKSIQNFYKIPDPSGTKIGVPKPKETHTKLRQANNQTSADSQQMIEEAAITAACKVVEAENKIDVAKLAAEEFEKMTKIAEENRKLLVIATEMHELCSCGETMLLA

SEQ ID NO: 20436 - DNA, 712 bp, Arabidopsis thaliana
  misc_feature (1)..(712): Ceres Seq. ID no. 13648568
  misc_feature: MA Experiment ID: 20000173 Result: Down-regulated in Transcription
  misc_feature: MA Experiment 20000173 PARAMETER Experiment Name: At_42deg_Heat_P Parameter: Age (day) Value: 14
  misc_feature: MA Experiment 20000173 PARAMETER Experiment Name: At_42deg_Heat_P Parameter: Organism Value: A. thaliana
  misc_feature: MA Experiment 20000173 PARAMETER Experiment Name: At_42deg_Heat_P Parameter: Plant Line Value: WS
  misc_feature: MA Experiment 20000173 PARAMETER Experiment Name: At_42deg_Heat_P Parameter: Temperature (deg C) Value: 42 vs. 22
  misc_feature: MA Experiment 20000173 PARAMETER Experiment Name: At_42deg_Heat_P Parameter: Timepoint (hr) Value: 6
  misc_feature: MA Experiment 20000173 PARAMETER Experiment Name: At_42deg_Heat_P Parameter: Tissue Value: Aerial
  misc_feature: MA Experiment ID: 20000180 Result: Down-regulated in Transcription
  misc_feature: MA Experiment 20000180 PARAMETER Experiment Name: At_Germinating_Seeds_P Parameter: Age (hr) Value: 24 vs. 0
  misc_feature: MA Experiment 20000180 PARAMETER Experiment Name: At_Germinating_Seeds_P Parameter: Tissue Value: Germinating Seeds
  misc_feature: MA Experiment ID: 20000184 Result: Down-regulated in Transcription
  misc_feature: MA Experiment 20000184 PARAMETER Experiment Name: At_Shoots__P Parameter: Age (day) Value: 7
  misc_feature: MA Experiment 20000184 PARAMETER Experiment Name: At_Shoots__P Parameter: Tissue Value: Shoots vs. Whole Plant
  misc_feature: MA Experiment ID: 20000234 Result: Down-regulated in Transcription
  misc_feature: MA Experiment 20000234 PARAMETER Experiment Name: At_Siliques_P Parameter: Age (day) Value: 21
  misc_feature: MA Experiment 20000234 PARAMETER Experiment Name: At_Siliques_P Parameter: Organism Value: A. thaliana
  misc_feature: MA Experiment 20000234 PARAMETER Experiment Name: At_Siliques_P Parameter: Plant Line Value: WS
  misc_feature: MA Experiment 20000234 PARAMETER Experiment Name: At_Siliques_P Parameter: Tissue Value: Less Than 5mm Siliques vs. Whole Plant
  misc_feature: MA Experiment ID: 20000235 Result: Down-regulated in Transcription
  misc_feature: MA Experiment 20000235 PARAMETER Experiment Name: At_Siliques_P Parameter: Age (day) Value: 21
  misc_feature: MA Experiment 20000235 PARAMETER Experiment Name: At_Siliques_P Parameter: Organism Value: A. thaliana
  misc_feature: MA Experiment 20000235 PARAMETER Experiment Name: At_Siliques_P Parameter: Plant Line Value: WS
  misc_feature: MA Experiment 20000235 PARAMETER Experiment Name: At_Siliques_P Parameter: Tissue Value: 5-10mm Siliques vs. Whole Plant
  misc_feature: MA Experiment ID: 20000264 Result: Down-regulated in Transcription
  misc_feature: MA Experiment 20000264 PARAMETER Experiment Name: At_Open_Flower_P Parameter: Age (day) Value: 21
  misc_feature: MA Experiment 20000264 PARAMETER Experiment Name: At_Open_Flower_P Parameter: Plant Line Value: WS
  misc_feature: MA Experiment 20000264 PARAMETER Experiment Name: At_Open_Flower_P Parameter: Tissue Value: Open Flower vs. Whole Plant
  misc_feature: MA Experiment ID: 20000265 Result: Down-regulated in Transcription
  misc_feature: MA Experiment 20000265 PARAMETER Experiment Name: At_Open_Flower_P Parameter: Age (day) Value: 21
  misc_feature: MA Experiment 20000265 PARAMETER Experiment Name: At_Open_Flower_P Parameter: Plant Line Value: WS
  misc_feature: MA Experiment 20000265 PARAMETER Experiment Name: At_Open_Flower_P Parameter: Tissue Value: Closed Flower vs. Whole Plant
  misc_feature: MA Experiment ID: 20000286 Result: Down-regulated in Transcription
  misc_feature: MA Experiment 20000286 PARAMETER Experiment Name: At_Open_Flower_P Parameter: Age (day) Value: 21
  misc_feature: MA Experiment 20000286 PARAMETER Experiment Name: At_Open_Flower_P Parameter: Plant Line Value: WS
  misc_feature: MA Experiment 20000286 PARAMETER Experiment Name: At_Open_Flower_P Parameter: Tissue Value: Half Open vs. Whole Plant
  misc_feature: MA Experiment ID: 20000438 Result: Down-regulated in Transcription
  misc_feature: MA Experiment 20000438 PARAMETER Experiment Name: At_Shoots__P Parameter: Age (day) Value: 14
  misc_feature: MA Experiment 20000438 PARAMETER Experiment Name: At_Shoots__P Parameter: Tissue Value: Shoots vs. Whole Plant
  misc_feature: MA Experiment ID: 20000451 Result: Up-regulated in Transcription
  misc_feature: MA Experiment 20000451 PARAMETER Experiment Name: At_CS6879_Shoots-Roots_P Parameter: Age (day) Value: 14
  misc_feature: MA Experiment 20000451 PARAMETER Experiment Name: At_CS6879_Shoots-Roots_P Parameter: Organism Value: A. thaliana
  misc_feature: MA Experiment 20000451 PARAMETER Experiment Name: At_CS6879_Shoots-Roots_P Parameter: Plant Line Value: CS6879 vs. WS
  misc_feature: MA Experiment 20000451 PARAMETER Experiment Name: At_CS6879_Shoots-Roots_P Parameter: Tissue Value: Roots
  misc_feature: MA Experiment ID: 20001248 Result: Up-regulated in Transcription
  misc_feature: MA Experiment 20001248 PARAMETER Experiment Name: At_Far-red-induction_P Parameter: Age (day) Value: 7
  misc_feature: MA Experiment 20001248 PARAMETER Experiment Name: At_Far-red-induction_P Parameter: Light Value: Far-red vs. White
  misc_feature: MA Experiment 20001248 PARAMETER Experiment Name: At_Far-red-induction_P Parameter: Organism Value: A. thaliana
  misc_feature: MA Experiment 20001248 PARAMETER Experiment Name: At_Far-red-induction_P Parameter: Plant Line Value: Columbia
  misc_feature: MA Experiment 20001248 PARAMETER Experiment Name: At_Far-red-induction_P Parameter: Timepoint (hr) Value: 4
  misc_feature: MA Experiment 20001248 PARAMETER Experiment Name: At_Far-red-induction_P Parameter: Tissue Value: Whole Plant
  misc_feature: MA Experiment ID: 20001451 Result: Up-regulated in Transcription
  misc_feature: MA Experiment 20001451 PARAMETER Experiment Name: At_Far-red-induction_P Parameter: Age (day) Value: 7
  misc_feature: MA Experiment 20001451 PARAMETER Experiment Name: At_Far-red-induction_P Parameter: Light Value: Far-red vs. White
  misc_feature: MA Experiment 20001451 PARAMETER Experiment Name: At_Far-red-induction_P Parameter: Organism Value: A. thaliana
  misc_feature: MA Experiment 20001451 PARAMETER Experiment Name: At_Far-red-induction_P Parameter: Plant Line Value: Columbia
  misc_feature: MA Experiment 20001451 PARAMETER Experiment Name: At_Far-red-induction_P Parameter: Timepoint (hr) Value: 24
  misc_feature: MA Experiment 20001451 PARAMETER Experiment Name: At_Far-red-induction_P Parameter: Tissue Value: Whole Plant
gatagacccctcacctacgctttactctttcactcctctctctcctgctttgctccgccgtgagaggagaaacaaatggggaattgtcaagcggcggaggcggcaacgacggtgatacaacaaccagacggtaaatcggttagattttactgtacagtaaacgcgagcgaagtgattaagtcccatcccggtcaccacgtggctctcctcctctcttccgccgtacctcacggtggctctctccgcgtcactcgtataaagcttcttcgtccttctgataacctcttgctcggtcatgtttatagactcatctcctccgaagaggtgatgaaaggaataagagccaagaaatctggaaagatgaagaagattcatggagagttttctgttgcagaagaagagattaacccactaaccctaagatctgatgcttctgacaaagacactcagagaaggatatatgaaaagcagagaggaatgatgaacacaggrggrgytwccaagaaagttagagtttggcagccttytyttcaaagcatytcagaatytmcaagttaaaacccttcaatccatatttttctatctttttttcttactttggatttttttttattaccattggatttctctttatattgtggtttttcccaatcaaatttgtaaaggaagaagacccatttgtttgtggttgaagaagaagaaacttttgtcc

SEQ ID NO: 20437 - protein, 160 aa, Arabidopsis thaliana
  peptide (1)..(160): Ceres Seq. ID no. 15219562
  misc_feature (19)..(98): Homolog of NCBI NO: 37533268 NR Description: hypothetical protein [Oryza sativa (japonica
  misc_feature (1)..(99): Homolog of NCBI NO: 15240787 NR Description: expressed protein [Arabidopsis thaliana]
  misc_feature (1)..(160): Homolog of NCBI NO: 25402604 NR Description: protein T10O24.15 [imported] - Arabidopsis
  misc_feature (1)..(160): Homolog of NCBI NO: 15218556 NR Description: expressed protein [Arabidopsis thaliana]
  misc_feature (1)..(54): Homolog of NCBI NO: 34904920 NR Description: OSJNBa0077M12.2 [Oryza sativa (japonica
  misc_feature (53)..(160): Homolog of NCBI NO: 34904920 NR Description: OSJNBa0077M12.2 [Oryza sativa (japonica
  misc_feature (1)..(160): Homolog of NCBI NO: 21553451 NR Description: unknown [Arabidopsis thaliana]
  misc_feature (1)..(160): Homolog of NCBI NO: 18406580 NR Description: expressed protein [Arabidopsis thaliana]
  misc_feature (1)..(160): Homolog of NCBI NO: 15240611 NR Description: expressed protein [Arabidopsis thaliana]
  misc_feature (1)..(160): Homolog of NCBI NO: 15241996 NR Description: expressed protein [Arabidopsis thaliana]
  misc_feature (139)..(139): Xaa is any aa, unknown or other
  misc_feature (140)..(140): Xaa is any aa, unknown or other
  misc_feature (141)..(141): Xaa is any aa, unknown or other
  misc_feature (142)..(142): Xaa is any aa, unknown or other
  misc_feature (151)..(151): Xaa is any aa, unknown or other
  misc_feature (152)..(152): Xaa is any aa, unknown or other
  misc_feature (155)..(155): Xaa is any aa, unknown or other
  misc_feature (158)..(158): Xaa is any aa, unknown or other
  misc_feature (159)..(159): Xaa is any aa, unknown or other
MGNCQAAEAATTVIQQPDGKSVRFYCTVNASEVIKSHPGHHVALLLSSAVPHGGSLRVTRIKLLRPSDNLLLGHVYRLISSEEVMKGIRAKKSGKMKKIHGEFSVAEEEINPLTLRSDASDKDTQRRIYEKQRGMMNTXXXXKKVRVWQPXXQSXSEXXS

SEQ ID NO: 20438 - DNA, 965 bp, Arabidopsis thaliana
  misc_feature (1)..(965): Ceres Seq. ID no. 12605742
  misc_feature: MA Experiment ID: 20000185 Result: Up-regulated in Transcription
  misc_feature: MA Experiment 20000185 PARAMETER Experiment Name: At_Roots__P Parameter: Age (day) Value: 7 vs. 21
  misc_feature: MA Experiment 20000185 PARAMETER Experiment Name: At_Roots__P Parameter: Organism Value: A. thaliana
  misc_feature: MA Experiment 20000185 PARAMETER Experiment Name: At_Roots__P Parameter: Tissue Value: Roots vs. Whole Plant
  misc_feature: MA Experiment ID: 20000437 Result: Up-regulated in Transcription
  misc_feature: MA Experiment 20000437 PARAMETER Experiment Name: At_Drought_P Parameter: Age (day) Value: 8
  misc_feature: MA Experiment 20000437 PARAMETER Experiment Name: At_Drought_P Parameter: Organism Value: A. thaliana
  misc_feature: MA Experiment 20000437 PARAMETER Experiment Name: At_Drought_P Parameter: Plant Line Value: WS
  misc_feature: MA Experiment 20000437 PARAMETER Experiment Name: At_Drought_P Parameter: Timepoint (hr) Value: 24
  misc_feature: MA Experiment 20000437 PARAMETER Experiment Name: At_Drought_P Parameter: Tissue Value: Whole Plant
  misc_feature: MA Experiment 20000437 PARAMETER Experiment Name: At_Drought_P Parameter: Treatment Value: Drought vs. No Drought
ggggtgattttcttctctggaaggatctgtttttctcttcttcgtcttctctcacccgcctactgactttttttcaaatttcttcagcaacacatacatacagtcacaaggtttccaattttcgattcacgatggaaatggcggaaggggaaggaactacagaggagaactacgacgtagacatcgcgaccaccgcttcttcattaggcggctccggcgtcttccatatcatcaatgacatagtcggattcgtcctctatatgcaccagcagatcccttcggtattacaagacatgagccttgaatttgaaggattgcaaactgaatttatggatttggagacgaatcttgcagaacctcaagtgaaaccactggttagaagaaaactgatgagtagaaagagagaggtgaagaatgagattaagaaactggagaaactgatgaaaaccatctctagtctccgaagtgcgctgcagttaatgatccgtgaagctcctggcattcagaaagttgtgttgattcttggtggtagtccattacggcctcaaaatgcttatgagttgttattcacacaacgcagagaccatgttctaggctacgaaggtgactttgctaaatccaaagctgcagaagcactttcaaaaaagactatccgagcactgatctcgacgggtgctggatcaacttcctacccaggtccaatgaggctcttcatattggttcatgctccacctactttgaatcttccacaacatttccttcctaaacgtgacttcagatacaacagaaagtttgtgccttcaaagttgagattcaagtgcagaacgcaagacaatgcaacaaattctcctcccacaaatgatctaatatggtacttctcttattcacaattctccagttacacactaaacaagttcttgaccatgccttactgtgtcattgcaggtatcaatgtcgacatgtga

SEQ ID NO: 20439 - protein, 320 aa, Arabidopsis thaliana
  peptide (1)..(320): Ceres Seq. ID no. 12605743
  misc_feature (46)..(320): Homolog of NCBI NO: 15218734 NR Description: hypothetical protein; protein id: At1g03180.1
GDFLLWKDLFFSSSSSLTRLLTFFQISSATHTYSHKVSNFRFTMEMAEGEGTTEENYDVDIATTASSLGGSGVFHIINDIVGFVLYMHQQIPSVLQDMSLEFEGLQTEFMDLETNLAEPQVKPLVRRKLMSRKREVKNEIKKLEKLMKTISSLRSALQLMIREAPGIQKVVLILGGSPLRPQNAYELLFTQRRDHVLGYEGDFAKSKAAEALSKKTIRALISTGAGSTSYPGPMRLFILVHAPPTLNLPQHFLPKRDFRYNRKFVPSKLRFKCRTQDNATNSPPTNDLIWYFSYSQFSSYTLNKFLTMPYCVIAGINVDM

SEQ ID NO: 20440 - protein, 277 aa, Arabidopsis thaliana
  peptide (1)..(277): Ceres Seq. ID no. 12605744
  misc_feature (3)..(277): Homolog of NCBI NO: 15218734 NR Description: hypothetical protein; protein id: At1g03180.1
MEMAEGEGTTEENYDVDIATTASSLGGSGVFHIINDIVGFVLYMHQQIPSVLQDMSLEFEGLQTEFMDLETNLAEPQVKPLVRRKLMSRKREVKNEIKKLEKLMKTISSLRSALQLMIREAPGIQKVVLILGGSPLRPQNAYELLFTQRRDHVLGYEGDFAKSKAAEALSKKTIRALISTGAGSTSYPGPMRLFILVHAPPTLNLPQHFLPKRDFRYNRKFVPSKLRFKCRTQDNATNSPPTNDLIWYFSYSQFSSYTLNKFLTMPYCVIAGINVDM

SEQ ID NO: 20441 - protein, 275 aa, Arabidopsis thaliana
  peptide (1)..(275): Ceres Seq. ID no. 12605745
  misc_feature (1)..(275): Homolog of NCBI NO: 15218734 NR Description: hypothetical protein; protein id: At1g03180.1
MAEGEGTTEENYDVDIATTASSLGGSGVFHIINDIVGFVLYMHQQIPSVLQDMSLEFEGLQTEFMDLETNLAEPQVKPLVRRKLMSRKREVKNEIKKLEKLMKTISSLRSALQLMIREAPGIQKVVLILGGSPLRPQNAYELLFTQRRDHVLGYEGDFAKSKAAEALSKKTIRALISTGAGSTSYPGPMRLFILVHAPPTLNLPQHFLPKRDFRYNRKFVPSKLRFKCRTQDNATNSPPTNDLIWYFSYSQFSSYTLNKFLTMPYCVIAGINVDM

SEQ ID NO: 20442 - DNA, 1811 bp, Arabidopsis thaliana
  misc_feature (1)..(1811): Ceres Seq. ID no. 14302935
  misc_feature: MA Experiment ID: 20000173 Result: Down-regulated in Transcription
  misc_feature: MA Experiment 20000173 PARAMETER Experiment Name: At_42deg_Heat_P Parameter: Age (day) Value: 14
  misc_feature: MA Experiment 20000173 PARAMETER Experiment Name: At_42deg_Heat_P Parameter: Organism Value: A. thaliana
  misc_feature: MA Experiment 20000173 PARAMETER Experiment Name: At_42deg_Heat_P Parameter: Plant Line Value: WS
  misc_feature: MA Experiment 20000173 PARAMETER Experiment Name: At_42deg_Heat_P Parameter: Temperature (deg C) Value: 42 vs. 22
  misc_feature: MA Experiment 20000173 PARAMETER Experiment Name: At_42deg_Heat_P Parameter: Timepoint (hr) Value: 6
  misc_feature: MA Experiment 20000173 PARAMETER Experiment Name: At_42deg_Heat_P Parameter: Tissue Value: Aerial
  misc_feature: MA Experiment ID: 20000180 Result: Up-regulated in Transcription
  misc_feature: MA Experiment 20000180 PARAMETER Experiment Name: At_Germinating_Seeds_P Parameter: Age (hr) Value: 24 vs. 0
  misc_feature: MA Experiment 20000180 PARAMETER Experiment Name: At_Germinating_Seeds_P Parameter: Tissue Value: Germinating Seeds
  misc_feature: MA Experiment ID: 20000185 Result: Down-regulated in Transcription
  misc_feature: MA Experiment 20000185 PARAMETER Experiment Name: At_Roots__P Parameter: Age (day) Value: 7 vs. 21
  misc_feature: MA Experiment 20000185 PARAMETER Experiment Name: At_Roots__P Parameter: Organism Value: A. thaliana
  misc_feature: MA Experiment 20000185 PARAMETER Experiment Name: At_Roots__P Parameter: Tissue Value: Roots vs. Whole Plant
  misc_feature: MA Experiment ID: 20000234 Result: Up-regulated in Transcription
  misc_feature: MA Experiment 20000234 PARAMETER Experiment Name: At_Siliques_P Parameter: Age (day) Value: 21
  misc_feature: MA Experiment 20000234 PARAMETER Experiment Name: At_Siliques_P Parameter: Organism Value: A. thaliana
  misc_feature: MA Experiment 20000234 PARAMETER Experiment Name: At_Siliques_P Parameter: Plant Line Value: WS
  misc_feature: MA Experiment 20000234 PARAMETER Experiment Name: At_Siliques_P Parameter: Tissue Value: Less Than 5mm Siliques vs. Whole Plant
  misc_feature: MA Experiment ID: 20000235 Result: Up-regulated in Transcription
  misc_feature: MA Experiment 20000235 PARAMETER Experiment Name: At_Siliques_P Parameter: Age (day) Value: 21
  misc_feature: MA Experiment 20000235 PARAMETER Experiment Name: At_Siliques_P Parameter: Organism Value: A. thaliana
  misc_feature: MA Experiment 20000235 PARAMETER Experiment Name: At_Siliques_P Parameter: Plant Line Value: WS
  misc_feature: MA Experiment 20000235 PARAMETER Experiment Name: At_Siliques_P Parameter: Tissue Value: 5-10mm Siliques vs. Whole Plant
  misc_feature: MA Experiment ID: 20000264 Result: Up-regulated in Transcription
  misc_feature: MA Experiment 20000264 PARAMETER Experiment Name: At_Open_Flower_P Parameter: Age (day) Value: 21
  misc_feature: MA Experiment 20000264 PARAMETER Experiment Name: At_Open_Flower_P Parameter: Plant Line Value: WS
  misc_feature: MA Experiment 20000264 PARAMETER Experiment Name: At_Open_Flower_P Parameter: Tissue Value: Open Flower vs. Whole Plant
  misc_feature: MA Experiment ID: 20000265 Result: Up-regulated in Transcription
  misc_feature: MA Experiment 20000265 PARAMETER Experiment Name: At_Open_Flower_P Parameter: Age (day) Value: 21
  misc_feature: MA Experiment 20000265 PARAMETER Experiment Name: At_Open_Flower_P Parameter: Plant Line Value: WS
  misc_feature: MA Experiment 20000265 PARAMETER Experiment Name: At_Open_Flower_P Parameter: Tissue Value: Closed Flower vs. Whole Plant
  misc_feature: MA Experiment ID: 20000286 Result: Up-regulated in Transcription
  misc_feature: MA Experiment 20000286 PARAMETER Experiment Name: At_Open_Flower_P Parameter: Age (day) Value: 21
  misc_feature: MA Experiment 20000286 PARAMETER Experiment Name: At_Open_Flower_P Parameter: Plant Line Value: WS
  misc_feature: MA Experiment 20000286 PARAMETER Experiment Name: At_Open_Flower_P Parameter: Tissue Value: Half Open vs. Whole Plant
  misc_feature: MA Experiment ID: 20000439 Result: Down-regulated in Transcription
  misc_feature: MA Experiment 20000439 PARAMETER Experiment Name: At_Roots__P Parameter: Age (day) Value: 14 vs. 21
  misc_feature: MA Experiment 20000439 PARAMETER Experiment Name: At_Roots__P Parameter: Organism Value: A. thaliana
  misc_feature: MA Experiment 20000439 PARAMETER Experiment Name: At_Roots__P Parameter: Tissue Value: Roots vs. Whole Plant
  misc_feature: MA Experiment ID: 20000451 Result: Up-regulated in Transcription
  misc_feature: MA Experiment 20000451 PARAMETER Experiment Name: At_CS6879_Shoots-Roots_P Parameter: Age (day) Value: 14
  misc_feature: MA Experiment 20000451 PARAMETER Experiment Name: At_CS6879_Shoots-Roots_P Parameter: Organism Value: A. thaliana
  misc_feature: MA Experiment 20000451 PARAMETER Experiment Name: At_CS6879_Shoots-Roots_P Parameter: Plant Line Value: CS6879 vs. WS
  misc_feature: MA Experiment 20000451 PARAMETER Experiment Name: At_CS6879_Shoots-Roots_P Parameter: Tissue Value: Roots
  misc_feature: MA Experiment ID: 20000794 Result: Up-regulated in Transcription
  misc_feature: MA Experiment 20000794 PARAMETER Experiment Name: At_Petals_P Parameter: Age (day) Value: 23-25 days
  misc_feature: MA Experiment 20000794 PARAMETER Experiment Name: At_Petals_P Parameter: Plant Line Value: WS
  misc_feature: MA Experiment 20000794 PARAMETER Experiment Name: At_Petals_P Parameter: Tissue Value: Petals vs. Whole plant
  misc_feature: MA Experiment ID: 20001451 Result: Down-regulated in Transcription
  misc_feature: MA Experiment 20001451 PARAMETER Experiment Name: At_Far-red-induction_P Parameter: Age (day) Value: 7
  misc_feature: MA Experiment 20001451 PARAMETER Experiment Name: At_Far-red-induction_P Parameter: Light Value: Far-red vs. White
  misc_feature: MA Experiment 20001451 PARAMETER Experiment Name: At_Far-red-induction_P Parameter: Organism Value: A. thaliana
  misc_feature: MA Experiment 20001451 PARAMETER Experiment Name: At_Far-red-induction_P Parameter: Plant Line Value: Columbia
  misc_feature: MA Experiment 20001451 PARAMETER Experiment Name: At_Far-red-induction_P Parameter: Timepoint (hr) Value: 24
  misc_feature: MA Experiment 20001451 PARAMETER Experiment Name: At_Far-red-induction_P Parameter: Tissue Value: Whole Plant
  misc_feature: MA Experiment ID: 20001558 Result: Up-regulated in Transcription
  misc_feature: MA Experiment 20001558 PARAMETER Experiment Name: At_Drought_Soil_Dry_P Parameter: Age (day) Value: 27
  misc_feature: MA Experiment 20001558 PARAMETER Experiment Name: At_Drought_Soil_Dry_P Parameter: Organism Value: A. thaliana
  misc_feature: MA Experiment 20001558 PARAMETER Experiment Name: At_Drought_Soil_Dry_P Parameter: Plant Line Value: WS
  misc_feature: MA Experiment 20001558 PARAMETER Experiment Name: At_Drought_Soil_Dry_P Parameter: Post Timepoint (hr) Value: 6
  misc_feature: MA Experiment 20001558 PARAMETER Experiment Name: At_Drought_Soil_Dry_P Parameter: Post-Treatment Value: Re-Water vs. No Drought
  misc_feature: MA Experiment 20001558 PARAMETER Experiment Name: At_Drought_Soil_Dry_P Parameter: Timepoint (day) Value: 13
  misc_feature: MA Experiment 20001558 PARAMETER Experiment Name: At_Drought_Soil_Dry_P Parameter: Treatment Value: Drought vs. No Drought
  misc_feature: MA Experiment ID: 20001911 Result: Down-regulated in Transcription
  misc_feature: MA Experiment 20001911 PARAMETER Experiment Name: At_Drought_Reproduction_P Parameter: Age (day) Value: 40
  misc_feature: MA Experiment 20001911 PARAMETER Experiment Name: At_Drought_Reproduction_P Parameter: Organism Value: A. thaliana
  misc_feature: MA Experiment 20001911 PARAMETER Experiment Name: At_Drought_Reproduction_P Parameter: Plant Line Value: WS
  misc_feature: MA Experiment 20001911 PARAMETER Experiment Name: At_Drought_Reproduction_P Parameter: Timepoint (day) Value: 10
  misc_feature: MA Experiment 20001911 PARAMETER Experiment Name: At_Drought_Reproduction_P Parameter: Tissue Value: Flowers
  misc_feature: MA Experiment 20001911 PARAMETER Experiment Name: At_Drought_Reproduction_P Parameter: Treatment Value: Drought vs. No Drought
agttccttttccacttttaaccatcaccctataagtggttataactagtaacttgaaatagaaacactctatctctaaaagaggcaaccaaacaaacaaggtctagctttttataaccaaactctgcttctgaacagagttagtcaaagagagagaagccatggaagctatgaaggagactgtggaggagagcttgagagagatgagagagacgtttgcgagtgggaggacgaagagtctgaagtggaggaaggcacagatcggagctatatacgagatggttaaagacaacgaagacaagatctgcaatgctctgtttcaagatttgggcaaacacagtactgaagcttttagagatgagcttggtgttgtcttgcgaacagctactggtgcaatcaactgtcttgataaatgggccgtccccaaacatagcaaacttcctctgttgttctacccagcaaaagggaaagtcatatcggaaccctatgggacggttcttgttctgtctagctggaattttcctatatctttgtctctggatccattgattggggcaatagcagcaggaaataccgtgcttctcaagtcatctgaactaagccctaacgcatctgccttccttgccaagacaattccagcttatctcgatactaaagccatcaaagttatcgaaggaggacctgatgtcgctactatcctcttgcagcatcaatgggacaagatcttcttcaccgggagtcccaagattggaaggatcataatggctgcagcagcacagcatctgactcctgtgacattggagcttggtggaaaatgtcccaccattgttgatcatcacaccatttcaaagaacatcaagtcggttgtcaagaggattgctggaggaaaatggggatcttgcaatggacaagcttgtatctctgtagattacgttcttatcgaaaagagtttcgcgcctactctgattgatatgttgaagcctacgataaagtctttctttggcgaaaatcctaaagaatctggatgtctctcaaggattgcaaacaagcaccacgttcagagactgtctcgtcttcttagcgatcctcgtgtccaagcttccatcgtctatggtggttctatagacgaagataagctgtatgttgagccaacgatcttgttggaccctcctcttgattctgagatcatgaatgaagagatctttggtccaattctcccgattatcacggtacgtgacatccaagaaagcatagggatcattaatacaaaaccgaagccacttgccatttatgcattcacaaatgacgagaaccttaaaactagaattttgtcagaaacatcctcaggaagtgttaccttcaatgacgtcatgatccagtatatgtgtgatgcgttaccttttggaggagtgggagaaagtggaatagggaggtatcacgggaaatactcatttgattgtttcagtcacgagaaagcaataatggaaggaagcttaggtatggatcttgaagctcgataccctccatggaacaacttcaagctcaccttcatcagactcgcatttcgtgaagcttacttcaagcttatcctccttatgcttggtcttaaaagataaaagggggaaagtgagagacagagacacatacacacaaacagagacaatataagtgattgaattacatcacacttatgtttgcttatcatatcttcacctaataagtctcattccgaatgttttacatttctttcaagcttgagagattctatataaagtgatttgatatctatttctacgggatacgttcttagtg

SEQ ID NO: 20443 - protein, 484 aa, Arabidopsis thaliana
  peptide (1)..(484): Ceres Seq. ID no. 14302936
  misc_feature (1)..(231): Pfam Name: Aldehyde dehydrogenase family Pfam Description: Aldehyde dehydrogenase family
  misc_feature (15)..(481): Homolog of NCBI NO: 17065918 NR Description: aldehyde dehydrogenase [Craterostigma
  misc_feature (1)..(484): Homolog of NCBI NO: 17065876 NR Description: aldehyde dehydrogenase [Arabidopsis thaliana]
  misc_feature (1)..(484): Homolog of NCBI NO: 18418408 NR Description: aldehyde dehydrogenase, putative (ALDH)
  misc_feature (14)..(482): Homolog of NCBI NO: 21536879 NR Description: aldehyde dehydrogenase, putative [Arabidopsis
  misc_feature (14)..(482): Homolog of NCBI NO: 15219358 NR Description: aldehyde dehydrogenase, putative (ALDH)
  misc_feature (15)..(480): Homolog of NCBI NO: 4973431 NR Description: putative aldehyde dehydrogenase OS-ALDH
  misc_feature (6)..(484): Homolog of NCBI NO: 33317836 NR Description: aldehyde dehydrogenase [Oryza sativa (indica
  misc_feature (249)..(310): Homolog of NCBI NO: 15234364 NR Description: aldehyde dehydrogenase family protein
  misc_feature (330)..(484): Homolog of NCBI NO: 15234364 NR Description: aldehyde dehydrogenase family protein
  misc_feature (1)..(231): Homolog of NCBI NO: 15234364 NR Description: aldehyde dehydrogenase family protein
MEAMKETVEESLREMRETFASGRTKSLKWRKAQIGAIYEMVKDNEDKICNALFQDLGKHSTEAFRDELGVVLRTATGAINCLDKWAVPKHSKLPLLFYPAKGKVISEPYGTVLVLSSWNFPISLSLDPLIGAIAAGNTVLLKSSELSPNASAFLAKTIPAYLDTKAIKVIEGGPDVATILLQHQWDKIFFTGSPKIGRIIMAAAAQHLTPVTLELGGKCPTIVDHHTISKNIKSVVKRIAGGKWGSCNGQACISVDYVLIEKSFAPTLIDMLKPTIKSFFGENPKESGCLSRIANKHHVQRLSRLLSDPRVQASIVYGGSIDEDKLYVEPTILLDPPLDSEIMNEEIFGPILPIITVRDIQESIGIINTKPKPLAIYAFTNDENLKTRILSETSSGSVTFNDVMIQYMCDALPFGGVGESGIGRYHGKYSFDCFSHEKAIMEGSLGMDLEARYPPWNNFKLTFIRLAFREAYFKLILLMLGLKR

SEQ ID NO: 20444 - protein, 481 aa, Arabidopsis thaliana
  peptide (1)..(481): Ceres Seq. ID no. 14302937
  misc_feature (1)..(228): Pfam Name: Aldehyde dehydrogenase family Pfam Description: Aldehyde dehydrogenase family
  misc_feature (12)..(478): Homolog of NCBI NO: 17065918 NR Description: aldehyde dehydrogenase [Craterostigma
  misc_feature (1)..(481): Homolog of NCBI NO: 17065876 NR Description: aldehyde dehydrogenase [Arabidopsis thaliana]
  misc_feature (1)..(481): Homolog of NCBI NO: 18418408 NR Description: aldehyde dehydrogenase, putative (ALDH)
  misc_feature (11)..(479): Homolog of NCBI NO: 21536879 NR Description: aldehyde dehydrogenase, putative [Arabidopsis
  misc_feature (11)..(479): Homolog of NCBI NO: 15219358 NR Description: aldehyde dehydrogenase, putative (ALDH)
  misc_feature (12)..(477): Homolog of NCBI NO: 4973431 NR Description: putative aldehyde dehydrogenase OS-ALDH
  misc_feature (3)..(481): Homolog of NCBI NO: 33317836 NR Description: aldehyde dehydrogenase [Oryza sativa (indica
  misc_feature (246)..(307): Homolog of NCBI NO: 15234364 NR Description: aldehyde dehydrogenase family protein
  misc_feature (327)..(481): Homolog of NCBI NO: 15234364 NR Description: aldehyde dehydrogenase family protein
  misc_feature (1)..(228): Homolog of NCBI NO: 15234364 NR Description: aldehyde dehydrogenase family protein
MKETVEESLREMRETFASGRTKSLKWRKAQIGAIYEMVKDNEDKICNALFQDLGKHSTEAFRDELGVVLRTATGAINCLDKWAVPKHSKLPLLFYPAKGKVISEPYGTVLVLSSWNFPISLSLDPLIGAIAAGNTVLLKSSELSPNASAFLAKTIPAYLDTKAIKVIEGGPDVATILLQHQWDKIFFTGSPKIGRIIMAAAAQHLTPVTLELGGKCPTIVDHHTISKNIKSVVKRIAGGKWGSCNGQACISVDYVLIEKSFAPTLIDMLKPTIKSFFGENPKESGCLSRIANKHHVQRLSRLLSDPRVQASIVYGGSIDEDKLYVEPTILLDPPLDSEIMNEEIFGPILPIITVRDIQESIGIINTKPKPLAIYAFTNDENLKTRILSETSSGSVTFNDVMIQYMCDALPFGGVGESGIGRYHGKYSFDCFSHEKAIMEGSLGMDLEARYPPWNNFKLTFIRLAFREAYFKLILLMLGLKR

SEQ ID NO: 20445 - protein, 470 aa, Arabidopsis thaliana
  peptide (1)..(470): Ceres Seq. ID no. 14302938
  misc_feature (1)..(217): Pfam Name: Aldehyde dehydrogenase family Pfam Description: Aldehyde dehydrogenase family
  misc_feature (1)..(470): Homolog of NCBI NO: 17065876 NR Description: aldehyde dehydrogenase [Arabidopsis thaliana]
  misc_feature (1)..(470): Homolog of NCBI NO: 18418408 NR Description: aldehyde dehydrogenase, putative (ALDH)
  misc_feature (1)..(468): Homolog of NCBI NO: 21536879 NR Description: aldehyde dehydrogenase, putative [Arabidopsis
  misc_feature (1)..(468): Homolog of NCBI NO: 15219358 NR Description: aldehyde dehydrogenase, putative (ALDH)
  misc_feature (1)..(466): Homolog of NCBI NO: 4973431 NR Description: putative aldehyde dehydrogenase OS-ALDH
  misc_feature (1)..(467): Homolog of NCBI NO: 17065918 NR Description: aldehyde dehydrogenase [Craterostigma
  misc_feature (1)..(470): Homolog of NCBI NO: 33317836 NR Description: aldehyde dehydrogenase [Oryza sativa (indica
  misc_feature (235)..(296): Homolog of NCBI NO: 15234364 NR Description: aldehyde dehydrogenase family protein
  misc_feature (316)..(470): Homolog of NCBI NO: 15234364 NR Description: aldehyde dehydrogenase family protein
  misc_feature (1)..(217): Homolog of NCBI NO: 15234364 NR Description: aldehyde dehydrogenase family protein
MRETFASGRTKSLKWRKAQIGAIYEMVKDNEDKICNALFQDLGKHSTEAFRDELGVVLRTATGAINCLDKWAVPKHSKLPLLFYPAKGKVISEPYGTVLVLSSWNFPISLSLDPLIGAIAAGNTVLLKSSELSPNASAFLAKTIPAYLDTKAIKVIEGGPDVATILLQHQWDKIFFTGSPKIGRIIMAAAAQHLTPVTLELGGKCPTIVDHHTISKNIKSVVKRIAGGKWGSCNGQACISVDYVLIEKSFAPTLIDMLKPTIKSFFGENPKESGCLSRIANKHHVQRLSRLLSDPRVQASIVYGGSIDEDKLYVEPTILLDPPLDSEIMNEEIFGPILPIITVRDIQESIGIINTKPKPLAIYAFTNDENLKTRILSETSSGSVTFNDVMIQYMCDALPFGGVGESGIGRYHGKYSFDCFSHEKAIMEGSLGMDLEARYPPWNNFKLTFIRLAFREAYFKLILLMLGLKR

SEQ ID NO: 20446 - DNA, 1701 bp, Arabidopsis thaliana
  misc_feature (1)..(1701): Ceres Seq. ID no. 14302943
  misc_feature: MA Experiment ID: 108434 Result: Up-regulated in Transcription
  misc_feature: MA Experiment 108434 PARAMETER Experiment Name: At_Root_Tips_cDNA_P Parameter: Tissue Value: Root Tips
  misc_feature: MA Experiment ID: 108461 Result: Down-regulated in Transcription
  misc_feature: MA Experiment 108461 PARAMETER Experiment Name: At_Germinating_Seeds_cDNA_P Parameter: Age (day) Value: 1 vs. 0
  misc_feature: MA Experiment 108461 PARAMETER Experiment Name: At_Germinating_Seeds_cDNA_P Parameter: Tissue Value: Germinating Seeds
  misc_feature: MA Experiment ID: 108462 Result: Down-regulated in Transcription
  misc_feature: MA Experiment 108462 PARAMETER Experiment Name: At_Germinating_Seeds_cDNA_P Parameter: Age (day) Value: 2 vs. 0
  misc_feature: MA Experiment 108462 PARAMETER Experiment Name: At_Germinating_Seeds_cDNA_P Parameter: Tissue Value: Germinating Seeds
  misc_feature: MA Experiment ID: 108463 Result: Down-regulated in Transcription
  misc_feature: MA Experiment 108463 PARAMETER Experiment Name: At_Germinating_Seeds_cDNA_P Parameter: Age (day) Value: 3 vs. 0
  misc_feature: MA Experiment 108463 PARAMETER Experiment Name: At_Germinating_Seeds_cDNA_P Parameter: Tissue Value: Germinating Seeds
  misc_feature: MA Experiment ID: 108464 Result: Down-regulated in Transcription
  misc_feature: MA Experiment 108464 PARAMETER Experiment Name: At_Germinating_Seeds_cDNA_P Parameter: Age (day) Value: 4 vs. 0
  misc_feature: MA Experiment 108464 PARAMETER Experiment Name: At_Germinating_Seeds_cDNA_P Parameter: Tissue Value: Germinating Seeds
  misc_feature: MA Experiment ID: 20000234 Result: Up-regulated in Transcription
  misc_feature: MA Experiment 20000234 PARAMETER Experiment Name: At_Siliques_P Parameter: Age (day) Value: 21
  misc_feature: MA Experiment 20000234 PARAMETER Experiment Name: At_Siliques_P Parameter: Organism Value: A. thaliana
  misc_feature: MA Experiment 20000234 PARAMETER Experiment Name: At_Siliques_P Parameter: Plant Line Value: WS
  misc_feature: MA Experiment 20000234 PARAMETER Experiment Name: At_Siliques_P Parameter: Tissue Value: Less Than 5mm Siliques vs. Whole Plant
  misc_feature: MA Experiment ID: 20000235 Result: Up-regulated in Transcription
  misc_feature: MA Experiment 20000235 PARAMETER Experiment Name: At_Siliques_P Parameter: Age (day) Value: 21
  misc_feature: MA Experiment 20000235 PARAMETER Experiment Name: At_Siliques_P Parameter: Organism Value: A. thaliana
  misc_feature: MA Experiment 20000235 PARAMETER Experiment Name: At_Siliques_P Parameter: Plant Line Value: WS
  misc_feature: MA Experiment 20000235 PARAMETER Experiment Name: At_Siliques_P Parameter: Tissue Value: 5-10mm Siliques vs. Whole Plant
  misc_feature: MA Experiment ID: 20000286 Result: Up-regulated in Transcription
  misc_feature: MA Experiment 20000286 PARAMETER Experiment Name: At_Open_Flower_P Parameter: Age (day) Value: 21
  misc_feature: MA Experiment 20000286 PARAMETER Experiment Name: At_Open_Flower_P Parameter: Plant Line Value: WS
  misc_feature: MA Experiment 20000286 PARAMETER Experiment Name: At_Open_Flower_P Parameter: Tissue Value: Half Open vs. Whole Plant
  misc_feature: MA Experiment ID: 20000438 Result: Up-regulated in Transcription
  misc_feature: MA Experiment 20000438 PARAMETER Experiment Name: At_Shoots__P Parameter: Age (day) Value: 14
  misc_feature: MA Experiment 20000438 PARAMETER Experiment Name: At_Shoots__P Parameter: Tissue Value: Shoots vs. Whole Plant
  misc_feature: MA Experiment ID: 20001905 Result: Down-regulated in Transcription
  misc_feature: MA Experiment 20001905 PARAMETER Experiment Name: At_Drought_Reproduction_P Parameter: Age (day) Value: 40
  misc_feature: MA Experiment 20001905 PARAMETER Experiment Name: At_Drought_Reproduction_P Parameter: Organism Value: A. thaliana
  misc_feature: MA Experiment 20001905 PARAMETER Experiment Name: At_Drought_Reproduction_P Parameter: Plant Line Value: WS
  misc_feature: MA Experiment 20001905 PARAMETER Experiment Name: At_Drought_Reproduction_P Parameter: Timepoint (day) Value: 10
  misc_feature: MA Experiment 20001905 PARAMETER Experiment Name: At_Drought_Reproduction_P Parameter: Tissue Value: Rosettes
  misc_feature: MA Experiment 20001905 PARAMETER Experiment Name: At_Drought_Reproduction_P Parameter: Treatment Value: Drought vs. No Drought
gcaccaggagctcactagtccccccccccccccggtctcctccaatcatgtcgtttcaaaatcctctaatttctcagtcctagtgctaaagctcttgctgggttcaagttgatttctcagtcatcgattgaaattttctcgggaaaaagttctcatcgtctaccatcgacaacgagaaaccagaaaatgcaaagtcttagtcaacttggaccttcagagattttccttgtcgccagaagagaaaaacccagtacgagagcacagctttggtttacgggaagactctcttttagacaagaaacaaatggggttcgtttaaagaatagagtagagtttagtccaagacctgtacctccaaatctgattgcagcagagaaagaagaagctaaagcagttcttactctattcttcaagaagcaaggtcttagcaacagtctctcttctcggttaatcaacaaatccgatcaattcattgaccatttagtgtccaggctccattctgttcacaaagctcgatacctcgtaggaagagaacttactacacttgagattcgagattctcttattccttacctcgaacaacttcatgaagaacatggtgatcttctcgctgagcttgttgtgagcttccctgatccaccagctgagcctagactcgttgcttcatcttcagttccggtcctaccacctcgtggtgacacagattctgcggcagacactcggaaactgagagctgtgtctcgagtcagcgaacttgacacagaaggtgcattacgtcctcagaccctttaccttcttgaccttggtttaaacctggagcagatcaaaacaatcactcgaaagttcgctgcctttccttattacagcctcgacggaaaaataaaacccgttgtggaattccttctagacctcggaattcctaaatcagatatccccacaatcctctgcaaacgcccacagatatgcggaatcagcctaacagataacctgaaaccgacaatggcctttcttgagacgcttggcattgacaagaaccaatgggcaaagatcatttcccgtttcccagccatcctcacttacagccgccagaaacttacttcaactgtcgagttcttatcccaaactggtctcacagaagaacagatagggagaatcctaacccgatgtccaaacatcatgagttacagtgtagaagacaagctccgtccaactatggagtactttagatcgctaaatgtcgatgttgcggttctcctacatcgatgtccccaaacgttcggattaagcatagagtcgaatttgaagccagtaactgagttcttcctcgaaaagggttttggtttagatgaaattggagtcatgatctctagatatggagctttgtacacattcagcttgaaagagaatgtcatgccgaaatgggattactttcagacaatggactatccgaaatccgagcttgtgaaattccctcagttttttgggtacagtttacaagagaggatcaagccgagatacgagctggttcagagaagtggagtgagactgctgttgaaccaggttttatcgctgtcgggaattgagttcgagaaagttgttaagaagaagatgatgaaacttgtgtctaataacgtaatcgatgaacaaagtagtggtggtttgttgtgaatgttttagttttagagtaatcaatttgccgag

SEQ ID NO: 20447 - protein, 493 aa, Arabidopsis thaliana
  peptide (1)..(493): Ceres Seq. ID no. 14302944
  misc_feature (47)..(409): Pfam Name: mTERF Pfam Description: mTERF
  misc_feature (236)..(475): Homolog of NCBI NO: 15227089 NR Description: hypothetical protein [Arabidopsis thaliana]
  misc_feature (124)..(469): Homolog of NCBI NO: 15236230 NR Description: expressed protein [Arabidopsis thaliana]
  misc_feature (111)..(469): Homolog of NCBI NO: 18406426 NR Description: expressed protein [Arabidopsis thaliana]
  misc_feature (253)..(471): Homolog of NCBI NO: 28392870 NR Description: unknown protein [Arabidopsis thaliana]
  misc_feature (173)..(467): Homolog of NCBI NO: 34905080 NR Description: P0686C03.23 [Oryza sativa (japonica
  misc_feature (215)..(471): Homolog of NCBI NO: 15226787 NR Description: expressed protein [Arabidopsis thaliana]
  misc_feature (169)..(469): Homolog of NCBI NO: 15233700 NR Description: expressed protein [Arabidopsis thaliana]
  misc_feature (1)..(26): Homolog of NCBI NO: 7485117 NR Description: hypothetical protein - Arabidopsis thaliana
  misc_feature (47)..(432): Homolog of NCBI NO: 7485117 NR Description: hypothetical protein - Arabidopsis thaliana
  misc_feature (1)..(432): Homolog of NCBI NO: 18414260 NR Description: expressed protein [Arabidopsis thaliana]
MQSLSQLGPSEIFLVARREKPSTRAQLWFTGRLSFRQETNGVRLKNRVEFSPRPVPPNLIAAEKEEAKAVLTLFFKKQGLSNSLSSRLINKSDQFIDHLVSRLHSVHKARYLVGRELTTLEIRDSLIPYLEQLHEEHGDLLAELVVSFPDPPAEPRLVASSSVPVLPPRGDTDSAADTRKLRAVSRVSELDTEGALRPQTLYLLDLGLNLEQIKTITRKFAAFPYYSLDGKIKPVVEFLLDLGIPKSDIPTILCKRPQICGISLTDNLKPTMAFLETLGIDKNQWAKIISRFPAILTYSRQKLTSTVEFLSQTGLTEEQIGRILTRCPNIMSYSVEDKLRPTMEYFRSLNVDVAVLLHRCPQTFGLSIESNLKPVTEFFLEKGFGLDEIGVMISRYGALYTFSLKENVMPKWDYFQTMDYPKSELVKFPQFFGYSLQERIKPRYELVQRSGVRLLLNQVLSLSGIEFEKVVKKKMMKLVSNNVIDEQSSGGLL

SEQ ID NO: 20448 - DNA, 863 bp, Arabidopsis thaliana
  misc_feature (1)..(863): Ceres Seq. ID no. 12606053
  misc_feature: MA Experiment ID: 20000180 Result: Up-regulated in Transcription
  misc_feature: MA Experiment 20000180 PARAMETER Experiment Name: At_Germinating_Seeds_P Parameter: Age (hr) Value: 24 vs. 0
  misc_feature: MA Experiment 20000180 PARAMETER Experiment Name: At_Germinating_Seeds_P Parameter: Tissue Value: Germinating Seeds
  misc_feature: MA Experiment ID: 20000182 Result: Down-regulated in Transcription
  misc_feature: MA Experiment 20000182 PARAMETER Experiment Name: At_2mM_SA_P Parameter: Age (day) Value: 14
  misc_feature: MA Experiment 20000182 PARAMETER Experiment Name: At_2mM_SA_P Parameter: Organism Value: A. thaliana
  misc_feature: MA Experiment 20000182 PARAMETER Experiment Name: At_2mM_SA_P Parameter: Plant Line Value: WS
  misc_feature: MA Experiment 20000182 PARAMETER Experiment Name: At_2mM_SA_P Parameter: Timepoint (hr) Value: 6
  misc_feature: MA Experiment 20000182 PARAMETER Experiment Name: At_2mM_SA_P Parameter: Tissue Value: Aerial
  misc_feature: MA Experiment 20000182 PARAMETER Experiment Name: At_2mM_SA_P Parameter: Treatment Value: 2mM SA vs. No Treatment
  misc_feature: MA Experiment ID: 20000227 Result: Up-regulated in Transcription
  misc_feature: MA Experiment 20000227 PARAMETER Experiment Name: At_Root-Tips-vs-Tops_P Parameter: Tissue Value: Root Tips vs. Root Tops
  misc_feature: MA Experiment ID: 20000438 Result: Up-regulated in Transcription
  misc_feature: MA Experiment 20000438 PARAMETER Experiment Name: At_Shoots__P Parameter: Age (day) Value: 14
  misc_feature: MA Experiment 20000438 PARAMETER Experiment Name: At_Shoots__P Parameter: Tissue Value: Shoots vs. Whole Plant
  misc_feature: MA Experiment ID: 20000495 Result: Down-regulated in Transcription
  misc_feature: MA Experiment 20000495 PARAMETER Experiment Name: At_Guard_Cells_P Parameter: Harvest Date Value: 8/2/2002
  misc_feature: MA Experiment 20000495 PARAMETER Experiment Name: At_Guard_Cells_P Parameter: Organism Value: A. thaliana
  misc_feature: MA Experiment 20000495 PARAMETER Experiment Name: At_Guard_Cells_P Parameter: Tissue Value: Guard Cells vs. Leaves
  misc_feature: MA Experiment ID: 20000794 Result: Down-regulated in Transcription
  misc_feature: MA Experiment 20000794 PARAMETER Experiment Name: At_Petals_P Parameter: Age (day) Value: 23-25 days
  misc_feature: MA Experiment 20000794 PARAMETER Experiment Name: At_Petals_P Parameter: Plant Line Value: WS
  misc_feature: MA Experiment 20000794 PARAMETER Experiment Name: At_Petals_P Parameter: Tissue Value: Petals vs. Whole plant
  misc_feature: MA Experiment ID: 20001248 Result: Down-regulated in Transcription
  misc_feature: MA Experiment 20001248 PARAMETER Experiment Name: At_Far-red-induction_P Parameter: Age (day) Value: 7
  misc_feature: MA Experiment 20001248 PARAMETER Experiment Name: At_Far-red-induction_P Parameter: Light Value: Far-red vs. White
  misc_feature: MA Experiment 20001248 PARAMETER Experiment Name: At_Far-red-induction_P Parameter: Organism Value: A. thaliana
  misc_feature: MA Experiment 20001248 PARAMETER Experiment Name: At_Far-red-induction_P Parameter: Plant Line Value: Columbia
  misc_feature: MA Experiment 20001248 PARAMETER Experiment Name: At_Far-red-induction_P Parameter: Timepoint (hr) Value: 4
  misc_feature: MA Experiment 20001248 PARAMETER Experiment Name: At_Far-red-induction_P Parameter: Tissue Value: Whole Plant
  misc_feature: MA Experiment ID: 20001450 Result: Down-regulated in Transcription
  misc_feature: MA Experiment 20001450 PARAMETER Experiment Name: At_Far-red-induction_P Parameter: Age (day) Value: 7
  misc_feature: MA Experiment 20001450 PARAMETER Experiment Name: At_Far-red-induction_P Parameter: Light Value: Far-red vs. White
  misc_feature: MA Experiment 20001450 PARAMETER Experiment Name: At_Far-red-induction_P Parameter: Organism Value: A. thaliana
  misc_feature: MA Experiment 20001450 PARAMETER Experiment Name: At_Far-red-induction_P Parameter: Plant Line Value: Columbia
  misc_feature: MA Experiment 20001450 PARAMETER Experiment Name: At_Far-red-induction_P Parameter: Timepoint (hr) Value: 8
  misc_feature: MA Experiment 20001450 PARAMETER Experiment Name: At_Far-red-induction_P Parameter: Tissue Value: Whole Plant
  misc_feature: MA Experiment ID: 20001557 Result: Down-regulated in Transcription
  misc_feature: MA Experiment 20001557 PARAMETER Experiment Name: At_Drought_Soil_Dry_P Parameter: Age (day) Value: 27
  misc_feature: MA Experiment 20001557 PARAMETER Experiment Name: At_Drought_Soil_Dry_P Parameter: Organism Value: A. thaliana
  misc_feature: MA Experiment 20001557 PARAMETER Experiment Name: At_Drought_Soil_Dry_P Parameter: Plant Line Value: WS
  misc_feature: MA Experiment 20001557 PARAMETER Experiment Name: At_Drought_Soil_Dry_P Parameter: Post Timepoint (hr) Value: 3
  misc_feature: MA Experiment 20001557 PARAMETER Experiment Name: At_Drought_Soil_Dry_P Parameter: Post-Treatment Value: Re-Water vs. No Drought
  misc_feature: MA Experiment 20001557 PARAMETER Experiment Name: At_Drought_Soil_Dry_P Parameter: Timepoint (day) Value: 13
  misc_feature: MA Experiment 20001557 PARAMETER Experiment Name: At_Drought_Soil_Dry_P Parameter: Treatment Value: Drought vs. No Drought
  misc_feature: MA Experiment ID: 20001905 Result: Down-regulated in Transcription
  misc_feature: MA Experiment 20001905 PARAMETER Experiment Name: At_Drought_Reproduction_P Parameter: Age (day) Value: 40
  misc_feature: MA Experiment 20001905 PARAMETER Experiment Name: At_Drought_Reproduction_P Parameter: Organism Value: A. thaliana
  misc_feature: MA Experiment 20001905 PARAMETER Experiment Name: At_Drought_Reproduction_P Parameter: Plant Line Value: WS
  misc_feature: MA Experiment 20001905 PARAMETER Experiment Name: At_Drought_Reproduction_P Parameter: Timepoint (day) Value: 10
  misc_feature: MA Experiment 20001905 PARAMETER Experiment Name: At_Drought_Reproduction_P Parameter: Tissue Value: Rosettes
  misc_feature: MA Experiment 20001905 PARAMETER Experiment Name: At_Drought_Reproduction_P Parameter: Treatment Value: Drought vs. No Drought
aaccggacaacatctcaaaacttgttctgtttttttttttttcatttcttaaacagaaaaatggttgcagcattctcttacactgcctgcaccaagctttctctattacatccttctatggttgctcaaatccgaccaagaacaacacaaaaggcgttcgtggtgacaaatccggaacaagacagtactcttgaagtacaagaaacagagacactcaaagaagagcaatcaacagagaagatgaagaagcagccaacaccattgagaccagtggagaaacagctgaacgtgaagagcaagggtatgggcgattttggtggtcagtggctaagcagtgtcacacgtcacgttaggatctacgctgcttatattgatccagagacttgtgagtttgaccagtcacaaatggataaactcactttgattcttgatcctactgaagaatttgtgtgggatgatgaaagctgtaacaaggtctattcttatttccaagaactcgtcgatcactacgagggagcaccattaacggagtacacattgagattgataggatcggacgtagaacattacataaggaagatgttgttcgatggagaaatacaatacaatatggatgcaagagttcttaatttcagtatgggaaagcctcgtgtacaattcaataccagtaacattgaaggtggtggagatggtcagcctcaagaggacgcttagtgaaacaaactctattttataatcatgtaatgggaatataaatatattgtagtatgctttttaattttgtctatcacaaagtaacatatgtatatatcatgacatatgctataattatttttgtaataatcaatcttaagtttcttttc

SEQ ID NO: 20449 - protein, 237 aa, Arabidopsis thaliana
  peptide (1)..(237): Ceres Seq. ID no. 12606054
  misc_feature (110)..(217): Homolog of NCBI NO: 33866788 NR Description: conserved hypothetical protein [Synechococcus sp.
  misc_feature (110)..(217): Homolog of NCBI NO: 33239620 NR Description: Uncharacterized protein
  misc_feature (110)..(218): Homolog of NCBI NO: 23039375 NR Description: hypothetical protein [Trichodesmium erythraeum
  misc_feature (110)..(219): Homolog of NCBI NO: 16331024 NR Description: unknown protein [Synechocystis sp. PCC 6803]
  misc_feature (110)..(225): Homolog of NCBI NO: 23125502 NR Description: hypothetical protein [Nostoc punctiforme]
  misc_feature (110)..(218): Homolog of NCBI NO: 17229224 NR Description: hypothetical protein [Nostoc sp. PCC 7120]
  misc_feature (110)..(219): Homolog of NCBI NO: 37521091 NR Description: hypothetical protein glr1522 [Gloeobacter
  misc_feature (55)..(225): Homolog of NCBI NO: 21740425 NR Description: OSJNBa0091D06.25 [Oryza sativa (japonica
  misc_feature (171)..(232): Homolog of NCBI NO: 15235742 NR Description: putative protein; protein id: At4g37920.1
  misc_feature (21)..(171): Homolog of NCBI NO: 15235742 NR Description: putative protein; protein id: At4g37920.1
NRTTSQNLFCFFFFHFLNRKMVAAFSYTACTKLSLLHPSMVAQIRPRTTQKAFVVTNPEQDSTLEVQETETLKEEQSTEKMKKQPTPLRPVEKQLNVKSKGMGDFGGQWLSSVTRHVRIYAAYIDPETCEFDQSQMDKLTLILDPTEEFVWDDESCNKVYSYFQELVDHYEGAPLTEYTLRLIGSDVEHYIRKMLFDGEIQYNMDARVLNFSMGKPRVQFNTSNIEGGGDGQPQEDA

SEQ ID NO: 20450 - protein, 217 aa, Arabidopsis thaliana
  peptide (1)..(217): Ceres Seq. ID no. 12606055
  misc_feature (90)..(197): Homolog of NCBI NO: 33866788 NR Description: conserved hypothetical protein [Synechococcus sp.
  misc_feature (90)..(197): Homolog of NCBI NO: 33239620 NR Description: Uncharacterized protein
  misc_feature (90)..(198): Homolog of NCBI NO: 23039375 NR Description: hypothetical protein [Trichodesmium erythraeum
  misc_feature (90)..(199): Homolog of NCBI NO: 16331024 NR Description: unknown protein [Synechocystis sp. PCC 6803]
  misc_feature (90)..(205): Homolog of NCBI NO: 23125502 NR Description: hypothetical protein [Nostoc punctiforme]
  misc_feature (90)..(198): Homolog of NCBI NO: 17229224 NR Description: hypothetical protein [Nostoc sp. PCC 7120]
  misc_feature (90)..(199): Homolog of NCBI NO: 37521091 NR Description: hypothetical protein glr1522 [Gloeobacter
  misc_feature (35)..(205): Homolog of NCBI NO: 21740425 NR Description: OSJNBa0091D06.25 [Oryza sativa (japonica
  misc_feature (151)..(212): Homolog of NCBI NO: 15235742 NR Description: putative protein; protein id: At4g37920.1
  misc_feature (1)..(151): Homolog of NCBI NO: 15235742 NR Description: putative protein; protein id: At4g37920.1
MVAAFSYTACTKLSLLHPSMVAQIRPRTTQKAFVVTNPEQDSTLEVQETETLKEEQSTEKMKKQPTPLRPVEKQLNVKSKGMGDFGGQWLSSVTRHVRIYAAYIDPETCEFDQSQMDKLTLILDPTEEFVWDDESCNKVYSYFQELVDHYEGAPLTEYTLRLIGSDVEHYIRKMLFDGEIQYNMDARVLNFSMGKPRVQFNTSNIEGGGDGQPQEDA

SEQ ID NO: 20451 - protein, 198 aa, Arabidopsis thaliana
  peptide (1)..(198): Ceres Seq. ID no. 12606056
  misc_feature (71)..(178): Homolog of NCBI NO: 33866788 NR Description: conserved hypothetical protein [Synechococcus sp.
  misc_feature (71)..(178): Homolog of NCBI NO: 33239620 NR Description: Uncharacterized protein
  misc_feature (71)..(179): Homolog of NCBI NO: 23039375 NR Description: hypothetical protein [Trichodesmium erythraeum
  misc_feature (71)..(180): Homolog of NCBI NO: 16331024 NR Description: unknown protein [Synechocystis sp. PCC 6803]
  misc_feature (71)..(186): Homolog of NCBI NO: 23125502 NR Description: hypothetical protein [Nostoc punctiforme]
  misc_feature (71)..(179): Homolog of NCBI NO: 17229224 NR Description: hypothetical protein [Nostoc sp. PCC 7120]
  misc_feature (71)..(180): Homolog of NCBI NO: 37521091 NR Description: hypothetical protein glr1522 [Gloeobacter
  misc_feature (16)..(186): Homolog of NCBI NO: 21740425 NR Description: OSJNBa0091D06.25 [Oryza sativa (japonica
  misc_feature (132)..(193): Homolog of NCBI NO: 15235742 NR Description: putative protein; protein id: At4g37920.1
  misc_feature (1)..(132): Homolog of NCBI NO: 15235742 NR Description: putative protein; protein id: At4g37920.1
MVAQIRPRTTQKAFVVTNPEQDSTLEVQETETLKEEQSTEKMKKQPTPLRPVEKQLNVKSKGMGDFGGQWLSSVTRHVRIYAAYIDPETCEFDQSQMDKLTLILDPTEEFVWDDESCNKVYSYFQELVDHYEGAPLTEYTLRLIGSDVEHYIRKMLFDGEIQYNMDARVLNFSMGKPRVQFNTSNIEGGGDGQPQEDA

SEQ ID NO: 20452 - DNA, 582 bp, Arabidopsis thaliana
  misc_feature (1)..(582): Ceres Seq. ID no. 13648103
  misc_feature: MA Experiment ID: 20000307 Result: Up-regulated in Transcription
  misc_feature: MA Experiment 20000307 PARAMETER Experiment Name: At_Germinating_Seeds_Sub_P Parameter: Age (hr) Value: 24 vs. 0
  misc_feature: MA Experiment 20000307 PARAMETER Experiment Name: At_Germinating_Seeds_Sub_P Parameter: Organism Value: A. thaliana
  misc_feature: MA Experiment 20000307 PARAMETER Experiment Name: At_Germinating_Seeds_Sub_P Parameter: Plant Line Value: WS
  misc_feature: MA Experiment 20000307 PARAMETER Experiment Name: At_Germinating_Seeds_Sub_P Parameter: Tissue Value: Germinating Seeds
  misc_feature: MA Experiment ID: 20000315 Result: Down-regulated in Transcription
  misc_feature: MA Experiment 20000315 PARAMETER Experiment Name: At_14day_Shoots-Roots_Sub_P Parameter: Age (day) Value: 14
  misc_feature: MA Experiment 20000315 PARAMETER Experiment Name: At_14day_Shoots-Roots_Sub_P Parameter: Organism Value: A. thaliana
  misc_feature: MA Experiment 20000315 PARAMETER Experiment Name: At_14day_Shoots-Roots_Sub_P Parameter: Plant Line Value: WS
  misc_feature: MA Experiment 20000315 PARAMETER Experiment Name: At_14day_Shoots-Roots_Sub_P Parameter: Tissue Value: Shoots vs. Whole Plant
  misc_feature: MA Experiment ID: 20000327 Result: Down-regulated in Transcription
  misc_feature: MA Experiment 20000327 PARAMETER Experiment Name: At_42deg_Heat_Sub_P Parameter: Age (day) Value: 14
  misc_feature: MA Experiment 20000327 PARAMETER Experiment Name: At_42deg_Heat_Sub_P Parameter: Organism Value: A. thaliana
  misc_feature: MA Experiment 20000327 PARAMETER Experiment Name: At_42deg_Heat_Sub_P Parameter: Plant Line Value: WS
  misc_feature: MA Experiment 20000327 PARAMETER Experiment Name: At_42deg_Heat_Sub_P Parameter: Temperature (deg C) Value: 42 vs. 22
  misc_feature: MA Experiment 20000327 PARAMETER Experiment Name: At_42deg_Heat_Sub_P Parameter: Timepoint (hr) Value: 1
  misc_feature: MA Experiment 20000327 PARAMETER Experiment Name: At_42deg_Heat_Sub_P Parameter: Tissue Value: Aerial
  misc_feature: MA Experiment ID: 20000328 Result: Down-regulated in Transcription
  misc_feature: MA Experiment 20000328 PARAMETER Experiment Name: At_42deg_Heat_Sub_P Parameter: Age (day) Value: 14
  misc_feature: MA Experiment 20000328 PARAMETER Experiment Name: At_42deg_Heat_Sub_P Parameter: Organism Value: A. thaliana
  misc_feature: MA Experiment 20000328 PARAMETER Experiment Name: At_42deg_Heat_Sub_P Parameter: Plant Line Value: WS
  misc_feature: MA Experiment 20000328 PARAMETER Experiment Name: At_42deg_Heat_Sub_P Parameter: Temperature (deg C) Value: 42 vs. 22
  misc_feature: MA Experiment 20000328 PARAMETER Experiment Name: At_42deg_Heat_Sub_P Parameter: Timepoint (hr) Value: 6
  misc_feature: MA Experiment 20000328 PARAMETER Experiment Name: At_42deg_Heat_Sub_P Parameter: Tissue Value: Aerial
  misc_feature: MA Experiment ID: 20000347 Result: Up-regulated in Transcription
  misc_feature: MA Experiment 20000347 PARAMETER Experiment Name: At_2mM_SA_Sub_P Parameter: Age (day) Value: 14
  misc_feature: MA Experiment 20000347 PARAMETER Experiment Name: At_2mM_SA_Sub_P Parameter: Organism Value: A. thaliana
  misc_feature: MA Experiment 20000347 PARAMETER Experiment Name: At_2mM_SA_Sub_P Parameter: Plant Line Value: WS
  misc_feature: MA Experiment 20000347 PARAMETER Experiment Name: At_2mM_SA_Sub_P Parameter: Timepoint (hr) Value: 6
  misc_feature: MA Experiment 20000347 PARAMETER Experiment Name: At_2mM_SA_Sub_P Parameter: Tissue Value: Aerial
  misc_feature: MA Experiment 20000347 PARAMETER Experiment Name: At_2mM_SA_Sub_P Parameter: Treatment Value: 2mM SA vs. No Treatment
  misc_feature: MA Experiment ID: 20000355 Result: Down-regulated in Transcription
  misc_feature: MA Experiment 20000355 PARAMETER Experiment Name: At_Siliques_Sub_P Parameter: Age (day) Value: 21
  misc_feature: MA Experiment 20000355 PARAMETER Experiment Name: At_Siliques_Sub_P Parameter: Organism Value: A. thaliana
  misc_feature: MA Experiment 20000355 PARAMETER Experiment Name: At_Siliques_Sub_P Parameter: Plant Line Value: WS
  misc_feature: MA Experiment 20000355 PARAMETER Experiment Name: At_Siliques_Sub_P Parameter: Tissue Value: Less Than 5mm Siliques vs. Whole Plant
  misc_feature: MA Experiment ID: 20000440 Result: Down-regulated in Transcription
  misc_feature: MA Experiment 20000440 PARAMETER Experiment Name: At_Closed-Flower__Sub_P Parameter: Tissue Value: Closed Flower vs. Whole Plant
gaaaataatcttcatagtctctcatccaatcttacaaactttctgatttcctttctacattcatcgaccaatggcagcaaacaaaactcttcctacgtatttttgcagaaactgcgagaatccactagctctcggtgaagatctcatctccaaaaaatttgtgggagcttcagggccagcgtttatgttttcacacgcgatgaacgtggtggttggaccgaagattgggaggaaactgataaccggatcgtatgtagtggcagatgtgatgtgcagtaagtgtggtgagacgttgggttggaaatatgttgagacattcgatcttaaacagaggtataaagaaggcatgtttgtcatcgagaagctcaagttgaccaaaagatattgaaacctagtcaagaagaataatactcttggagggttaagctaataaataaatgaaggaaacttgaggattgtatatgtatatataacctttgttgtataaatgtcatcactatattggttgttctctataaagggatttgaaaacaaagtaaaaaaaaaaaaaaaaaaaactcgagggggggcccggtacccaat

SEQ ID NO: 20453 - protein, 105 aa, Arabidopsis thaliana
  peptide (1)..(105): Ceres Seq. ID no. 13648104
  misc_feature (10)..(103): Pfam Name: Yippee putative zinc-binding protein Pfam Description: Yippee putative zinc-binding protein
  misc_feature (9)..(79): Homolog of NCBI NO: 26352366 NR Description: unnamed protein product [Mus musculus]
  misc_feature (1)..(103): Homolog of NCBI NO: 6319422 NR Description: Hypothetical ORF; Ybl049wp [Saccharomyces
  misc_feature (12)..(103): Homolog of NCBI NO: 37533560 NR Description: hypothetical protein [Oryza sativa (japonica
  misc_feature (10)..(97): Homolog of NCBI NO: 40255199 NR Description: hypothetical protein MGC10500 [Homo sapiens]
  misc_feature (9)..(101): Homolog of NCBI NO: 18399156 NR Description: expressed protein [Arabidopsis thaliana]
  misc_feature (9)..(103): Homolog of NCBI NO: 21450727 NR Description: hypothetical protein FLJ30213 [Homo sapiens]
  misc_feature (9)..(103): Homolog of NCBI NO: 20840809 NR Description: similar to hypothetical protein FLJ30213
  misc_feature (9)..(103): Homolog of NCBI NO: 17865319 NR Description: yippee-like 1
  misc_feature (9)..(103): Homolog of NCBI NO: 9558721 NR Description: yippee-like 1 [Homo sapiens]
  misc_feature (10)..(103): Homolog of NCBI NO: 15234265 NR Description: expressed protein [Arabidopsis thaliana]
MAANKTLPTYFCRNCENPLALGEDLISKKFVGASGPAFMFSHAMNVVVGPKIGRKLITGSYVVADVMCSKCGETLGWKYVETFDLKQRYKEGMFVIEKLKLTKRY

SEQ ID NO: 20454 - protein, 67 aa, Arabidopsis thaliana
  peptide (1)..(67): Ceres Seq. ID no. 13648105
  misc_feature (1)..(65): Pfam Name: Yippee putative zinc-binding protein Pfam Description: Yippee putative zinc-binding protein
  misc_feature (1)..(41): Homolog of NCBI NO: 26352366 NR Description: unnamed protein product [Mus musculus]
  misc_feature (1)..(65): Homolog of NCBI NO: 6319422 NR Description: Hypothetical ORF; Ybl049wp [Saccharomyces
  misc_feature (1)..(65): Homolog of NCBI NO: 37533560 NR Description: hypothetical protein [Oryza sativa (japonica
  misc_feature (1)..(59): Homolog of NCBI NO: 40255199 NR Description: hypothetical protein MGC10500 [Homo sapiens]
  misc_feature (1)..(63): Homolog of NCBI NO: 18399156 NR Description: expressed protein [Arabidopsis thaliana]
  misc_feature (1)..(65): Homolog of NCBI NO: 20840809 NR Description: similar to hypothetical protein FLJ30213
  misc_feature (1)..(65): Homolog of NCBI NO: 21450727 NR Description: hypothetical protein FLJ30213 [Homo sapiens]
  misc_feature (1)..(65): Homolog of NCBI NO: 17865319 NR Description: yippee-like 1
  misc_feature (1)..(65): Homolog of NCBI NO: 9558721 NR Description: yippee-like 1 [Homo sapiens]
  misc_feature (1)..(65): Homolog of NCBI NO: 15234265 NR Description: expressed protein [Arabidopsis thaliana]
MFSHAMNVVVGPKIGRKLITGSYVVADVMCSKCGETLGWKYVETFDLKQRYKEGMFVIEKLKLTKRY

SEQ ID NO: 20455 - protein, 62 aa, Arabidopsis thaliana
  peptide (1)..(62): Ceres Seq. ID no. 13648106
  misc_feature (1)..(60): Pfam Name: Yippee putative zinc-binding protein Pfam Description: Yippee putative zinc-binding protein
  misc_feature (1)..(54): Homolog of NCBI NO: 40255199 NR Description: hypothetical protein MGC10500 [Homo sapiens]
  misc_feature (1)..(58): Homolog of NCBI NO: 18399156 NR Description: expressed protein [Arabidopsis thaliana]
  misc_feature (1)..(60): Homolog of NCBI NO: 20840809 NR Description: similar to hypothetical protein FLJ30213
  misc_feature (1)..(60): Homolog of NCBI NO: 21450727 NR Description: hypothetical protein FLJ30213 [Homo sapiens]
  misc_feature (1)..(60): Homolog of NCBI NO: 6319422 NR Description: Hypothetical ORF; Ybl049wp [Saccharomyces
  misc_feature (1)..(60): Homolog of NCBI NO: 37533560 NR Description: hypothetical protein [Oryza sativa (japonica
  misc_feature (1)..(36): Homolog of NCBI NO: 26352366 NR Description: unnamed protein product [Mus musculus]
  misc_feature (1)..(60): Homolog of NCBI NO: 17865319 NR Description: yippee-like 1
  misc_feature (1)..(60): Homolog of NCBI NO: 9558721 NR Description: yippee-like 1 [Homo sapiens]
  misc_feature (1)..(60): Homolog of NCBI NO: 15234265 NR Description: expressed protein [Arabidopsis thaliana]
MNVVVGPKIGRKLITGSYVVADVMCSKCGETLGWKYVETFDLKQRYKEGMFVIEKLKLTKRY

SEQ ID NO: 20456 - DNA, 564 bp, Arabidopsis thaliana
  misc_feature (1)..(564): Ceres Seq. ID no. 13648495
tagtccccccccccccccccccaaaaagttttatcgattccaccaaattagggcgaacgcgaaatctgggtattgtaatttgaagcgatggcgacgactggaactgctgcggttgcgacgggaacttcgacggtgaagagaaaaccggtgtttgtgaaggtggaacagctaaagcctggaacgactggtcacacgttgactgttaaagtcattgaggctaatatcgtggttcctgttacccggaagactcgtccagcgagttctctgagtcgtccttctcagcctagtcgaatcgttgagtgtctcatcggtgacgaaactgggtgtatcctcttcactgctcgtaacgatcaaggttattgtttctccacttttctcttgctttatggatatagaaatggtgtcttcgtagtttattagagtgataagtcttatcctttgttgttctctcgtttgtcttaatcaatttctattttgagcaaaaaaaaaaaaaaaaaaaactcgagggggggcccggtacccaattgttaaacacaataaagtgggaactggaggggggaaagg

SEQ ID NO: 20457 - protein, 110 aa, Arabidopsis thaliana
  peptide (1)..(110): Ceres Seq. ID no. 13648496
  misc_feature (9)..(89): Homolog of NCBI NO: 18395285 NR Description: expressed protein [Arabidopsis thaliana]
  misc_feature (9)..(89): Homolog of NCBI NO: 30681801 NR Description: expressed protein [Arabidopsis thaliana]
  misc_feature (9)..(89): Homolog of NCBI NO: 18391179 NR Description: expressed protein [Arabidopsis thaliana]
  misc_feature (9)..(100): Homolog of NCBI NO: 6573753 NR Description: F20B24.1 [Arabidopsis thaliana]
  misc_feature (10)..(89): Homolog of NCBI NO: 34904470 NR Description: OSJNBa0086P08.14 [Oryza sativa (japonica
  misc_feature (13)..(89): Homolog of NCBI NO: 18403397 NR Description: expressed protein [Arabidopsis thaliana]
  misc_feature (13)..(90): Homolog of NCBI NO: 25329540 NR Description: probable tyrosyl-tRNA synthetase [imported] -
  misc_feature (9)..(89): Homolog of NCBI NO: 34909622 NR Description: P0435B05.31 [Oryza sativa (japonica
  misc_feature (6)..(89): Homolog of NCBI NO: 15219562 NR Description: hypothetical protein [Arabidopsis thaliana]
  misc_feature (1)..(89): Homolog of NCBI NO: 15235304 NR Description: expressed protein [Arabidopsis thaliana]
MATTGTAAVATGTSTVKRKPVFVKVEQLKPGTTGHTLTVKVIEANIVVPVTRKTRPASSLSRPSQPSRIVECLIGDETGCILFTARNDQGYCFSTFLLLYGYRNGVFVVY

SEQ ID NO: 20458 - DNA, 3205 bp, Arabidopsis thaliana
  misc_feature (1)..(3205): Ceres Seq. ID no. 13648499
gatgcttcggtgttggtcagtcaccgtcgagagatcatgcgaaggaatgctcctcaggcggaggatactatcgctctctgcgtcgtcgttcagaaactttacttccggtaacaacggcgacgctattccgttctctaccttcacgaaaccttcttcttcaatcgctcccggagatttcctcgtccgtgaatggaaagactggtttaagcatcgagatgtgaaacagagccaccaattaatcgatcgaatctttgacatccttcgagctccttctaacgatggagacgatagagctttttatctccacctctccaatctccgacttcgtctcactgagaaattcgtcctcgacgtgctttcacacactcgttacgatatcctctgttgtctcaaattcttcgattgggctgctcgtcagcctgggtttcatcacacgcgtgctacttttcatgctatcttcaagatccttcgtggtgcgaagcttgtgactcttatgattgactttttggatcgaagtgttggttttgaaagttgccgtcattctcttcgtctctgtgatgctcttgttgttggttatgctgtagctggtcgtactgatatagctcttcagcattttggtaatatgagatttcgaggtttggatttggattcttttgggtatcatgtgcttttgaatgcacttgttgaggagaagtgttttgatagttttgatgtcatcttcgaccagatctccgtgcgtggcttcgtatgtgctgttacgcattcgattttggtgaagaagttttgcaagcaagggaagcttgatgaggctgaagattatcttcgagccttgctgcctaatgatcctgctggatgtggttctggcttaggtatattggttgatgctctatgttccaaacgaaagtttcaggaagctactaagttgttagacgagatcaaactggtgggaacagtgaatatggaccgtgcttataacatttggattagggcgcttattaaagctggattcttgaataaccctgcggatttcttgcagaagattagtcctttggaaggttgtgaactcgaagttttcaggtataactctatggtctttcaacttttgaaggagaacaatcttgatggtgtgtatgatattcttacggagatgatggtacgtggagtttcgccgaataagaaaacgatgaatgctgctttatgcttcttttgcaaagctggatttgtagatgaagccctcgagttataccggtcgaggtcagaaattgggtttgctcctaccgccatgtcttacaactatctgattcataccctttgtgccaatgaaagtgttgaacaagcttatgatgtcttgaaaggggcaattgaccgagggcattttcttggtggaaagacatttagtacactaaccaatgccttgtgctggaaggggaagcctgacatggcaagggagctggttattgctgccgctgaacgggacttattgcctaaacgtatagctggttgcaagattatatcagctctttgcgatgttgggaaagtggaggacgctcttatgattaatgagctattcaataaaagtggtgtagacacctcctttaaaatgttcaccagtttgatatatggctcaatcacactaatgaggggagacatagctgctaaacttatcatcaggatgcaggaaaagggctacaccccgacccgtagtctctatcgaaatgttattcaatgtgtttgtgagatggaaagtggtgaaaaaaacttctttactactttgctaaagtttcagttgtctctttgggaacacaaggttcaggcctacaacttattcattgaaggagctgggtttgcaggaaaaccaaaacttgcaagactagtgtatgatatgatggatagagatggtatcacgcccacagtagcttcaaacattctcatgcttcagagttatctaaaaaatgagaaaatcgccgatgctcttcactttttccatgacctgcgtgaacaaggtaagaccaaaaaaagactgtaccaagttatgattgttggtctctgtaaagcaaataaattggatgatgctatgcatttcttggaagaaatgaagggagaaggactacagcctagtatcgaatgttacgaagtaaacatacaaaaattgtgcaacgaagaaaagtatgatgaggcagttggattagtcaatgaatttaggaaaagtgggcgtcgtattacagctttcataggtaatgtccttttgcataacgcaatgaagagcaaaggggtgtatgaagcatggacacggatgagaaatatagaagataagatccctgagatgaagtcacttggtgagttgataggattattctcaggacgaatagatatggaagtagaactgaagcggttagatgaagttatagagaaatgctatcctcttgatatgtacacgtacaatatgctgttgagaatgattgtaatgaaccaggcggaagatgcatatgagatggttgaaagaatagctcggagaggatatgtgcctaatgaacggactgacatgatccttgaacgggctaaccgcatactagaggaacggaattcaaggtcaaacttagggaggaatggttggaatagtagacagaggcaacttgaatgatgaaaagtatgtcacagagaggtcagaattgttgaatagagagaacaagggagttgatttggattcagtatctgttttgggatttggatcatggacaacagatgaatgagaaaagccagattcttcttcttgaggctttatatgtcctggacgttgtaacttgcaggagcttttttatctctggattgcaaaagatcgatggtattttcccagaagctttttgtttttttttaagtaaagatcgatgtgtcactaaagacacttacagaattgggtagtatccattatgtacacaattgtttgtagtctttccaagaaacacacaagaattgggtagtatccattatgtacacaattgtttgtagtctttcctagaaacacacaagttttgttgtgcgacacaactactcagagagagatttcaacaattttttgtcatattctttatgtgttgcctgttggtaaggaaaatcaatggtggtcgcccgccttgtttcgaaaattggtgtttgtaattacatttgtttactagttctagtaatgatgaatcttcttattttgttg

SEQ ID NO: 20459 - protein, 879 aa, Arabidopsis thaliana
  peptide (1)..(879): Ceres Seq. ID no. 13648500
  misc_feature (428)..(462): Pfam Name: PPR repeat Pfam Description: PPR repeat
  misc_feature (192)..(847): Homolog of NCBI NO: 37534450 NR Description: unknown protein [Oryza sativa (japonica
  misc_feature (184)..(727): Homolog of NCBI NO: 34910106 NR Description: B1100D10.28 [Oryza sativa (japonica
  misc_feature (141)..(771): Homolog of NCBI NO: 37535672 NR Description: putative chloroplast RNA processing protein
  misc_feature (141)..(771): Homolog of NCBI NO: 37535708 NR Description: putative membrane-associated protein
  misc_feature (350)..(859): Homolog of NCBI NO: 11994279 NR Description: gb|AAD43616.1~gene_id:F16J14.3~strong similarity
  misc_feature (350)..(859): Homolog of NCBI NO: 15228763 NR Description: pentatricopeptide (PPR) repeat-containing protein
  misc_feature (141)..(787): Homolog of NCBI NO: 33859440 NR Description: PPR protein [Oryza sativa (indica
  misc_feature (253)..(859): Homolog of NCBI NO: 37535672 NR Description: putative chloroplast RNA processing protein
  misc_feature (253)..(878): Homolog of NCBI NO: 37535708 NR Description: putative membrane-associated protein
  misc_feature (343)..(846): Homolog of NCBI NO: 34015232 NR Description: putative fertility restorer
MLRCWSVTVERSCEGMLLRRRILSLSASSFRNFTSGNNGDAIPFSTFTKPSSSIAPGDFLVREWKDWFKHRDVKQSHQLIDRIFDILRAPSNDGDDRAFYLHLSNLRLRLTEKFVLDVLSHTRYDILCCLKFFDWAARQPGFHHTRATFHAIFKILRGAKLVTLMIDFLDRSVGFESCRHSLRLCDALVVGYAVAGRTDIALQHFGNMRFRGLDLDSFGYHVLLNALVEEKCFDSFDVIFDQISVRGFVCAVTHSILVKKFCKQGKLDEAEDYLRALLPNDPAGCGSGLGILVDALCSKRKFQEATKLLDEIKLVGTVNMDRAYNIWIRALIKAGFLNNPADFLQKISPLEGCELEVFRYNSMVFQLLKENNLDGVYDILTEMMVRGVSPNKKTMNAALCFFCKAGFVDEALELYRSRSEIGFAPTAMSYNYLIHTLCANESVEQAYDVLKGAIDRGHFLGGKTFSTLTNALCWKGKPDMARELVIAAAERDLLPKRIAGCKIISALCDVGKVEDALMINELFNKSGVDTSFKMFTSLIYGSITLMRGDIAAKLIIRMQEKGYTPTRSLYRNVIQCVCEMESGEKNFFTTLLKFQLSLWEHKVQAYNLFIEGAGFAGKPKLARLVYDMMDRDGITPTVASNILMLQSYLKNEKIADALHFFHDLREQGKTKKRLYQVMIVGLCKANKLDDAMHFLEEMKGEGLQPSIECYEVNIQKLCNEEKYDEAVGLVNEFRKSGRRITAFIGNVLLHNAMKSKGVYEAWTRMRNIEDKIPEMKSLGELIGLFSGRIDMEVELKRLDEVIEKCYPLDMYTYNMLLRMIVMNQAEDAYEMVERIARRGYVPNERTDMILERANRILEERNSRSNLGRNGWNSRQRQLE

SEQ ID NO: 20460 - protein, 864 aa, Arabidopsis thaliana
  peptide (1)..(864): Ceres Seq. ID no. 13648501
  misc_feature (413)..(447): Pfam Name: PPR repeat Pfam Description: PPR repeat
  misc_feature (177)..(832): Homolog of NCBI NO: 37534450 NR Description: unknown protein [Oryza sativa (japonica
  misc_feature (169)..(712): Homolog of NCBI NO: 34910106 NR Description: B1100D10.28 [Oryza sativa (japonica
  misc_feature (126)..(756): Homolog of NCBI NO: 37535672 NR Description: putative chloroplast RNA processing protein
  misc_feature (126)..(756): Homolog of NCBI NO: 37535708 NR Description: putative membrane-associated protein
  misc_feature (335)..(844): Homolog of NCBI NO: 11994279 NR Description: gb|AAD43616.1~gene_id:F16J14.3~strong similarity
  misc_feature (335)..(844): Homolog of NCBI NO: 15228763 NR Description: pentatricopeptide (PPR) repeat-containing protein
  misc_feature (126)..(772): Homolog of NCBI NO: 33859440 NR Description: PPR protein [Oryza sativa (indica
  misc_feature (238)..(844): Homolog of NCBI NO: 37535672 NR Description: putative chloroplast RNA processing protein
  misc_feature (238)..(863): Homolog of NCBI NO: 37535708 NR Description: putative membrane-associated protein
  misc_feature (328)..(831): Homolog of NCBI NO: 34015232 NR Description: putative fertility restorer
MLLRRRILSLSASSFRNFTSGNNGDAIPFSTFTKPSSSIAPGDFLVREWKDWFKHRDVKQSHQLIDRIFDILRAPSNDGDDRAFYLHLSNLRLRLTEKFVLDVLSHTRYDILCCLKFFDWAARQPGFHHTRATFHAIFKILRGAKLVTLMIDFLDRSVGFESCRHSLRLCDALVVGYAVAGRTDIALQHFGNMRFRGLDLDSFGYHVLLNALVEEKCFDSFDVIFDQISVRGFVCAVTHSILVKKFCKQGKLDEAEDYLRALLPNDPAGCGSGLGILVDALCSKRKFQEATKLLDEIKLVGTVNMDRAYNIWIRALIKAGFLNNPADFLQKISPLEGCELEVFRYNSMVFQLLKENNLDGVYDILTEMMVRGVSPNKKTMNAALCFFCKAGFVDEALELYRSRSEIGFAPTAMSYNYLIHTLCANESVEQAYDVLKGAIDRGHFLGGKTFSTLTNALCWKGKPDMARELVIAAAERDLLPKRIAGCKIISALCDVGKVEDALMINELFNKSGVDTSFKMFTSLIYGSITLMRGDIAAKLIIRMQEKGYTPTRSLYRNVIQCVCEMESGEKNFFTTLLKFQLSLWEHKVQAYNLFIEGAGFAGKPKLARLVYDMMDRDGITPTVASNILMLQSYLKNEKIADALHFFHDLREQGKTKKRLYQVMIVGLCKANKLDDAMHFLEEMKGEGLQPSIECYEVNIQKLCNEEKYDEAVGLVNEFRKSGRRITAFIGNVLLHNAMKSKGVYEAWTRMRNIEDKIPEMKSLGELIGLFSGRIDMEVELKRLDEVIEKCYPLDMYTYNMLLRMIVMNQAEDAYEMVERIARRGYVPNERTDMILERANRILEERNSRSNLGRNGWNSRQRQLE

SEQ ID NO: 20461 - protein, 715 aa, Arabidopsis thaliana
  peptide (1)..(715): Ceres Seq. ID no. 13648502
  misc_feature (264)..(298): Pfam Name: PPR repeat Pfam Description: PPR repeat
  misc_feature (28)..(683): Homolog of NCBI NO: 37534450 NR Description: unknown protein [Oryza sativa (japonica
  misc_feature (20)..(563): Homolog of NCBI NO: 34910106 NR Description: B1100D10.28 [Oryza sativa (japonica
  misc_feature (1)..(607): Homolog of NCBI NO: 37535672 NR Description: putative chloroplast RNA processing protein
  misc_feature (1)..(607): Homolog of NCBI NO: 37535708 NR Description: putative membrane-associated protein
  misc_feature (186)..(695): Homolog of NCBI NO: 11994279 NR Description: gb|AAD43616.1~gene_id:F16J14.3~strong similarity
  misc_feature (186)..(695): Homolog of NCBI NO: 15228763 NR Description: pentatricopeptide (PPR) repeat-containing protein
  misc_feature (1)..(623): Homolog of NCBI NO: 33859440 NR Description: PPR protein [Oryza sativa (indica
  misc_feature (89)..(695): Homolog of NCBI NO: 37535672 NR Description: putative chloroplast RNA processing protein
  misc_feature (89)..(714): Homolog of NCBI NO: 37535708 NR Description: putative membrane-associated protein
  misc_feature (179)..(682): Homolog of NCBI NO: 34015232 NR Description: putative fertility restorer
MIDFLDRSVGFESCRHSLRLCDALVVGYAVAGRTDIALQHFGNMRFRGLDLDSFGYHVLLNALVEEKCFDSFDVIFDQISVRGFVCAVTHSILVKKFCKQGKLDEAEDYLRALLPNDPAGCGSGLGILVDALCSKRKFQEATKLLDEIKLVGTVNMDRAYNIWIRALIKAGFLNNPADFLQKISPLEGCELEVFRYNSMVFQLLKENNLDGVYDILTEMMVRGVSPNKKTMNAALCFFCKAGFVDEALELYRSRSEIGFAPTAMSYNYLIHTLCANESVEQAYDVLKGAIDRGHFLGGKTFSTLTNALCWKGKPDMARELVIAAAERDLLPKRIAGCKIISALCDVGKVEDALMINELFNKSGVDTSFKMFTSLIYGSITLMRGDIAAKLIIRMQEKGYTPTRSLYRNVIQCVCEMESGEKNFFTTLLKFQLSLWEHKVQAYNLFIEGAGFAGKPKLARLVYDMMDRDGITPTVASNILMLQSYLKNEKIADALHFFHDLREQGKTKKRLYQVMIVGLCKANKLDDAMHFLEEMKGEGLQPSIECYEVNIQKLCNEEKYDEAVGLVNEFRKSGRRITAFIGNVLLHNAMKSKGVYEAWTRMRNIEDKIPEMKSLGELIGLFSGRIDMEVELKRLDEVIEKCYPLDMYTYNMLLRMIVMNQAEDAYEMVERIARRGYVPNERTDMILERANRILEERNSRSNLGRNGWNSRQRQLE

SEQ ID NO: 20462 - DNA, 1694 bp, Arabidopsis thaliana
  misc_feature (1)..(1694): Ceres Seq. ID no. 14313532
  misc_feature: MA Experiment ID: 20000307 Result: Up-regulated in Transcription
  misc_feature: MA Experiment 20000307 PARAMETER Experiment Name: At_Germinating_Seeds_Sub_P Parameter: Age (hr) Value: 24 vs. 0
  misc_feature: MA Experiment 20000307 PARAMETER Experiment Name: At_Germinating_Seeds_Sub_P Parameter: Organism Value: A. thaliana
  misc_feature: MA Experiment 20000307 PARAMETER Experiment Name: At_Germinating_Seeds_Sub_P Parameter: Plant Line Value: WS
  misc_feature: MA Experiment 20000307 PARAMETER Experiment Name: At_Germinating_Seeds_Sub_P Parameter: Tissue Value: Germinating Seeds
  misc_feature: MA Experiment ID: 20000315 Result: Down-regulated in Transcription
  misc_feature: MA Experiment 20000315 PARAMETER Experiment Name: At_14day_Shoots-Roots_Sub_P Parameter: Age (day) Value: 14
  misc_feature: MA Experiment 20000315 PARAMETER Experiment Name: At_14day_Shoots-Roots_Sub_P Parameter: Organism Value: A. thaliana
  misc_feature: MA Experiment 20000315 PARAMETER Experiment Name: At_14day_Shoots-Roots_Sub_P Parameter: Plant Line Value: WS
  misc_feature: MA Experiment 20000315 PARAMETER Experiment Name: At_14day_Shoots-Roots_Sub_P Parameter: Tissue Value: Shoots vs. Whole Plant
  misc_feature: MA Experiment ID: 20000328 Result: Down-regulated in Transcription
  misc_feature: MA Experiment 20000328 PARAMETER Experiment Name: At_42deg_Heat_Sub_P Parameter: Age (day) Value: 14
  misc_feature: MA Experiment 20000328 PARAMETER Experiment Name: At_42deg_Heat_Sub_P Parameter: Organism Value: A. thaliana
  misc_feature: MA Experiment 20000328 PARAMETER Experiment Name: At_42deg_Heat_Sub_P Parameter: Plant Line Value: WS
  misc_feature: MA Experiment 20000328 PARAMETER Experiment Name: At_42deg_Heat_Sub_P Parameter: Temperature (deg C) Value: 42 vs. 22
  misc_feature: MA Experiment 20000328 PARAMETER Experiment Name: At_42deg_Heat_Sub_P Parameter: Timepoint (hr) Value: 6
  misc_feature: MA Experiment 20000328 PARAMETER Experiment Name: At_42deg_Heat_Sub_P Parameter: Tissue Value: Aerial
  misc_feature: MA Experiment ID: 20000440 Result: Up-regulated in Transcription
  misc_feature: MA Experiment 20000440 PARAMETER Experiment Name: At_Closed-Flower__Sub_P Parameter: Tissue Value: Closed Flower vs. Whole Plant
gcaccaggagctcactaatccccccccccccccccatcgcttcttccgaaagctttcacatttgatatcaaaatcgagaaacaaaaattgaaaacaatctgtttcaccaaaaaaagaacaaaatgcatgggttcgatttcaaagagatccaggagaagatctccgatagctttcgtccatggcaacgctcttttcaattctgggttcgagctactaatatctacacaggctacaaggtgtttcaacttcgagtaagtttagtgaaagatgcaaagaagcaagaggaaatgtgggaaagacaacatgaacaagctgctgataagatttacttcatgtgctctgatcttggtggtttcttccttaagattgctcaacttttagcaaaacctgacatggcaccagctgcgtgggtgaaaaagcttgtcactttgtgtgatcaagctcctgcgacgccgtttgatgcgattcaacttgttctagagaaggagttaggtaaaagcattggtgaaatctttgaaacgtttgatgaaaagcctcttggttctgcttctattgctcaggttcaacatcctggcattgaaagattgatgatgacagacataagaaacttgcaactattcgccttatacatgcagagaacagatatcaaatttgacctgcattccataacaaaggaaatggagaaacagattggttatgaatttgacttcaaaagggaggccaatgcaatggaaagaattcgatgttttctttatgagaacaacaaaaagtctcctgttttggtaccaagagttctgcgagatatggtgactaagagggttttggtgatggaatacattaatggaattccaatcctgagcattggtgatgagatggctaaaagagggataaatcctcatggtaagattgcagaggcagcaaagcacaatatacttaacagtttatcccgtgcgtatggccaaatgatactgaaaagtggtttctttcatgcggatccacatcctggaaatatcttgatttgcaaaggtcaagaggttgcattgctggactatggtcaagtgaaggaactacccaacaagttgagacttggttatgcaaatttggtcattgccatggctgataacaatgcttcacgagtatcacagagcttttgggaaatgggtttacatacagtggccaagtgtgagaatgagcagcaagaacttctgcggttagcacaaacactttttgatacaaagatgcctactggtcagacagttttgcaacctttctcagatgactcttcgattaaaaagatagccgttgagacatttccagaggaactgttctctgtacttcgcactgtggttctgttaagaggactcagtgttgggatgggagttaattattcgtgtgcagaacaatggagagcaatggccgaagaggctttacttgcatctggaagagtgacaagagatggcaaagaaagatctcgtagacgggcttctctacgaaggctacgcacaggaagttaggaaaaagataggagtatttctcatcacttagactctcccatgagcaggatctgagcttttttcatttattgttctttcttttgtgagaatttgaatgataggagaagttggataacacttgaatgtaattggctgatataaaattatgatggaagatttgtaaatcaagatttaattcgc

SEQ ID NO: 20463 - protein, 463 aa, Arabidopsis thaliana
  peptide (1)..(463): Ceres Seq. ID no. 14313533
  misc_feature (121)..(225): Pfam Name: ABC1 family Pfam Description: ABC1 family
  misc_feature (58)..(422): Homolog of NCBI NO: 33241332 NR Description: Predicted protein kinase
  misc_feature (74)..(463): Homolog of NCBI NO: 23128673 NR Description: hypothetical protein [Nostoc punctiforme]
  misc_feature (7)..(221): Homolog of NCBI NO: 34907760 NR Description: ABC transporter-like protein
  misc_feature (82)..(395): Homolog of NCBI NO: 34907760 NR Description: ABC transporter-like protein
  misc_feature (345)..(443): Homolog of NCBI NO: 15234008 NR Description: hypothetical protein [Arabidopsis thaliana]
  misc_feature (1)..(311): Homolog of NCBI NO: 15234008 NR Description: hypothetical protein [Arabidopsis thaliana]
  misc_feature (345)..(447): Homolog of NCBI NO: 9758915 NR Description: contains similarity to ABC
  misc_feature (1)..(311): Homolog of NCBI NO: 9758915 NR Description: contains similarity to ABC
  misc_feature (345)..(463): Homolog of NCBI NO: 30695871 NR Description: expressed protein [Arabidopsis thaliana]
  misc_feature (1)..(311): Homolog of NCBI NO: 30695871 NR Description: expressed protein [Arabidopsis thaliana]
MHGFDFKEIQEKISDSFRPWQRSFQFWVRATNIYTGYKVFQLRVSLVKDAKKQEEMWERQHEQAADKIYFMCSDLGGFFLKIAQLLAKPDMAPAAWVKKLVTLCDQAPATPFDAIQLVLEKELGKSIGEIFETFDEKPLGSASIAQVQHPGIERLMMTDIRNLQLFALYMQRTDIKFDLHSITKEMEKQIGYEFDFKREANAMERIRCFLYENNKKSPVLVPRVLRDMVTKRVLVMEYINGIPILSIGDEMAKRGINPHGKIAEAAKHNILNSLSRAYGQMILKSGFFHADPHPGNILICKGQEVALLDYGQVKELPNKLRLGYANLVIAMADNNASRVSQSFWEMGLHTVAKCENEQQELLRLAQTLFDTKMPTGQTVLQPFSDDSSIKKIAVETFPEELFSVLRTVVLLRGLSVGMGVNYSCAEQWRAMAEEALLASGRVTRDGKERSRRRASLRRLRTGS

SEQ ID NO: 20464 - protein, 408 aa, Arabidopsis thaliana
  peptide (1)..(408): Ceres Seq. ID no. 14313534
  misc_feature (66)..(170): Pfam Name: ABC1 family Pfam Description: ABC1 family
  misc_feature (3)..(367): Homolog of NCBI NO: 33241332 NR Description: Predicted protein kinase
  misc_feature (19)..(408): Homolog of NCBI NO: 23128673 NR Description: hypothetical protein [Nostoc punctiforme]
  misc_feature (1)..(166): Homolog of NCBI NO: 34907760 NR Description: ABC transporter-like protein
  misc_feature (27)..(340): Homolog of NCBI NO: 34907760 NR Description: ABC transporter-like protein
  misc_feature (290)..(388): Homolog of NCBI NO: 15234008 NR Description: hypothetical protein [Arabidopsis thaliana]
  misc_feature (1)..(256): Homolog of NCBI NO: 15234008 NR Description: hypothetical protein [Arabidopsis thaliana]
  misc_feature (290)..(392): Homolog of NCBI NO: 9758915 NR Description: contains similarity to ABC
  misc_feature (1)..(256): Homolog of NCBI NO: 9758915 NR Description: contains similarity to ABC
  misc_feature (290)..(408): Homolog of NCBI NO: 30695871 NR Description: expressed protein [Arabidopsis thaliana]
  misc_feature (1)..(256): Homolog of NCBI NO: 30695871 NR Description: expressed protein [Arabidopsis thaliana]
MWERQHEQAADKIYFMCSDLGGFFLKIAQLLAKPDMAPAAWVKKLVTLCDQAPATPFDAIQLVLEKELGKSIGEIFETFDEKPLGSASIAQVQHPGIERLMMTDIRNLQLFALYMQRTDIKFDLHSITKEMEKQIGYEFDFKREANAMERIRCFLYENNKKSPVLVPRVLRDMVTKRVLVMEYINGIPILSIGDEMAKRGINPHGKIAEAAKHNILNSLSRAYGQMILKSGFFHADPHPGNILICKGQEVALLDYGQVKELPNKLRLGYANLVIAMADNNASRVSQSFWEMGLHTVAKCENEQQELLRLAQTLFDTKMPTGQTVLQPFSDDSSIKKIAVETFPEELFSVLRTVVLLRGLSVGMGVNYSCAEQWRAMAEEALLASGRVTRDGKERSRRRASLRRLRTGS

SEQ ID NO: 20465 - protein, 393 aa, Arabidopsis thaliana
  peptide (1)..(393): Ceres Seq. ID no. 14313535
  misc_feature (51)..(155): Pfam Name: ABC1 family Pfam Description: ABC1 family
  misc_feature (1)..(352): Homolog of NCBI NO: 33241332 NR Description: Predicted protein kinase
  misc_feature (4)..(393): Homolog of NCBI NO: 23128673 NR Description: hypothetical protein [Nostoc punctiforme]
  misc_feature (1)..(151): Homolog of NCBI NO: 34907760 NR Description: ABC transporter-like protein
  misc_feature (12)..(325): Homolog of NCBI NO: 34907760 NR Description: ABC transporter-like protein
  misc_feature (275)..(373): Homolog of NCBI NO: 15234008 NR Description: hypothetical protein [Arabidopsis thaliana]
  misc_feature (1)..(241): Homolog of NCBI NO: 15234008 NR Description: hypothetical protein [Arabidopsis thaliana]
  misc_feature (275)..(377): Homolog of NCBI NO: 9758915 NR Description: contains similarity to ABC
  misc_feature (1)..(241): Homolog of NCBI NO: 9758915 NR Description: contains similarity to ABC
  misc_feature (275)..(393): Homolog of NCBI NO: 30695871 NR Description: expressed protein [Arabidopsis thaliana]
  misc_feature (1)..(241): Homolog of NCBI NO: 30695871 NR Description: expressed protein [Arabidopsis thaliana]
MCSDLGGFFLKIAQLLAKPDMAPAAWVKKLVTLCDQAPATPFDAIQLVLEKELGKSIGEIFETFDEKPLGSASIAQVQHPGIERLMMTDIRNLQLFALYMQRTDIKFDLHSITKEMEKQIGYEFDFKREANAMERIRCFLYENNKKSPVLVPRVLRDMVTKRVLVMEYINGIPILSIGDEMAKRGINPHGKIAEAAKHNILNSLSRAYGQMILKSGFFHADPHPGNILICKGQEVALLDYGQVKELPNKLRLGYANLVIAMADNNASRVSQSFWEMGLHTVAKCENEQQELLRLAQTLFDTKMPTGQTVLQPFSDDSSIKKIAVETFPEELFSVLRTVVLLRGLSVGMGVNYSCAEQWRAMAEEALLASGRVTRDGKERSRRRASLRRLRTGS

SEQ ID NO: 20466 - DNA, 1130 bp, Arabidopsis thaliana
  misc_feature (1)..(1130): Ceres Seq. ID no. 14307589
  misc_feature: MA Experiment ID: 20000314 Result: Up-regulated in Transcription
  misc_feature: MA Experiment 20000314 PARAMETER Experiment Name: At_14day_Shoots-Roots_Sub_P Parameter: Age (day) Value: 14
  misc_feature: MA Experiment 20000314 PARAMETER Experiment Name: At_14day_Shoots-Roots_Sub_P Parameter: Organism Value: A. thaliana
  misc_feature: MA Experiment 20000314 PARAMETER Experiment Name: At_14day_Shoots-Roots_Sub_P Parameter: Plant Line Value: WS
  misc_feature: MA Experiment 20000314 PARAMETER Experiment Name: At_14day_Shoots-Roots_Sub_P Parameter: Tissue Value: Roots vs. Whole Plant
  misc_feature: MA Experiment ID: 20000315 Result: Down-regulated in Transcription
  misc_feature: MA Experiment 20000315 PARAMETER Experiment Name: At_14day_Shoots-Roots_Sub_P Parameter: Age (day) Value: 14
  misc_feature: MA Experiment 20000315 PARAMETER Experiment Name: At_14day_Shoots-Roots_Sub_P Parameter: Organism Value: A. thaliana
  misc_feature: MA Experiment 20000315 PARAMETER Experiment Name: At_14day_Shoots-Roots_Sub_P Parameter: Plant Line Value: WS
  misc_feature: MA Experiment 20000315 PARAMETER Experiment Name: At_14day_Shoots-Roots_Sub_P Parameter: Tissue Value: Shoots vs. Whole Plant
  misc_feature: MA Experiment ID: 20000327 Result: Down-regulated in Transcription
  misc_feature: MA Experiment 20000327 PARAMETER Experiment Name: At_42deg_Heat_Sub_P Parameter: Age (day) Value: 14
  misc_feature: MA Experiment 20000327 PARAMETER Experiment Name: At_42deg_Heat_Sub_P Parameter: Organism Value: A. thaliana
  misc_feature: MA Experiment 20000327 PARAMETER Experiment Name: At_42deg_Heat_Sub_P Parameter: Plant Line Value: WS
  misc_feature: MA Experiment 20000327 PARAMETER Experiment Name: At_42deg_Heat_Sub_P Parameter: Temperature (deg C) Value: 42 vs. 22
  misc_feature: MA Experiment 20000327 PARAMETER Experiment Name: At_42deg_Heat_Sub_P Parameter: Timepoint (hr) Value: 1
  misc_feature: MA Experiment 20000327 PARAMETER Experiment Name: At_42deg_Heat_Sub_P Parameter: Tissue Value: Aerial
  misc_feature: MA Experiment ID: 20000328 Result: Down-regulated in Transcription
  misc_feature: MA Experiment 20000328 PARAMETER Experiment Name: At_42deg_Heat_Sub_P Parameter: Age (day) Value: 14
  misc_feature: MA Experiment 20000328 PARAMETER Experiment Name: At_42deg_Heat_Sub_P Parameter: Organism Value: A. thaliana
  misc_feature: MA Experiment 20000328 PARAMETER Experiment Name: At_42deg_Heat_Sub_P Parameter: Plant Line Value: WS
  misc_feature: MA Experiment 20000328 PARAMETER Experiment Name: At_42deg_Heat_Sub_P Parameter: Temperature (deg C) Value: 42 vs. 22
  misc_feature: MA Experiment 20000328 PARAMETER Experiment Name: At_42deg_Heat_Sub_P Parameter: Timepoint (hr) Value: 6
  misc_feature: MA Experiment 20000328 PARAMETER Experiment Name: At_42deg_Heat_Sub_P Parameter: Tissue Value: Aerial
  misc_feature: MA Experiment ID: 20000348 Result: Down-regulated in Transcription
  misc_feature: MA Experiment 20000348 PARAMETER Experiment Name: At_100uM_ABA_Sub_P Parameter: Age (day) Value: 14
  misc_feature: MA Experiment 20000348 PARAMETER Experiment Name: At_100uM_ABA_Sub_P Parameter: Organism Value: A. thaliana
  misc_feature: MA Experiment 20000348 PARAMETER Experiment Name: At_100uM_ABA_Sub_P Parameter: Plant Line Value: WS
  misc_feature: MA Experiment 20000348 PARAMETER Experiment Name: At_100uM_ABA_Sub_P Parameter: Timepoint (hr) Value: 1
  misc_feature: MA Experiment 20000348 PARAMETER Experiment Name: At_100uM_ABA_Sub_P Parameter: Tissue Value: Aerial
  misc_feature: MA Experiment 20000348 PARAMETER Experiment Name: At_100uM_ABA_Sub_P Parameter: Treatment Value: 100uM ABA vs. No Treatment
  misc_feature: MA Experiment ID: 20000355 Result: Down-regulated in Transcription
  misc_feature: MA Experiment 20000355 PARAMETER Experiment Name: At_Siliques_Sub_P Parameter: Age (day) Value: 21
  misc_feature: MA Experiment 20000355 PARAMETER Experiment Name: At_Siliques_Sub_P Parameter: Organism Value: A. thaliana
  misc_feature: MA Experiment 20000355 PARAMETER Experiment Name: At_Siliques_Sub_P Parameter: Plant Line Value: WS
  misc_feature: MA Experiment 20000355 PARAMETER Experiment Name: At_Siliques_Sub_P Parameter: Tissue Value: Less Than 5mm Siliques vs. Whole Plant
  misc_feature: MA Experiment ID: 20000440 Result: Down-regulated in Transcription
  misc_feature: MA Experiment 20000440 PARAMETER Experiment Name: At_Closed-Flower__Sub_P Parameter: Tissue Value: Closed Flower vs. Whole Plant
gaaaccagttgagaagtaaaattttctattgcagagagaaagagagttagagaaagagagagagagatgaaacttgtgcaagaagaataccgtaaaggaccgtggacagaacaggaggacatcctcttggtcaactttgtccacttgttcggagatcgaagatgggattttgtagcgaaagtttcaggtttgaaggtggagggagaaacataagaataggtataggtttgttttggaaaaatgggcggtctttggaaaggaccttccatttaaagaaatgacctggttttggttgtaggtttaaacagaacaggaaagagttgcaggttaaggtgggttaattacctgcatcctggtctcaaacgtggtaagatgactccacaagaagagcgtttagtccttgagcttcacgccaaatggggaaacaggtggtcaaaaattgcccggaaattaccggggagaacagataatgagataaagaactactggaggactcatatgaggaagaaggctcaagagaagaagcgacctatgtctcctacttcctcatcttcaaactgttgctcatcatctatgaccactactactactcaagacactggaggctccaacgggaaaatgaatcaagaaggcgaagacgggtactactccatggatgacatatggagagagattgatcagtctggagcaaacgttattaagccggtaaaagacaactactactcagagcaaagttgttacttgaatttccctcctctgggttgtccaacatgggaaagttccttggagtctatatggaacatggatgcagatgaaagtaagatgtcttcttttgctattgatcagtttcctctaagttttgaacatggtagtggtcgcctttagtctaggatttgattcatttggaatgtttatatgtgcagcatatatatgttatcaaacgacgactgtagtagtttcctatgacttacatcaaaaaacaccacccactgtactaatctcataagtagtcatcatcctatgcctttgtttagtttgtagagtgagtgaaaagatgtgtaatacaagtcagaactctaattccaaaataaatagacttttgaagcttctgtgaaagtttgtaagaaacc

SEQ ID NO: 20467 - protein, 170 aa, Arabidopsis thaliana
  peptide (1)..(170): Ceres Seq. ID no. 14307590
  misc_feature (1)..(43): Pfam Name: Myb-like DNA-binding domain Pfam Description: Myb-like DNA-binding domain
  misc_feature (1)..(108): Homolog of NCBI NO: 15231343 NR Description: Myb family transcription factor [Arabidopsis
  misc_feature (1)..(170): Homolog of NCBI NO: 30697275 NR Description: myb family transcription factor [Arabidopsis
  misc_feature (1)..(170): Homolog of NCBI NO: 30697277 NR Description: myb family transcription factor [Arabidopsis
  misc_feature (1)..(148): Homolog of NCBI NO: 15230123 NR Description: myb family transcription factor [Arabidopsis
  misc_feature (1)..(86): Homolog of NCBI NO: 11967859 NR Description: Myb factor protein [Oryza sativa (japonica
  misc_feature (1)..(86): Homolog of NCBI NO: 34906070 NR Description: putative Myb factor protein
  misc_feature (57)..(165): Homolog of NCBI NO: 15231343 NR Description: Myb family transcription factor [Arabidopsis
  misc_feature (1)..(49): Homolog of NCBI NO: 18395645 NR Description: myb family transcription factor(MYB116)
  misc_feature (1)..(170): Homolog of NCBI NO: 11358547 NR Description: myb-related transcription factor MYB59
  misc_feature (1)..(170): Homolog of NCBI NO: 15238519 NR Description: myb family transcription factor [Arabidopsis
MTPQEERLVLELHAKWGNRWSKIARKLPGRTDNEIKNYWRTHMRKKAQEKKRPMSPTSSSSNCCSSSMTTTTTQDTGGSNGKMNQEGEDGYYSMDDIWREIDQSGANVIKPVKDNYYSEQSCYLNFPPLGCPTWESSLESIWNMDADESKMSSFAIDQFPLSFEHGSGRL

SEQ ID NO: 20468 - protein, 128 aa, Arabidopsis thaliana
  peptide (1)..(128): Ceres Seq. ID no. 14307591
  misc_feature (1)..(56): Homolog of NCBI NO: 13537530 NR Description: LhMyb [Lilium hybrid division I]
  misc_feature (1)..(106): Homolog of NCBI NO: 15230123 NR Description: myb family transcription factor [Arabidopsis
  misc_feature (15)..(123): Homolog of NCBI NO: 15231343 NR Description: Myb family transcription factor [Arabidopsis
  misc_feature (1)..(44): Homolog of NCBI NO: 11967859 NR Description: Myb factor protein [Oryza sativa (japonica
  misc_feature (1)..(44): Homolog of NCBI NO: 34906070 NR Description: putative Myb factor protein
  misc_feature (1)..(66): Homolog of NCBI NO: 15231343 NR Description: Myb family transcription factor [Arabidopsis
  misc_feature (1)..(128): Homolog of NCBI NO: 30697275 NR Description: myb family transcription factor [Arabidopsis
  misc_feature (1)..(128): Homolog of NCBI NO: 30697277 NR Description: myb family transcription factor [Arabidopsis
  misc_feature (1)..(128): Homolog of NCBI NO: 11358547 NR Description: myb-related transcription factor MYB59
  misc_feature (1)..(128): Homolog of NCBI NO: 15238519 NR Description: myb family transcription factor [Arabidopsis
MRKKAQEKKRPMSPTSSSSNCCSSSMTTTTTQDTGGSNGKMNQEGEDGYYSMDDIWREIDQSGANVIKPVKDNYYSEQSCYLNFPPLGCPTWESSLESIWNMDADESKMSSFAIDQFPLSFEHGSGRL

SEQ ID NO: 20469 - protein, 117 aa, Arabidopsis thaliana
  peptide (1)..(117): Ceres Seq. ID no. 14307592
  misc_feature (1)..(45): Homolog of NCBI NO: 13537530 NR Description: LhMyb [Lilium hybrid division I]
  misc_feature (1)..(95): Homolog of NCBI NO: 15230123 NR Description: myb family transcription factor [Arabidopsis
  misc_feature (4)..(112): Homolog of NCBI NO: 15231343 NR Description: Myb family transcription factor [Arabidopsis
  misc_feature (1)..(33): Homolog of NCBI NO: 11967859 NR Description: Myb factor protein [Oryza sativa (japonica
  misc_feature (1)..(33): Homolog of NCBI NO: 34906070 NR Description: putative Myb factor protein
  misc_feature (1)..(55): Homolog of NCBI NO: 15231343 NR Description: Myb family transcription factor [Arabidopsis
  misc_feature (1)..(117): Homolog of NCBI NO: 30697275 NR Description: myb family transcription factor [Arabidopsis
  misc_feature (1)..(117): Homolog of NCBI NO: 30697277 NR Description: myb family transcription factor [Arabidopsis
  misc_feature (1)..(117): Homolog of NCBI NO: 11358547 NR Description: myb-related transcription factor MYB59
  misc_feature (1)..(117): Homolog of NCBI NO: 15238519 NR Description: myb family transcription factor [Arabidopsis
MSPTSSSSNCCSSSMTTTTTQDTGGSNGKMNQEGEDGYYSMDDIWREIDQSGANVIKPVKDNYYSEQSCYLNFPPLGCPTWESSLESIWNMDADESKMSSFAIDQFPLSFEHGSGRL

SEQ ID NO: 20470 - DNA, 823 bp, Arabidopsis thaliana
  misc_feature (1)..(823): Ceres Seq. ID no. 12466413
  misc_feature: MA Experiment ID: 108434 Result: Up-regulated in Transcription
  misc_feature: MA Experiment 108434 PARAMETER Experiment Name: At_Root_Tips_cDNA_P Parameter: Tissue Value: Root Tips
  misc_feature: MA Experiment ID: 20000227 Result: Up-regulated in Transcription
  misc_feature: MA Experiment 20000227 PARAMETER Experiment Name: At_Root-Tips-vs-Tops_P Parameter: Tissue Value: Root Tips vs. Root Tops
  misc_feature: MA Experiment ID: 20001557 Result: Down-regulated in Transcription
  misc_feature: MA Experiment 20001557 PARAMETER Experiment Name: At_Drought_Soil_Dry_P Parameter: Age (day) Value: 27
  misc_feature: MA Experiment 20001557 PARAMETER Experiment Name: At_Drought_Soil_Dry_P Parameter: Organism Value: A. thaliana
  misc_feature: MA Experiment 20001557 PARAMETER Experiment Name: At_Drought_Soil_Dry_P Parameter: Plant Line Value: WS
  misc_feature: MA Experiment 20001557 PARAMETER Experiment Name: At_Drought_Soil_Dry_P Parameter: Post Timepoint (hr) Value: 3
  misc_feature: MA Experiment 20001557 PARAMETER Experiment Name: At_Drought_Soil_Dry_P Parameter: Post-Treatment Value: Re-Water vs. No Drought
  misc_feature: MA Experiment 20001557 PARAMETER Experiment Name: At_Drought_Soil_Dry_P Parameter: Timepoint (day) Value: 13
  misc_feature: MA Experiment 20001557 PARAMETER Experiment Name: At_Drought_Soil_Dry_P Parameter: Treatment Value: Drought vs. No Drought
  misc_feature: MA Experiment ID: 20001905 Result: Down-regulated in Transcription
  misc_feature: MA Experiment 20001905 PARAMETER Experiment Name: At_Drought_Reproduction_P Parameter: Age (day) Value: 40
  misc_feature: MA Experiment 20001905 PARAMETER Experiment Name: At_Drought_Reproduction_P Parameter: Organism Value: A. thaliana
  misc_feature: MA Experiment 20001905 PARAMETER Experiment Name: At_Drought_Reproduction_P Parameter: Plant Line Value: WS
  misc_feature: MA Experiment 20001905 PARAMETER Experiment Name: At_Drought_Reproduction_P Parameter: Timepoint (day) Value: 10
  misc_feature: MA Experiment 20001905 PARAMETER Experiment Name: At_Drought_Reproduction_P Parameter: Tissue Value: Rosettes
  misc_feature: MA Experiment 20001905 PARAMETER Experiment Name: At_Drought_Reproduction_P Parameter: Treatment Value: Drought vs. No Drought
actcaaaagtgtgtgtgtgtcaaaatctctagcaccgatttttctaaataacgtcgtctcacagtcacacacacacagctctaaaatccctctacgaggtttttcttcaaactcgccgaaaaatctaatctttacgaagacccagatcggcggatctagagttgaaatggcgagacacacggcggcgctgaagatcgggctagctttactggggctgagcatggctggttacattcttggtccgcctctctactggcatctcactgaggctttggccgccgtttccgcctcctcttgtccttcttgcccctgtgaatgctctacctattccgctgtcaccattcccaaagagctcagtaatgcttcttttgctgattgtgcaaagcacgatccagaggtgaacgaagacactgagaagaactatgctgaacttcttaccgaggaactgaagctgcgtgaagcagaatctttagagaaacacaaacgagcagacatggggctattggaggccaagaaggtaacttcttcataccaaaaggaagcagataagtgcaactcgggtatggaaacatgcgaagaagctcgagaaaaagcagaattagcactcgccgagcagaaaaagctaacatctaggtgggaagagagagctcgccaaaaaggatggagagaaggttccaccaagccaaatgttaaatccaaaagcaatgttcaggttgcttaggatacccaaggatcagcaaaaagatcttagttacaaaccactcgtgtaattgtttgtgaattggatgctaacaatatagtgtcaactattattatactttcc

SEQ ID NO: 20471 - protein, 239 aa, Arabidopsis thaliana
  peptide (1)..(239): Ceres Seq. ID no. 12466414
  misc_feature (56)..(224): Homolog of NCBI NO: 18400504 NR Description: expressed protein
  misc_feature (67)..(224): Homolog of NCBI NO: 25407700 NR Description: hypothetical protein AT4g30990 [imported] -
  misc_feature (67)..(224): Homolog of NCBI NO: 18417716 NR Description: Expressed protein
  misc_feature (67)..(229): Homolog of NCBI NO: 34897026 NR Description: unknown protein [Oryza sativa (japonica
  misc_feature (63)..(237): Homolog of NCBI NO: 27922919 NR Description: unknown protein [Phytophthora sojae]
  misc_feature (56)..(239): Homolog of NCBI NO: 7487433 NR Description: hypothetical protein At2g32580 [imported] -
  misc_feature (56)..(239): Homolog of NCBI NO: 21553781 NR Description: unknown [Arabidopsis thaliana]
  misc_feature (56)..(239): Homolog of NCBI NO: 18403016 NR Description: expressed protein
  misc_feature (56)..(239): Homolog of NCBI NO: 25364108 NR Description: hypothetical protein [imported] - Arabidopsis
  misc_feature (56)..(239): Homolog of NCBI NO: 18390477 NR Description: expressed protein
LKSVCVSKSLAPIFLNNVVSQSHTHSSKIPLRGFSSNSPKNLIFTKTQIGGSRVEMARHTAALKIGLALLGLSMAGYILGPPLYWHLTEALAAVSASSCPSCPCECSTYSAVTIPKELSNASFADCAKHDPEVNEDTEKNYAELLTEELKLREAESLEKHKRADMGLLEAKKVTSSYQKEADKCNSGMETCEEAREKAELALAEQKKLTSRWEERARQKGWREGSTKPNVKSKSNVQVA

SEQ ID NO: 20472 - protein, 184 aa, Arabidopsis thaliana
  peptide (1)..(184): Ceres Seq. ID no. 12466415
  misc_feature (1)..(169): Homolog of NCBI NO: 18400504 NR Description: expressed protein
  misc_feature (12)..(169): Homolog of NCBI NO: 25407700 NR Description: hypothetical protein AT4g30990 [imported] -
  misc_feature (12)..(169): Homolog of NCBI NO: 18417716 NR Description: Expressed protein
  misc_feature (12)..(174): Homolog of NCBI NO: 34897026 NR Description: unknown protein [Oryza sativa (japonica
  misc_feature (8)..(182): Homolog of NCBI NO: 27922919 NR Description: unknown protein [Phytophthora sojae]
  misc_feature (1)..(184): Homolog of NCBI NO: 7487433 NR Description: hypothetical protein At2g32580 [imported] -
  misc_feature (1)..(184): Homolog of NCBI NO: 21553781 NR Description: unknown [Arabidopsis thaliana]
  misc_feature (1)..(184): Homolog of NCBI NO: 18403016 NR Description: expressed protein
  misc_feature (1)..(184): Homolog of NCBI NO: 25364108 NR Description: hypothetical protein [imported] - Arabidopsis
  misc_feature (1)..(184): Homolog of NCBI NO: 18390477 NR Description: expressed protein
MARHTAALKIGLALLGLSMAGYILGPPLYWHLTEALAAVSASSCPSCPCECSTYSAVTIPKELSNASFADCAKHDPEVNEDTEKNYAELLTEELKLREAESLEKHKRADMGLLEAKKVTSSYQKEADKCNSGMETCEEAREKAELALAEQKKLTSRWEERARQKGWREGSTKPNVKSKSNVQVA

SEQ ID NO: 20473 - protein, 166 aa, Arabidopsis thaliana
  peptide (1)..(166): Ceres Seq. ID no. 12466416
  misc_feature (1)..(151): Homolog of NCBI NO: 18400504 NR Description: expressed protein
  misc_feature (1)..(151): Homolog of NCBI NO: 25407700 NR Description: hypothetical protein AT4g30990 [imported] -
  misc_feature (1)..(151): Homolog of NCBI NO: 18417716 NR Description: Expressed protein
  misc_feature (1)..(156): Homolog of NCBI NO: 34897026 NR Description: unknown protein [Oryza sativa (japonica
  misc_feature (1)..(164): Homolog of NCBI NO: 27922919 NR Description: unknown protein [Phytophthora sojae]
  misc_feature (1)..(166): Homolog of NCBI NO: 7487433 NR Description: hypothetical protein At2g32580 [imported] -
  misc_feature (1)..(166): Homolog of NCBI NO: 21553781 NR Description: unknown [Arabidopsis thaliana]
  misc_feature (1)..(166): Homolog of NCBI NO: 18403016 NR Description: expressed protein
  misc_feature (1)..(166): Homolog of NCBI NO: 25364108 NR Description: hypothetical protein [imported] - Arabidopsis
  misc_feature (1)..(166): Homolog of NCBI NO: 18390477 NR Description: expressed protein
MAGYILGPPLYWHLTEALAAVSASSCPSCPCECSTYSAVTIPKELSNASFADCAKHDPEVNEDTEKNYAELLTEELKLREAESLEKHKRADMGLLEAKKVTSSYQKEADKCNSGMETCEEAREKAELALAEQKKLTSRWEERARQKGWREGSTKPNVKSKSNVQVA

SEQ ID NO: 20474 - DNA, 935 bp, Arabidopsis thaliana
  misc_feature (1)..(935): Ceres Seq. ID no. 13593310
  misc_feature (828)..(828): n is a, c, t, g, unknown, or other
aatttcattttcaatgttaccaacacgagctcagattttcatacaccaatttttctatatgcatcgttatacacagaagcagtcgcggatctcaatttcaggtgtttgcgattccgatttaggtttgatcggttgaaattttttccgatggtggatcattaccaagttctaggcgttacgagaaacgcgacgaagaaggaggttaaagatgcgtttaggagattggcgattaagtatcatccggataagcacgctcagtctccggagcatgttcgtcataacgccaccgtgcggtttaagcttgtatcggaggcgtacgaagttttgaatgatgatctgaaacgcgcgtcttataacgctggtagcgattctgattgctttcgccgtacgagcggttcgtatagtaatccgtatggaaatcgtggtggcagagcgcaaggttctggttacggttatggttatggttactctacgaggaatcgtcaggcctctagcttcagcagcgggtttgattcgacgtttcgttatttgactacgcgagcgtttctattgaatctcgcattagctggtggtctgtactttgcgtttactgcgattgatacaagcggagaaacactatggaaaatgcgtaactcaggggtgagtatcatattttccatcaatgatcgtgttaagctattggctgtgttgataatttgcattcttgcctttttttatcctgtgatatacatacattggtgtttttaactggggtttttttcctgttgatggatgcattttagtgtatgagttctcaaatttatcaaattgaacttcttgtgaactaanaaaaaaaaaaaaaaaaaaaaaaaaaaaaaaaaaaaaaaaaaaaaaaaaaaaaaaaaaaaaaaaaaaaaaaggtttttcgatcccgccaacctcgagggggggcccgg

SEQ ID NO: 20475 - protein, 248 aa, Arabidopsis thaliana
  peptide (1)..(248): Ceres Seq. ID no. 13593311
  misc_feature (52)..(122): Pfam Name: DnaJ domain Pfam Description: DnaJ domain
  misc_feature (52)..(139): Homolog of NCBI NO: 22972332 NR Description: hypothetical protein [Chloroflexus aurantiacus]
  misc_feature (8)..(123): Homolog of NCBI NO: 40215983 NR Description: GM02532p [Drosophila melanogaster]
  misc_feature (52)..(123): Homolog of NCBI NO: 3033531 NR Description: tetratricopeptide repeat protein [Drosophila
  misc_feature (50)..(138): Homolog of NCBI NO: 38566154 NR Description: DnaJ homolog subfamily B member 6 [Silurana
  misc_feature (52)..(170): Homolog of NCBI NO: 23474964 NR Description: hypothetical protein [Desulfovibrio desulfuricans
  misc_feature (52)..(178): Homolog of NCBI NO: 18858081 NR Description: CG2887-PA [Drosophila melanogaster]
  misc_feature (50)..(138): Homolog of NCBI NO: 23503241 NR Description: DnaJ homolog, subfamily B, member 8 [Homo
  misc_feature (50)..(215): Homolog of NCBI NO: 30102570 NR Description: At2g41000 [Arabidopsis thaliana]
  misc_feature (24)..(214): Homolog of NCBI NO: 7487626 NR Description: probable DnaJ protein [imported] - Arabidopsis
  misc_feature (24)..(215): Homolog of NCBI NO: 30688494 NR Description: DnaJ protein family [Arabidopsis thaliana]
NFIFNVTNTSSDFHTPIFLYASLYTEAVADLNFRCLRFRFRFDRLKFFPMVDHYQVLGVTRNATKKEVKDAFRRLAIKYHPDKHAQSPEHVRHNATVRFKLVSEAYEVLNDDLKRASYNAGSDSDCFRRTSGSYSNPYGNRGGRAQGSGYGYGYGYSTRNRQASSFSSGFDSTFRYLTTRAFLLNLALAGGLYFAFTAIDTSGETLWKMRNSGVSIIFSINDRVKLLAVLIICILAFFYPVIYIHWCF

SEQ ID NO: 20476 - protein, 199 aa, Arabidopsis thaliana
  peptide (1)..(199): Ceres Seq. ID no. 13593312
  misc_feature (3)..(73): Pfam Name: DnaJ domain Pfam Description: DnaJ domain
  misc_feature (3)..(90): Homolog of NCBI NO: 22972332 NR Description: hypothetical protein [Chloroflexus aurantiacus]
  misc_feature (1)..(74): Homolog of NCBI NO: 40215983 NR Description: GM02532p [Drosophila melanogaster]
  misc_feature (3)..(74): Homolog of NCBI NO: 3033531 NR Description: tetratricopeptide repeat protein [Drosophila
  misc_feature (1)..(89): Homolog of NCBI NO: 38566154 NR Description: DnaJ homolog subfamily B member 6 [Silurana
  misc_feature (3)..(121): Homolog of NCBI NO: 23474964 NR Description: hypothetical protein [Desulfovibrio desulfuricans
  misc_feature (3)..(129): Homolog of NCBI NO: 18858081 NR Description: CG2887-PA [Drosophila melanogaster]
  misc_feature (1)..(89): Homolog of NCBI NO: 23503241 NR Description: DnaJ homolog, subfamily B, member 8 [Homo
  misc_feature (1)..(166): Homolog of NCBI NO: 30102570 NR Description: At2g41000 [Arabidopsis thaliana]
  misc_feature (1)..(165): Homolog of NCBI NO: 7487626 NR Description: probable DnaJ protein [imported] - Arabidopsis
  misc_feature (1)..(166): Homolog of NCBI NO: 30688494 NR Description: DnaJ protein family [Arabidopsis thaliana]
MVDHYQVLGVTRNATKKEVKDAFRRLAIKYHPDKHAQSPEHVRHNATVRFKLVSEAYEVLNDDLKRASYNAGSDSDCFRRTSGSYSNPYGNRGGRAQGSGYGYGYGYSTRNRQASSFSSGFDSTFRYLTTRAFLLNLALAGGLYFAFTAIDTSGETLWKMRNSGVSIIFSINDRVKLLAVLIICILAFFYPVIYIHWCF

SEQ ID NO: 20477 - DNA, 1002 bp, Arabidopsis thaliana
  misc_feature (1)..(1002): Ceres Seq. ID no. 12333459
  misc_feature: MA Experiment ID: 108434 Result: Up-regulated in Transcription
  misc_feature: MA Experiment 108434 PARAMETER Experiment Name: At_Root_Tips_cDNA_P Parameter: Tissue Value: Root Tips
  misc_feature: MA Experiment ID: 108435 Result: Up-regulated in Transcription
  misc_feature: MA Experiment 108435 PARAMETER Experiment Name: At_stm_Mutants_cDNA_P Parameter: Plant Line Value: wt Landsburg vs stm
  misc_feature: MA Experiment 108435 PARAMETER Experiment Name: At_stm_Mutants_cDNA_P Parameter: Tissue Value: Shoot Apical Meristem Region
  misc_feature: MA Experiment ID: 108462 Result: Down-regulated in Transcription
  misc_feature: MA Experiment 108462 PARAMETER Experiment Name: At_Germinating_Seeds_cDNA_P Parameter: Age (day) Value: 2 vs. 0
  misc_feature: MA Experiment 108462 PARAMETER Experiment Name: At_Germinating_Seeds_cDNA_P Parameter: Tissue Value: Germinating Seeds
  misc_feature: MA Experiment ID: 108463 Result: Down-regulated in Transcription
  misc_feature: MA Experiment 108463 PARAMETER Experiment Name: At_Germinating_Seeds_cDNA_P Parameter: Age (day) Value: 3 vs. 0
  misc_feature: MA Experiment 108463 PARAMETER Experiment Name: At_Germinating_Seeds_cDNA_P Parameter: Tissue Value: Germinating Seeds
  misc_feature: MA Experiment ID: 108464 Result: Down-regulated in Transcription
  misc_feature: MA Experiment 108464 PARAMETER Experiment Name: At_Germinating_Seeds_cDNA_P Parameter: Age (day) Value: 4 vs. 0
  misc_feature: MA Experiment 108464 PARAMETER Experiment Name: At_Germinating_Seeds_cDNA_P Parameter: Tissue Value: Germinating Seeds
  misc_feature: MA Experiment ID: 108489 Result: Up-regulated in Transcription
  misc_feature: MA Experiment ID: 108572 Result: Down-regulated in Transcription
  misc_feature: MA Experiment 108572 PARAMETER Experiment Name: At_Drought_cDNA_P Parameter: Timepoint (hr) Value: 1
  misc_feature: MA Experiment 108572 PARAMETER Experiment Name: At_Drought_cDNA_P Parameter: Tissue Value: Aerial
  misc_feature: MA Experiment 108572 PARAMETER Experiment Name: At_Drought_cDNA_P Parameter: Treatment Value: Drought vs. No Drought
  misc_feature: MA Experiment ID: 108573 Result: Down-regulated in Transcription
  misc_feature: MA Experiment 108573 PARAMETER Experiment Name: At_Drought_cDNA_P Parameter: Timepoint (hr) Value: 6
  misc_feature: MA Experiment 108573 PARAMETER Experiment Name: At_Drought_cDNA_P Parameter: Tissue Value: Aerial
  misc_feature: MA Experiment 108573 PARAMETER Experiment Name: At_Drought_cDNA_P Parameter: Treatment Value: Drought vs. No Drought
  misc_feature: MA Experiment ID: 108585 Result: Down-regulated in Transcription
  misc_feature: MA Experiment 108585 PARAMETER Experiment Name: At_5mM_NaNP_cDNA_P Parameter: Timepoint (hr) Value: 6
  misc_feature: MA Experiment 108585 PARAMETER Experiment Name: At_5mM_NaNP_cDNA_P Parameter: Tissue Value: Aerial
  misc_feature: MA Experiment 108585 PARAMETER Experiment Name: At_5mM_NaNP_cDNA_P Parameter: Treatment Value: null
  misc_feature: MA Experiment ID: 108609 Result: Down-regulated in Transcription
  misc_feature: MA Experiment 108609 PARAMETER Experiment Name: At_100uM_ABA_cDNA_P Parameter: Timepoint (hr) Value: 24
  misc_feature: MA Experiment 108609 PARAMETER Experiment Name: At_100uM_ABA_cDNA_P Parameter: Tissue Value: Aerial
  misc_feature: MA Experiment 108609 PARAMETER Experiment Name: At_100uM_ABA_cDNA_P Parameter: Treatment Value: 100uM ABA vs. No Treatment
  misc_feature: MA Experiment ID: 20000089 Result: Up-regulated in Transcription
  misc_feature: MA Experiment ID: 20000180 Result: Down-regulated in Transcription
  misc_feature: MA Experiment 20000180 PARAMETER Experiment Name: At_Germinating_Seeds_P Parameter: Age (hr) Value: 24 vs. 0
  misc_feature: MA Experiment 20000180 PARAMETER Experiment Name: At_Germinating_Seeds_P Parameter: Tissue Value: Germinating Seeds
  misc_feature: MA Experiment ID: 20000227 Result: Up-regulated in Transcription
  misc_feature: MA Experiment 20000227 PARAMETER Experiment Name: At_Root-Tips-vs-Tops_P Parameter: Tissue Value: Root Tips vs. Root Tops
  misc_feature: MA Experiment ID: 20000234 Result: Up-regulated in Transcription
  misc_feature: MA Experiment 20000234 PARAMETER Experiment Name: At_Siliques_P Parameter: Age (day) Value: 21
  misc_feature: MA Experiment 20000234 PARAMETER Experiment Name: At_Siliques_P Parameter: Organism Value: A. thaliana
  misc_feature: MA Experiment 20000234 PARAMETER Experiment Name: At_Siliques_P Parameter: Plant Line Value: WS
  misc_feature: MA Experiment 20000234 PARAMETER Experiment Name: At_Siliques_P Parameter: Tissue Value: Less Than 5mm Siliques vs. Whole Plant
  misc_feature: MA Experiment ID: 20000264 Result: Up-regulated in Transcription
  misc_feature: MA Experiment 20000264 PARAMETER Experiment Name: At_Open_Flower_P Parameter: Age (day) Value: 21
  misc_feature: MA Experiment 20000264 PARAMETER Experiment Name: At_Open_Flower_P Parameter: Plant Line Value: WS
  misc_feature: MA Experiment 20000264 PARAMETER Experiment Name: At_Open_Flower_P Parameter: Tissue Value: Open Flower vs. Whole Plant
  misc_feature: MA Experiment ID: 20000436 Result: Down-regulated in Transcription
  misc_feature: MA Experiment 20000436 PARAMETER Experiment Name: At_Drought_P Parameter: Age (day) Value: 7
  misc_feature: MA Experiment 20000436 PARAMETER Experiment Name: At_Drought_P Parameter: Organism Value: A. thaliana
  misc_feature: MA Experiment 20000436 PARAMETER Experiment Name: At_Drought_P Parameter: Plant Line Value: WS
  misc_feature: MA Experiment 20000436 PARAMETER Experiment Name: At_Drought_P Parameter: Timepoint (hr) Value: 12
  misc_feature: MA Experiment 20000436 PARAMETER Experiment Name: At_Drought_P Parameter: Tissue Value: Whole Plant
  misc_feature: MA Experiment 20000436 PARAMETER Experiment Name: At_Drought_P Parameter: Treatment Value: Drought vs. No Drought
  misc_feature: MA Experiment ID: 20000437 Result: Down-regulated in Transcription
  misc_feature: MA Experiment 20000437 PARAMETER Experiment Name: At_Drought_P Parameter: Age (day) Value: 8
  misc_feature: MA Experiment 20000437 PARAMETER Experiment Name: At_Drought_P Parameter: Organism Value: A. thaliana
  misc_feature: MA Experiment 20000437 PARAMETER Experiment Name: At_Drought_P Parameter: Plant Line Value: WS
  misc_feature: MA Experiment 20000437 PARAMETER Experiment Name: At_Drought_P Parameter: Timepoint (hr) Value: 24
  misc_feature: MA Experiment 20000437 PARAMETER Experiment Name: At_Drought_P Parameter: Tissue Value: Whole Plant
  misc_feature: MA Experiment 20000437 PARAMETER Experiment Name: At_Drought_P Parameter: Treatment Value: Drought vs. No Drought
  misc_feature: MA Experiment ID: 20000453 Result: Down-regulated in Transcription
  misc_feature: MA Experiment 20000453 PARAMETER Experiment Name: At_100uM_ABA_P Parameter: Age (day) Value: 15
  misc_feature: MA Experiment 20000453 PARAMETER Experiment Name: At_100uM_ABA_P Parameter: Organism Value: A. thaliana
  misc_feature: MA Experiment 20000453 PARAMETER Experiment Name: At_100uM_ABA_P Parameter: Plant Line Value: WS
  misc_feature: MA Experiment 20000453 PARAMETER Experiment Name: At_100uM_ABA_P Parameter: Timepoint (hr) Value: 24
  misc_feature: MA Experiment 20000453 PARAMETER Experiment Name: At_100uM_ABA_P Parameter: Tissue Value: Aerial
  misc_feature: MA Experiment 20000453 PARAMETER Experiment Name: At_100uM_ABA_P Parameter: Treatment Value: 100uM ABA vs. No Treatment
  misc_feature: MA Experiment ID: 20000456 Result: Up-regulated in Transcription
  misc_feature: MA Experiment 20000456 PARAMETER Experiment Name: At_100uM_BA_P Parameter: Age (day) Value: 14
  misc_feature: MA Experiment 20000456 PARAMETER Experiment Name: At_100uM_BA_P Parameter: Organism Value: A. thaliana
  misc_feature: MA Experiment 20000456 PARAMETER Experiment Name: At_100uM_BA_P Parameter: Plant Line Value: WS
  misc_feature: MA Experiment 20000456 PARAMETER Experiment Name: At_100uM_BA_P Parameter: Timepoint (hr) Value: 6
  misc_feature: MA Experiment 20000456 PARAMETER Experiment Name: At_100uM_BA_P Parameter: Tissue Value: Aerial
  misc_feature: MA Experiment 20000456 PARAMETER Experiment Name: At_100uM_BA_P Parameter: Treatment Value: 100uM BA vs. No Treatment
  misc_feature: MA Experiment ID: 20000709 Result: Up-regulated in Transcription
  misc_feature: MA Experiment 20000709 PARAMETER Experiment Name: At_15mM_NH4NO3_L-to-H_P Parameter: Age (hr) Value: 14
  misc_feature: MA Experiment 20000709 PARAMETER Experiment Name: At_15mM_NH4NO3_L-to-H_P Parameter: Organism Value: A. thaliana
  misc_feature: MA Experiment 20000709 PARAMETER Experiment Name: At_15mM_NH4NO3_L-to-H_P Parameter: Plant Line Value: WS
  misc_feature: MA Experiment 20000709 PARAMETER Experiment Name: At_15mM_NH4NO3_L-to-H_P Parameter: Timepoint (hr) Value: 4
  misc_feature: MA Experiment 20000709 PARAMETER Experiment Name: At_15mM_NH4NO3_L-to-H_P Parameter: Tissue Value: Aerial
  misc_feature: MA Experiment 20000709 PARAMETER Experiment Name: At_15mM_NH4NO3_L-to-H_P Parameter: Treatment Value: 15mM NH4NO3 vs. 30mM Mannitol
  misc_feature: MA Experiment ID: 20000794 Result: Down-regulated in Transcription
  misc_feature: MA Experiment 20000794 PARAMETER Experiment Name: At_Petals_P Parameter: Age (day) Value: 23-25 days
  misc_feature: MA Experiment 20000794 PARAMETER Experiment Name: At_Petals_P Parameter: Plant Line Value: WS
  misc_feature: MA Experiment 20000794 PARAMETER Experiment Name: At_Petals_P Parameter: Tissue Value: Petals vs. Whole plant
  misc_feature: MA Experiment ID: 20001247 Result: Down-regulated in Transcription
  misc_feature: MA Experiment 20001247 PARAMETER Experiment Name: At_Far-red-induction_P Parameter: Age (day) Value: 7
  misc_feature: MA Experiment 20001247 PARAMETER Experiment Name: At_Far-red-induction_P Parameter: Light Value: Far-red vs. White
  misc_feature: MA Experiment 20001247 PARAMETER Experiment Name: At_Far-red-induction_P Parameter: Organism Value: A. thaliana
  misc_feature: MA Experiment 20001247 PARAMETER Experiment Name: At_Far-red-induction_P Parameter: Plant Line Value: Columbia
  misc_feature: MA Experiment 20001247 PARAMETER Experiment Name: At_Far-red-induction_P Parameter: Timepoint (hr) Value: 1
  misc_feature: MA Experiment 20001247 PARAMETER Experiment Name: At_Far-red-induction_P Parameter: Tissue Value: Whole Plant
  misc_feature: MA Experiment ID: 20001450 Result: Down-regulated in Transcription
  misc_feature: MA Experiment 20001450 PARAMETER Experiment Name: At_Far-red-induction_P Parameter: Age (day) Value: 7
  misc_feature: MA Experiment 20001450 PARAMETER Experiment Name: At_Far-red-induction_P Parameter: Light Value: Far-red vs. White
  misc_feature: MA Experiment 20001450 PARAMETER Experiment Name: At_Far-red-induction_P Parameter: Organism Value: A. thaliana
  misc_feature: MA Experiment 20001450 PARAMETER Experiment Name: At_Far-red-induction_P Parameter: Plant Line Value: Columbia
  misc_feature: MA Experiment 20001450 PARAMETER Experiment Name: At_Far-red-induction_P Parameter: Timepoint (hr) Value: 8
  misc_feature: MA Experiment 20001450 PARAMETER Experiment Name: At_Far-red-induction_P Parameter: Tissue Value: Whole Plant
  misc_feature: MA Experiment ID: 20001458 Result: Up-regulated in Transcription
  misc_feature: MA Experiment 20001458 PARAMETER Experiment Name: At_50mM_NH4NO3_L-to-H_P Parameter: Age (day) Value: Undefined
  misc_feature: MA Experiment 20001458 PARAMETER Experiment Name: At_50mM_NH4NO3_L-to-H_P Parameter: Organism Value: Undefined
  misc_feature: MA Experiment 20001458 PARAMETER Experiment Name: At_50mM_NH4NO3_L-to-H_P Parameter: Plant Line Value: Undefined
  misc_feature: MA Experiment 20001458 PARAMETER Experiment Name: At_50mM_NH4NO3_L-to-H_P Parameter: Timepoint (hr) Value: 2
  misc_feature: MA Experiment 20001458 PARAMETER Experiment Name: At_50mM_NH4NO3_L-to-H_P Parameter: Tissue Value: Siliques
  misc_feature: MA Experiment 20001458 PARAMETER Experiment Name: At_50mM_NH4NO3_L-to-H_P Parameter: Treatment Value: 50mM NH4NO3 vs. 100mM Manitol
  misc_feature: MA Experiment ID: 20001556 Result: Up-regulated in Transcription
  misc_feature: MA Experiment 20001556 PARAMETER Experiment Name: At_Drought_Soil_Dry_P Parameter: Age (day) Value: 26
  misc_feature: MA Experiment 20001556 PARAMETER Experiment Name: At_Drought_Soil_Dry_P Parameter: Organism Value: A. thaliana
  misc_feature: MA Experiment 20001556 PARAMETER Experiment Name: At_Drought_Soil_Dry_P Parameter: Plant Line Value: WS
  misc_feature: MA Experiment 20001556 PARAMETER Experiment Name: At_Drought_Soil_Dry_P Parameter: Post Timepoint (hr) Value: None
  misc_feature: MA Experiment 20001556 PARAMETER Experiment Name: At_Drought_Soil_Dry_P Parameter: Post-Treatment Value: None
  misc_feature: MA Experiment 20001556 PARAMETER Experiment Name: At_Drought_Soil_Dry_P Parameter: Timepoint (day) Value: 12
  misc_feature: MA Experiment 20001556 PARAMETER Experiment Name: At_Drought_Soil_Dry_P Parameter: Treatment Value: Drought vs. No Drought
  misc_feature: MA Experiment ID: 20001557 Result: Up-regulated in Transcription
  misc_feature: MA Experiment 20001557 PARAMETER Experiment Name: At_Drought_Soil_Dry_P Parameter: Age (day) Value: 27
  misc_feature: MA Experiment 20001557 PARAMETER Experiment Name: At_Drought_Soil_Dry_P Parameter: Organism Value: A. thaliana
  misc_feature: MA Experiment 20001557 PARAMETER Experiment Name: At_Drought_Soil_Dry_P Parameter: Plant Line Value: WS
  misc_feature: MA Experiment 20001557 PARAMETER Experiment Name: At_Drought_Soil_Dry_P Parameter: Post Timepoint (hr) Value: 3
  misc_feature: MA Experiment 20001557 PARAMETER Experiment Name: At_Drought_Soil_Dry_P Parameter: Post-Treatment Value: Re-Water vs. No Drought
  misc_feature: MA Experiment 20001557 PARAMETER Experiment Name: At_Drought_Soil_Dry_P Parameter: Timepoint (day) Value: 13
  misc_feature: MA Experiment 20001557 PARAMETER Experiment Name: At_Drought_Soil_Dry_P Parameter: Treatment Value: Drought vs. No Drought
  misc_feature: MA Experiment ID: 20001558 Result: Up-regulated in Transcription
  misc_feature: MA Experiment 20001558 PARAMETER Experiment Name: At_Drought_Soil_Dry_P Parameter: Age (day) Value: 27
  misc_feature: MA Experiment 20001558 PARAMETER Experiment Name: At_Drought_Soil_Dry_P Parameter: Organism Value: A. thaliana
  misc_feature: MA Experiment 20001558 PARAMETER Experiment Name: At_Drought_Soil_Dry_P Parameter: Plant Line Value: WS
  misc_feature: MA Experiment 20001558 PARAMETER Experiment Name: At_Drought_Soil_Dry_P Parameter: Post Timepoint (hr) Value: 6
  misc_feature: MA Experiment 20001558 PARAMETER Experiment Name: At_Drought_Soil_Dry_P Parameter: Post-Treatment Value: Re-Water vs. No Drought
  misc_feature: MA Experiment 20001558 PARAMETER Experiment Name: At_Drought_Soil_Dry_P Parameter: Timepoint (day) Value: 13
  misc_feature: MA Experiment 20001558 PARAMETER Experiment Name: At_Drought_Soil_Dry_P Parameter: Treatment Value: Drought vs. No Drought
  misc_feature: MA Experiment ID: 20001560 Result: Up-regulated in Transcription
  misc_feature: MA Experiment 20001560 PARAMETER Experiment Name: At_Drought_Soil_Dry_P Parameter: Age (day) Value: 28
  misc_feature: MA Experiment 20001560 PARAMETER Experiment Name: At_Drought_Soil_Dry_P Parameter: Organism Value: A. thaliana
  misc_feature: MA Experiment 20001560 PARAMETER Experiment Name: At_Drought_Soil_Dry_P Parameter: Plant Line Value: WS
  misc_feature: MA Experiment 20001560 PARAMETER Experiment Name: At_Drought_Soil_Dry_P Parameter: Post Timepoint (hr) Value: None
  misc_feature: MA Experiment 20001560 PARAMETER Experiment Name: At_Drought_Soil_Dry_P Parameter: Post-Treatment Value: None
  misc_feature: MA Experiment 20001560 PARAMETER Experiment Name: At_Drought_Soil_Dry_P Parameter: Timepoint (day) Value: 14
  misc_feature: MA Experiment 20001560 PARAMETER Experiment Name: At_Drought_Soil_Dry_P Parameter: Treatment Value: Drought vs. No Drought
  misc_feature: MA Experiment ID: 20001756 Result: Up-regulated in Transcription
  misc_feature: MA Experiment 20001756 PARAMETER Experiment Name: At_50mM_NH4NO3_L-to-H_P Parameter: Timepoint (hr) Value: 4
  misc_feature: MA Experiment 20001756 PARAMETER Experiment Name: At_50mM_NH4NO3_L-to-H_P Parameter: Tissue Value: Leaf
  misc_feature: MA Experiment 20001756 PARAMETER Experiment Name: At_50mM_NH4NO3_L-to-H_P Parameter: Treatment Value: 50mM NH4NO3 vs 100mM Mannitol
  misc_feature: MA Experiment ID: 20001757 Result: Up-regulated in Transcription
  misc_feature: MA Experiment 20001757 PARAMETER Experiment Name: At_50mM_NH4NO3_L-to-H_P Parameter: Timepoint (hr) Value: 6
  misc_feature: MA Experiment 20001757 PARAMETER Experiment Name: At_50mM_NH4NO3_L-to-H_P Parameter: Tissue Value: Leaf
  misc_feature: MA Experiment 20001757 PARAMETER Experiment Name: At_50mM_NH4NO3_L-to-H_P Parameter: Treatment Value: 50mM NH4NO3 vs 100mM Mannitol
acattttcagctgctcataaaccctaaaaatcctctctttttctcaaccttgattcttagccatggagttctggggaattgaagttaaatcaggaaagccagttacagtgactcctgaagaaggcattcttatccacgtttctcaggcatcgcttggagaatgtaaaaacaagaagggagagtttgtgcctttacatgtaaaggttgggaaccagaacttggttctgggaactctatcgactgagaacatccctcagcttttctgtgatttggtattcgacaaggagtttgagctttctcacacttggggaaaaggaagtgtttactttgttggatacaaaactcccaacattgagccacaaggctattctgaggaagaagaggaagaagaggaagaagaggaagaagttcctgctgggaatgctgccaaggctgtagctaaaccaaaggctaagcctgcagaagtgaagccagctgttgatgatgaagaggatgagtctgattctgacggaatggatgaagatgattctgatggtgaggattctgaggaagaagagcctacacctaagaagcctgcatcaagcaagaagagagctaatgaaactacccctaaagcacctgtgtcagcaaagaaggcgaaagtagcagttactcctcagaaaacagatgagaagaagaaagggggaaaggctgcaaaccagagcccaaagtcggccagtcaagtctcatgtggttcatgcaagaagactttcaactcagggaatgcacttgagtctcacaacaaggccaagcacgctgctgccaagtgaagtggtttcttattagagcttgtgatttctatggaattttgcctgtagtctttatgaaaccttcggattttcttatattttcttttgataacaagagtcttaatgaaagagagccagttggagtcttattaccactatatttcaacattctatcttggctcaaatgtgttaattttagattcacgttttcacc

SEQ ID NO: 20478 - protein, 248 aa, Arabidopsis thaliana
  peptide (1)..(248): Ceres Seq. ID no. 12333460
  misc_feature (83)..(178): Pfam Name: Nucleoplasmin Pfam Description: Nucleoplasmin
  misc_feature (1)..(214): Homolog of NCBI NO: 7804960 NR Description: putative histone deacetylase HD2 [Oryza sativa]
  misc_feature (1)..(219): Homolog of NCBI NO: 7804963 NR Description: putative histone deacetylase HD2c [Arabidopsis
  misc_feature (1)..(224): Homolog of NCBI NO: 30680179 NR Description: histone deacetylase -related protein [Arabidopsis
  misc_feature (1)..(220): Homolog of NCBI NO: 25352191 NR Description: probable histone deacetylase (EC 3.5.1.-)
  misc_feature (1)..(246): Homolog of NCBI NO: 7716948 NR Description: histone deacetylase 2 isoform b [Zea mays]
  misc_feature (1)..(219): Homolog of NCBI NO: 11282318 NR Description: histone deacetylase-like protein - Arabidopsis
  misc_feature (1)..(246): Homolog of NCBI NO: 30688577 NR Description: histone deacetylase-related protein [Arabidopsis
  misc_feature (1)..(225): Homolog of NCBI NO: 33667906 NR Description: histone deacetylase [Solanum chacoense]
  misc_feature (1)..(247): Homolog of NCBI NO: 2392769 NR Description: putative histone deacetylase [Arabidopsis
  misc_feature (1)..(248): Homolog of NCBI NO: 18407844 NR Description: putative histone deacetylase
MEFWGIEVKSGKPVTVTPEEGILIHVSQASLGECKNKKGEFVPLHVKVGNQNLVLGTLSTENIPQLFCDLVFDKEFELSHTWGKGSVYFVGYKTPNIEPQGYSEEEEEEEEEEEEVPAGNAAKAVAKPKAKPAEVKPAVDDEEDESDSDGMDEDDSDGEDSEEEEPTPKKPASSKKRANETTPKAPVSAKKAKVAVTPQKTDEKKKGGKAANQSPKSASQVSCGSCKKTFNSGNALESHNKAKHAAAK

SEQ ID NO: 20479 - DNA, 1173 bp, Arabidopsis thaliana
  misc_feature (1)..(1173): Ceres Seq. ID no. 13592859
  misc_feature: MA Experiment ID: 20000184 Result: Down-regulated in Transcription
  misc_feature: MA Experiment 20000184 PARAMETER Experiment Name: At_Shoots__P Parameter: Age (day) Value: 7
  misc_feature: MA Experiment 20000184 PARAMETER Experiment Name: At_Shoots__P Parameter: Tissue Value: Shoots vs. Whole Plant
  misc_feature: MA Experiment ID: 20000264 Result: Down-regulated in Transcription
  misc_feature: MA Experiment 20000264 PARAMETER Experiment Name: At_Open_Flower_P Parameter: Age (day) Value: 21
  misc_feature: MA Experiment 20000264 PARAMETER Experiment Name: At_Open_Flower_P Parameter: Plant Line Value: WS
  misc_feature: MA Experiment 20000264 PARAMETER Experiment Name: At_Open_Flower_P Parameter: Tissue Value: Open Flower vs. Whole Plant
  misc_feature: MA Experiment ID: 20000265 Result: Down-regulated in Transcription
  misc_feature: MA Experiment 20000265 PARAMETER Experiment Name: At_Open_Flower_P Parameter: Age (day) Value: 21
  misc_feature: MA Experiment 20000265 PARAMETER Experiment Name: At_Open_Flower_P Parameter: Plant Line Value: WS
  misc_feature: MA Experiment 20000265 PARAMETER Experiment Name: At_Open_Flower_P Parameter: Tissue Value: Closed Flower vs. Whole Plant
  misc_feature: MA Experiment ID: 20000286 Result: Down-regulated in Transcription
  misc_feature: MA Experiment 20000286 PARAMETER Experiment Name: At_Open_Flower_P Parameter: Age (day) Value: 21
  misc_feature: MA Experiment 20000286 PARAMETER Experiment Name: At_Open_Flower_P Parameter: Plant Line Value: WS
  misc_feature: MA Experiment 20000286 PARAMETER Experiment Name: At_Open_Flower_P Parameter: Tissue Value: Half Open vs. Whole Plant
  misc_feature: MA Experiment ID: 20000438 Result: Down-regulated in Transcription
  misc_feature: MA Experiment 20000438 PARAMETER Experiment Name: At_Shoots__P Parameter: Age (day) Value: 14
  misc_feature: MA Experiment 20000438 PARAMETER Experiment Name: At_Shoots__P Parameter: Tissue Value: Shoots vs. Whole Plant
  misc_feature: MA Experiment ID: 20000439 Result: Down-regulated in Transcription
  misc_feature: MA Experiment 20000439 PARAMETER Experiment Name: At_Roots__P Parameter: Age (day) Value: 14 vs. 21
  misc_feature: MA Experiment 20000439 PARAMETER Experiment Name: At_Roots__P Parameter: Organism Value: A. thaliana
  misc_feature: MA Experiment 20000439 PARAMETER Experiment Name: At_Roots__P Parameter: Tissue Value: Roots vs. Whole Plant
  misc_feature: MA Experiment ID: 20001247 Result: Up-regulated in Transcription
  misc_feature: MA Experiment 20001247 PARAMETER Experiment Name: At_Far-red-induction_P Parameter: Age (day) Value: 7
  misc_feature: MA Experiment 20001247 PARAMETER Experiment Name: At_Far-red-induction_P Parameter: Light Value: Far-red vs. White
  misc_feature: MA Experiment 20001247 PARAMETER Experiment Name: At_Far-red-induction_P Parameter: Organism Value: A. thaliana
  misc_feature: MA Experiment 20001247 PARAMETER Experiment Name: At_Far-red-induction_P Parameter: Plant Line Value: Columbia
  misc_feature: MA Experiment 20001247 PARAMETER Experiment Name: At_Far-red-induction_P Parameter: Timepoint (hr) Value: 1
  misc_feature: MA Experiment 20001247 PARAMETER Experiment Name: At_Far-red-induction_P Parameter: Tissue Value: Whole Plant
  misc_feature: MA Experiment ID: 20001451 Result: Up-regulated in Transcription
  misc_feature: MA Experiment 20001451 PARAMETER Experiment Name: At_Far-red-induction_P Parameter: Age (day) Value: 7
  misc_feature: MA Experiment 20001451 PARAMETER Experiment Name: At_Far-red-induction_P Parameter: Light Value: Far-red vs. White
  misc_feature: MA Experiment 20001451 PARAMETER Experiment Name: At_Far-red-induction_P Parameter: Organism Value: A. thaliana
  misc_feature: MA Experiment 20001451 PARAMETER Experiment Name: At_Far-red-induction_P Parameter: Plant Line Value: Columbia
  misc_feature: MA Experiment 20001451 PARAMETER Experiment Name: At_Far-red-induction_P Parameter: Timepoint (hr) Value: 24
  misc_feature: MA Experiment 20001451 PARAMETER Experiment Name: At_Far-red-induction_P Parameter: Tissue Value: Whole Plant
  misc_feature: MA Experiment ID: 20001905 Result: Down-regulated in Transcription
  misc_feature: MA Experiment 20001905 PARAMETER Experiment Name: At_Drought_Reproduction_P Parameter: Age (day) Value: 40
  misc_feature: MA Experiment 20001905 PARAMETER Experiment Name: At_Drought_Reproduction_P Parameter: Organism Value: A. thaliana
  misc_feature: MA Experiment 20001905 PARAMETER Experiment Name: At_Drought_Reproduction_P Parameter: Plant Line Value: WS
  misc_feature: MA Experiment 20001905 PARAMETER Experiment Name: At_Drought_Reproduction_P Parameter: Timepoint (day) Value: 10
  misc_feature: MA Experiment 20001905 PARAMETER Experiment Name: At_Drought_Reproduction_P Parameter: Tissue Value: Rosettes
  misc_feature: MA Experiment 20001905 PARAMETER Experiment Name: At_Drought_Reproduction_P Parameter: Treatment Value: Drought vs. No Drought
aaaacagagcaagcaaaaaccctttaatcattcattcagtcaccaaatctcttgttctgtttttctgtctctctgcttcagtgttcttcgcggcctttaccagtttttcagttctttgacgagcttctttcattggtcctgaactcagggttagagcagcatttgcatatatacaaggtgttttggtgacaattgatagactctaagatgggttctgggaatttgattaaggcaataattagattgaagaagagtaaacaaggaactgaaaagaaaaaactagtgctgtgaaaccaaaaaaaggttccaagaagaagggtacatcactagttactcgtagtgaggattgggctgctactcggattcagactgcttttaaagcctataaggctagaaaaagcttacggcgtctaaaaggaattgcaagagcaaagttatcaactgagaaacaatctgtgaagaaccaagctgtggtcacattgaggtatcttcactcatggagtaaaatacagtcagagataaaggctcgccgagtttgcatggtaaccgaatggcgactgaagaataaaagattagagcatcagcaaaagcttgaggcaaagcttcatgatgttgaggttgaatggaatggtgggtcagagacaaaagatgaaatcttggagaggatacttcaaagggaagaagcgacgattaagcgagaaagagccttggcatatgctttctctcatcagtggaaagctgatggtaagactcagtggttgggaagttatgagctaggaaacactaattggggttggagctggaaagagcgttggatatctgctcggccttgggaagtaagatattcagtgactcctaagaaaccaaagagctcaaagacagactcaaattcaccagcaaagagaacagtgtcattatcatcagttccagccaaaactccgtttcctggagctagaaacacagtgaaaccgcggagattgtcatttccaggtgcttgaagtgaagttaaactttgtttgcatctaaagagtatacacgtacacttgaagatttgagggtatatttatttggtctatgttctgtctctggtgtgatgtaaatacatgtatttgttatgtaggcaacgacctttgtgatttttcgtttgttttaatacatgctactgtttgtctc

SEQ ID NO: 20480 - protein, 152 aa, Arabidopsis thaliana
  peptide (1)..(152): Ceres Seq. ID no. 13592860
  misc_feature (1)..(147): Homolog of NCBI NO: 15225299 NR Description: SF16 protein {Helianthus annuus} -related
  misc_feature (1)..(140): Homolog of NCBI NO: 15232741 NR Description: SF16 protein -related [Arabidopsis thaliana]
  misc_feature (1)..(150): Homolog of NCBI NO: 15231175 NR Description: expressed protein [Arabidopsis thaliana]
  misc_feature (1)..(99): Homolog of NCBI NO: 18414094 NR Description: expressed protein [Arabidopsis thaliana]
  misc_feature (1)..(125): Homolog of NCBI NO: 15982840 NR Description: AT5g03040/F15A17_70 [Arabidopsis thaliana]
  misc_feature (1)..(142): Homolog of NCBI NO: 11994738 NR Description: contains similarity to SF16
  misc_feature (1)..(142): Homolog of NCBI NO: 15233296 NR Description: hypothetical protein [Arabidopsis thaliana]
  misc_feature (1)..(101): Homolog of NCBI NO: 15225258 NR Description: SF16 protein {Helianthus annuus} -related
  misc_feature (1)..(130): Homolog of NCBI NO: 15232474 NR Description: expressed protein [Arabidopsis thaliana]
  misc_feature (1)..(152): Homolog of NCBI NO: 15226186 NR Description: SF16 protein {Helianthus annuus} -related
MVTEWRLKNKRLEHQQKLEAKLHDVEVEWNGGSETKDEILERILQREEATIKRERALAYAFSHQWKADGKTQWLGSYELGNTNWGWSWKERWISARPWEVRYSVTPKKPKSSKTDSNSPAKRTVSLSSVPAKTPFPGARNTVKPRRLSFPGA

SEQ ID NO: 20481 - DNA, 1205 bp, Arabidopsis thaliana
  misc_feature (1)..(1205): Ceres Seq. ID no. 13592803
  misc_feature: MA Experiment ID: 20000794 Result: Up-regulated in Transcription
  misc_feature: MA Experiment 20000794 PARAMETER Experiment Name: At_Petals_P Parameter: Age (day) Value: 23-25 days
  misc_feature: MA Experiment 20000794 PARAMETER Experiment Name: At_Petals_P Parameter: Plant Line Value: WS
  misc_feature: MA Experiment 20000794 PARAMETER Experiment Name: At_Petals_P Parameter: Tissue Value: Petals vs. Whole plant
  misc_feature: MA Experiment ID: 20001558 Result: Down-regulated in Transcription
  misc_feature: MA Experiment 20001558 PARAMETER Experiment Name: At_Drought_Soil_Dry_P Parameter: Age (day) Value: 27
  misc_feature: MA Experiment 20001558 PARAMETER Experiment Name: At_Drought_Soil_Dry_P Parameter: Organism Value: A. thaliana
  misc_feature: MA Experiment 20001558 PARAMETER Experiment Name: At_Drought_Soil_Dry_P Parameter: Plant Line Value: WS
  misc_feature: MA Experiment 20001558 PARAMETER Experiment Name: At_Drought_Soil_Dry_P Parameter: Post Timepoint (hr) Value: 6
  misc_feature: MA Experiment 20001558 PARAMETER Experiment Name: At_Drought_Soil_Dry_P Parameter: Post-Treatment Value: Re-Water vs. No Drought
  misc_feature: MA Experiment 20001558 PARAMETER Experiment Name: At_Drought_Soil_Dry_P Parameter: Timepoint (day) Value: 13
  misc_feature: MA Experiment 20001558 PARAMETER Experiment Name: At_Drought_Soil_Dry_P Parameter: Treatment Value: Drought vs. No Drought
agatttcaaattttcatttcttgagtgataatttcagttattgatctgtgcgttcatcaatggaggtttcttctttctccactgtacccagatactgtaactcacgctcctttgttccagaattgtctcgtttcaggggattcaaagttcacttatgggaccaatctcttgttcctcttcatttcagcattcgaaaacgaaagaacacccctcgttatttgatttcttgcagtcagaagaaagatgtcactgttgttgatggaagttgtatggatgagatctatgataagttggcggaacgtcttgtccctacagcagcggcaatgtttagccccaatcttaaacgtttggtcggtttggctggtcctcctggtgccgggaaaagtacagtagcaaatgaagttgtgcgtcgtgtaaataagctatggcctcagaaagctgcttcttttgatgctgaggttaatccaccggatgttgctatagtacttcccatggatggtttccatttgtatcgttcgcaactcgatgctatggaggatcccaaagaagcccatgcgagaagaggggctccgtggacttttgatcctgcactactgcttaactgtttaaagaagctgaaaaacgagggctcagtttatgtgccatcattcgatcatggagttggggatccagttgaagatgatatctttgttagcctccagcataaagtggtaattgtagaaggaaactacatcttgttagaagaagggtcttggaaagacatctcagatatgtttgatgagaaatggttcatcgatgtgaatctcgatacagcaatgcaacgtgttgaaaaccggcatatctcaactggtaaacccccagatgttgctaaatggcgggtggattataatgaccgacccaacgcagagctgataataaagtcaaagacaaacgctgatctactgatcagatctatgaacatttgaatctactttcaagggggctattggacgaaacagaataagatgaataacaaaagacaatgttgcgcttcaagggaagattgcctttggtctacaatgtctttttcttgcaacggaaacttccaataagcaatttgttcgcagtaaactgtgtatgctagtgttctctgcatactcacggattttgttcagacaatgtgttttatacttctaaattagaagttctaatgcataaagtgtttg

SEQ ID NO: 20482 - protein, 301 aa, Arabidopsis thaliana
  peptide (1)..(301): Ceres Seq. ID no. 15221162
  misc_feature (97)..(301): Pfam Name: Phosphoribulokinase / Uridine kinase family Pfam Description: Phosphoribulokinase / Uridine kinase family
  misc_feature (76)..(296): Homolog of NCBI NO: 29830362 NR Description: hypothetical protein [Streptomyces avermitilis
  misc_feature (97)..(296): Homolog of NCBI NO: 17988166 NR Description: PANTOTHENATE KINASE [Brucella melitensis]
  misc_feature (97)..(296): Homolog of NCBI NO: 23500977 NR Description: kinase-related protein [Brucella suis 1330]
  misc_feature (140)..(285): Homolog of NCBI NO: 40740541 NR Description: hypothetical protein AN8109.2 [Aspergillus
  misc_feature (92)..(283): Homolog of NCBI NO: 38108268 NR Description: hypothetical protein MG02303.4 [Magnaporthe
  misc_feature (75)..(301): Homolog of NCBI NO: 19113880 NR Description: similarity to uridine kinase [Schizosaccharomyces
  misc_feature (93)..(298): Homolog of NCBI NO: 40741109 NR Description: hypothetical protein AN4382.2 [Aspergillus
  misc_feature (192)..(301): Homolog of NCBI NO: 25363622 NR Description: hypothetical protein F10O3.15 - Arabidopsis
  misc_feature (1)..(169): Homolog of NCBI NO: 25363622 NR Description: hypothetical protein F10O3.15 - Arabidopsis
  misc_feature (7)..(301): Homolog of NCBI NO: 15218676 NR Description: expressed protein [Arabidopsis thaliana]
MEVSSFSTVPRYCNSRSFVPELSRFRGFKVHLWDQSLVPLHFSIRKRKNTPRYLISCSQKKDVTVVDGSCMDEIYDKLAERLVPTAAAMFSPNLKRLVGLAGPPGAGKSTVANEVVRRVNKLWPQKAASFDAEVNPPDVAIVLPMDGFHLYRSQLDAMEDPKEAHARRGAPWTFDPALLLNCLKKLKNEGSVYVPSFDHGVGDPVEDDIFVSLQHKVVIVEGNYILLEEGSWKDISDMFDEKWFIDVNLDTAMQRVENRHISTGKPPDVAKWRVDYNDRPNAELIIKSKTNADLLIRSMNI

SEQ ID NO: 20483 - protein, 231 aa, Arabidopsis thaliana
  peptide (1)..(231): Ceres Seq. ID no. 15221163
  misc_feature (27)..(231): Pfam Name: Phosphoribulokinase / Uridine kinase family Pfam Description: Phosphoribulokinase / Uridine kinase family
  misc_feature (6)..(226): Homolog of NCBI NO: 29830362 NR Description: hypothetical protein [Streptomyces avermitilis
  misc_feature (27)..(226): Homolog of NCBI NO: 17988166 NR Description: PANTOTHENATE KINASE [Brucella melitensis]
  misc_feature (27)..(226): Homolog of NCBI NO: 23500977 NR Description: kinase-related protein [Brucella suis 1330]
  misc_feature (70)..(215): Homolog of NCBI NO: 40740541 NR Description: hypothetical protein AN8109.2 [Aspergillus
  misc_feature (22)..(213): Homolog of NCBI NO: 38108268 NR Description: hypothetical protein MG02303.4 [Magnaporthe
  misc_feature (5)..(231): Homolog of NCBI NO: 19113880 NR Description: similarity to uridine kinase [Schizosaccharomyces
  misc_feature (23)..(228): Homolog of NCBI NO: 40741109 NR Description: hypothetical protein AN4382.2 [Aspergillus
  misc_feature (122)..(231): Homolog of NCBI NO: 25363622 NR Description: hypothetical protein F10O3.15 - Arabidopsis
  misc_feature (1)..(99): Homolog of NCBI NO: 25363622 NR Description: hypothetical protein F10O3.15 - Arabidopsis
  misc_feature (1)..(231): Homolog of NCBI NO: 15218676 NR Description: expressed protein [Arabidopsis thaliana]
MDEIYDKLAERLVPTAAAMFSPNLKRLVGLAGPPGAGKSTVANEVVRRVNKLWPQKAASFDAEVNPPDVAIVLPMDGFHLYRSQLDAMEDPKEAHARRGAPWTFDPALLLNCLKKLKNEGSVYVPSFDHGVGDPVEDDIFVSLQHKVVIVEGNYILLEEGSWKDISDMFDEKWFIDVNLDTAMQRVENRHISTGKPPDVAKWRVDYNDRPNAELIIKSKTNADLLIRSMNI

SEQ ID NO: 20484 - protein, 213 aa, Arabidopsis thaliana
  peptide (1)..(213): Ceres Seq. ID no. 15221164
  misc_feature (9)..(213): Pfam Name: Phosphoribulokinase / Uridine kinase family Pfam Description: Phosphoribulokinase / Uridine kinase family
  misc_feature (1)..(208): Homolog of NCBI NO: 29830362 NR Description: hypothetical protein [Streptomyces avermitilis
  misc_feature (9)..(208): Homolog of NCBI NO: 17988166 NR Description: PANTOTHENATE KINASE [Brucella melitensis]
  misc_feature (9)..(208): Homolog of NCBI NO: 23500977 NR Description: kinase-related protein [Brucella suis 1330]
  misc_feature (52)..(197): Homolog of NCBI NO: 40740541 NR Description: hypothetical protein AN8109.2 [Aspergillus
  misc_feature (4)..(195): Homolog of NCBI NO: 38108268 NR Description: hypothetical protein MG02303.4 [Magnaporthe
  misc_feature (1)..(213): Homolog of NCBI NO: 19113880 NR Description: similarity to uridine kinase [Schizosaccharomyces
  misc_feature (5)..(210): Homolog of NCBI NO: 40741109 NR Description: hypothetical protein AN4382.2 [Aspergillus
  misc_feature (104)..(213): Homolog of NCBI NO: 25363622 NR Description: hypothetical protein F10O3.15 - Arabidopsis
  misc_feature (1)..(81): Homolog of NCBI NO: 25363622 NR Description: hypothetical protein F10O3.15 - Arabidopsis
  misc_feature (1)..(213): Homolog of NCBI NO: 15218676 NR Description: expressed protein [Arabidopsis thaliana]
MFSPNLKRLVGLAGPPGAGKSTVANEVVRRVNKLWPQKAASFDAEVNPPDVAIVLPMDGFHLYRSQLDAMEDPKEAHARRGAPWTFDPALLLNCLKKLKNEGSVYVPSFDHGVGDPVEDDIFVSLQHKVVIVEGNYILLEEGSWKDISDMFDEKWFIDVNLDTAMQRVENRHISTGKPPDVAKWRVDYNDRPNAELIIKSKTNADLLIRSMNI

SEQ ID NO: 20485 - DNA, 1058 bp, Arabidopsis thaliana
  misc_feature (1)..(1058): Ceres Seq. ID no. 13646157
agaacatcctaatcgaaaaaaaatcttttcatattctcggttagtagaaactaggaaaagagatgaatagaggagtgttggagagttcgccggttcaacatctcacggcggctggaaaccctaattggtggaataatgtcagccgcggcttgaggccaccaacgccgttgatgagtcacgagccgccgtctaccaccgcttttattccaagtctcttgccaaacttcttctcttctccgacttcctcttcatcttcttcaccttctttccctactcctaatagtaaccctaacttctcttcttggcttgaaatgagtgatctgcctcttgatcagccatggagccttagtcaactcctcttgggtggattgatgatgggagaggaagagaaaatggagatgatgaaccatcatcatcatcaaaatcaacaccaaagttaccaagcgaagaggatacaaaattgggaagaacaagttttgaggcaccaagcttccatgaaacaagagagtagcaataataatagttatggaataatgtcctcaccaaactcacctccaaacaaatcttgtgctacaattatcaacaccaatgaagacaacaacaataacattcacagtggtcttaacttgtccgagtgtaatagctcagagatgattgggtcttcttttgctaataagaaaccaaaacttcaagttccttcatcacaatcaactctcaaggtgagaaaggagaaacttggaggcagaatagcatctcttcaccagctagtatctccctttggcaagactgacacagcctctgtcttgtcggaggctattggatacattagattcctccacagtcaaattgaggctttaagtctaccatactttggtactccctcgaggaacaatatgatgcaccaacatgcacaaagaaatatgaatggtatatttcctgaggaccctggtcaggtacgcacatatatttttttactttctagttttatatactttactttttattggatcaattaaacccaaatctcaatttaaaaaaaataaatacttgccagcttt

SEQ ID NO: 20486 - protein, 317 aa, Arabidopsis thaliana
  peptide (1)..(317): Ceres Seq. ID no. 15219040
  misc_feature (219)..(259): Pfam Name: Helix-loop-helix DNA-binding domain Pfam Description: Helix-loop-helix DNA-binding domain
  misc_feature (153)..(281): Homolog of NCBI NO: 18407276 NR Description: expressed protein [Arabidopsis thaliana]
  misc_feature (153)..(281): Homolog of NCBI NO: 30696595 NR Description: expressed protein [Arabidopsis thaliana]
  misc_feature (172)..(273): Homolog of NCBI NO: 21740790 NR Description: OSJNBb0091E11.4 [Oryza sativa (japonica
  misc_feature (203)..(276): Homolog of NCBI NO: 15217667 NR Description: hypothetical protein [Arabidopsis thaliana]
  misc_feature (174)..(300): Homolog of NCBI NO: 11045087 NR Description: putative protein [Brassica napus]
  misc_feature (106)..(298): Homolog of NCBI NO: 15233452 NR Description: bHLH068 putative bHLH transcription factor
  misc_feature (1)..(262): Homolog of NCBI NO: 11045087 NR Description: putative protein [Brassica napus]
  misc_feature (1)..(262): Homolog of NCBI NO: 15233452 NR Description: bHLH068 putative bHLH transcription factor
  misc_feature (1)..(202): Homolog of NCBI NO: 15225300 NR Description: hypothetical protein [Arabidopsis thaliana]
  misc_feature (1)..(298): Homolog of NCBI NO: 33111977 NR Description: putative bHLH133 transcription factor
MNRGVLESSPVQHLTAAGNPNWWNNVSRGLRPPTPLMSHEPPSTTAFIPSLLPNFFSSPTSSSSSSPSFPTPNSNPNFSSWLEMSDLPLDQPWSLSQLLLGGLMMGEEEKMEMMNHHHHQNQHQSYQAKRIQNWEEQVLRHQASMKQESSNNNSYGIMSSPNSPPNKSCATIINTNEDNNNNIHSGLNLSECNSSEMIGSSFANKKPKLQVPSSQSTLKVRKEKLGGRIASLHQLVSPFGKTDTASVLSEAIGYIRFLHSQIEALSLPYFGTPSRNNMMHQHAQRNMNGIFPEDPGQVRTYIFLLSSFIYFTFYWIN

SEQ ID NO: 20487 - protein, 281 aa, Arabidopsis thaliana
  peptide (1)..(281): Ceres Seq. ID no. 15219041
  misc_feature (183)..(223): Pfam Name: Helix-loop-helix DNA-binding domain Pfam Description: Helix-loop-helix DNA-binding domain
  misc_feature (117)..(245): Homolog of NCBI NO: 18407276 NR Description: expressed protein [Arabidopsis thaliana]
  misc_feature (117)..(245): Homolog of NCBI NO: 30696595 NR Description: expressed protein [Arabidopsis thaliana]
  misc_feature (136)..(237): Homolog of NCBI NO: 21740790 NR Description: OSJNBb0091E11.4 [Oryza sativa (japonica
  misc_feature (167)..(240): Homolog of NCBI NO: 15217667 NR Description: hypothetical protein [Arabidopsis thaliana]
  misc_feature (138)..(264): Homolog of NCBI NO: 11045087 NR Description: putative protein [Brassica napus]
  misc_feature (70)..(262): Homolog of NCBI NO: 15233452 NR Description: bHLH068 putative bHLH transcription factor
  misc_feature (1)..(226): Homolog of NCBI NO: 11045087 NR Description: putative protein [Brassica napus]
  misc_feature (1)..(226): Homolog of NCBI NO: 15233452 NR Description: bHLH068 putative bHLH transcription factor
  misc_feature (1)..(166): Homolog of NCBI NO: 15225300 NR Description: hypothetical protein [Arabidopsis thaliana]
  misc_feature (1)..(262): Homolog of NCBI NO: 33111977 NR Description: putative bHLH133 transcription factor
MSHEPPSTTAFIPSLLPNFFSSPTSSSSSSPSFPTPNSNPNFSSWLEMSDLPLDQPWSLSQLLLGGLMMGEEEKMEMMNHHHHQNQHQSYQAKRIQNWEEQVLRHQASMKQESSNNNSYGIMSSPNSPPNKSCATIINTNEDNNNNIHSGLNLSECNSSEMIGSSFANKKPKLQVPSSQSTLKVRKEKLGGRIASLHQLVSPFGKTDTASVLSEAIGYIRFLHSQIEALSLPYFGTPSRNNMMHQHAQRNMNGIFPEDPGQVRTYIFLLSSFIYFTFYWIN

SEQ ID NO: 20488 - protein, 234 aa, Arabidopsis thaliana
  peptide (1)..(234): Ceres Seq. ID no. 15219042
  misc_feature (136)..(176): Pfam Name: Helix-loop-helix DNA-binding domain Pfam Description: Helix-loop-helix DNA-binding domain
  misc_feature (70)..(198): Homolog of NCBI NO: 18407276 NR Description: expressed protein [Arabidopsis thaliana]
  misc_feature (70)..(198): Homolog of NCBI NO: 30696595 NR Description: expressed protein [Arabidopsis thaliana]
  misc_feature (89)..(190): Homolog of NCBI NO: 21740790 NR Description: OSJNBb0091E11.4 [Oryza sativa (japonica
  misc_feature (120)..(193): Homolog of NCBI NO: 15217667 NR Description: hypothetical protein [Arabidopsis thaliana]
  misc_feature (91)..(217): Homolog of NCBI NO: 11045087 NR Description: putative protein [Brassica napus]
  misc_feature (23)..(215): Homolog of NCBI NO: 15233452 NR Description: bHLH068 putative bHLH transcription factor
  misc_feature (1)..(179): Homolog of NCBI NO: 11045087 NR Description: putative protein [Brassica napus]
  misc_feature (1)..(179): Homolog of NCBI NO: 15233452 NR Description: bHLH068 putative bHLH transcription factor
  misc_feature (1)..(119): Homolog of NCBI NO: 15225300 NR Description: hypothetical protein [Arabidopsis thaliana]
  misc_feature (1)..(215): Homolog of NCBI NO: 33111977 NR Description: putative bHLH133 transcription factor
MSDLPLDQPWSLSQLLLGGLMMGEEEKMEMMNHHHHQNQHQSYQAKRIQNWEEQVLRHQASMKQESSNNNSYGIMSSPNSPPNKSCATIINTNEDNNNNIHSGLNLSECNSSEMIGSSFANKKPKLQVPSSQSTLKVRKEKLGGRIASLHQLVSPFGKTDTASVLSEAIGYIRFLHSQIEALSLPYFGTPSRNNMMHQHAQRNMNGIFPEDPGQVRTYIFLLSSFIYFTFYWIN

SEQ ID NO: 20489 - DNA, 1221 bp, Arabidopsis thaliana
  misc_feature (1)..(1221): Ceres Seq. ID no. 12562215
  misc_feature: MA Experiment ID: 108434 Result: Down-regulated in Transcription
  misc_feature: MA Experiment 108434 PARAMETER Experiment Name: At_Root_Tips_cDNA_P Parameter: Tissue Value: Root Tips
  misc_feature: MA Experiment ID: 108461 Result: Up-regulated in Transcription
  misc_feature: MA Experiment 108461 PARAMETER Experiment Name: At_Germinating_Seeds_cDNA_P Parameter: Age (day) Value: 1 vs. 0
  misc_feature: MA Experiment 108461 PARAMETER Experiment Name: At_Germinating_Seeds_cDNA_P Parameter: Tissue Value: Germinating Seeds
  misc_feature: MA Experiment ID: 108462 Result: Up-regulated in Transcription
  misc_feature: MA Experiment 108462 PARAMETER Experiment Name: At_Germinating_Seeds_cDNA_P Parameter: Age (day) Value: 2 vs. 0
  misc_feature: MA Experiment 108462 PARAMETER Experiment Name: At_Germinating_Seeds_cDNA_P Parameter: Tissue Value: Germinating Seeds
  misc_feature: MA Experiment ID: 108463 Result: Up-regulated in Transcription
  misc_feature: MA Experiment 108463 PARAMETER Experiment Name: At_Germinating_Seeds_cDNA_P Parameter: Age (day) Value: 3 vs. 0
  misc_feature: MA Experiment 108463 PARAMETER Experiment Name: At_Germinating_Seeds_cDNA_P Parameter: Tissue Value: Germinating Seeds
  misc_feature: MA Experiment ID: 108464 Result: Up-regulated in Transcription
  misc_feature: MA Experiment 108464 PARAMETER Experiment Name: At_Germinating_Seeds_cDNA_P Parameter: Age (day) Value: 4 vs. 0
  misc_feature: MA Experiment 108464 PARAMETER Experiment Name: At_Germinating_Seeds_cDNA_P Parameter: Tissue Value: Germinating Seeds
  misc_feature: MA Experiment ID: 108605 Result: Down-regulated in Transcription
  misc_feature: MA Experiment 108605 PARAMETER Experiment Name: At_100uM_ABA_cDNA_P Parameter: Timepoint (hr) Value: 6
  misc_feature: MA Experiment 108605 PARAMETER Experiment Name: At_100uM_ABA_cDNA_P Parameter: Tissue Value: Aerial
  misc_feature: MA Experiment 108605 PARAMETER Experiment Name: At_100uM_ABA_cDNA_P Parameter: Treatment Value: 100uM ABA vs. No Treatment
  misc_feature: MA Experiment ID: 108607 Result: Down-regulated in Transcription
  misc_feature: MA Experiment 108607 PARAMETER Experiment Name: At_100uM_ABA_cDNA_P Parameter: Timepoint (hr) Value: 4
  misc_feature: MA Experiment 108607 PARAMETER Experiment Name: At_100uM_ABA_cDNA_P Parameter: Tissue Value: Aerial
  misc_feature: MA Experiment 108607 PARAMETER Experiment Name: At_100uM_ABA_cDNA_P Parameter: Treatment Value: 100uM ABA vs. No Treatment
  misc_feature: MA Experiment ID: 20000071 Result: Down-regulated in Transcription
  misc_feature: MA Experiment 20000071 PARAMETER Experiment Name: At_100uM_ABA_Mutants_cDNA_P Parameter: Plant Line Value: CS8104
  misc_feature: MA Experiment 20000071 PARAMETER Experiment Name: At_100uM_ABA_Mutants_cDNA_P Parameter: Timepoint (hr) Value: 6
  misc_feature: MA Experiment 20000071 PARAMETER Experiment Name: At_100uM_ABA_Mutants_cDNA_P Parameter: Tissue Value: Aerial
  misc_feature: MA Experiment 20000071 PARAMETER Experiment Name: At_100uM_ABA_Mutants_cDNA_P Parameter: Treatment Value: 100uM ABA vs. No Treatment
  misc_feature: MA Experiment ID: 20000117 Result: Down-regulated in Transcription
  misc_feature: MA Experiment 20000117 PARAMETER Experiment Name: At_100uM_ABA_Mutants_cDNA_P Parameter: Plant Line Value: Columbia
  misc_feature: MA Experiment 20000117 PARAMETER Experiment Name: At_100uM_ABA_Mutants_cDNA_P Parameter: Timepoint (hr) Value: 6
  misc_feature: MA Experiment 20000117 PARAMETER Experiment Name: At_100uM_ABA_Mutants_cDNA_P Parameter: Tissue Value: Aerial
  misc_feature: MA Experiment 20000117 PARAMETER Experiment Name: At_100uM_ABA_Mutants_cDNA_P Parameter: Treatment Value: 100uM ABA vs. No Treatment
  misc_feature: MA Experiment ID: 20000169 Result: Down-regulated in Transcription
  misc_feature: MA Experiment 20000169 PARAMETER Experiment Name: At_100uM_ABA_P Parameter: Age (day) Value: 14
  misc_feature: MA Experiment 20000169 PARAMETER Experiment Name: At_100uM_ABA_P Parameter: Organism Value: A. thaliana
  misc_feature: MA Experiment 20000169 PARAMETER Experiment Name: At_100uM_ABA_P Parameter: Plant Line Value: WS
  misc_feature: MA Experiment 20000169 PARAMETER Experiment Name: At_100uM_ABA_P Parameter: Timepoint (hr) Value: 6
  misc_feature: MA Experiment 20000169 PARAMETER Experiment Name: At_100uM_ABA_P Parameter: Tissue Value: Aerial
  misc_feature: MA Experiment 20000169 PARAMETER Experiment Name: At_100uM_ABA_P Parameter: Treatment Value: 100uM ABA vs. No Treatment
  misc_feature: MA Experiment ID: 20000180 Result: Up-regulated in Transcription
  misc_feature: MA Experiment 20000180 PARAMETER Experiment Name: At_Germinating_Seeds_P Parameter: Age (hr) Value: 24 vs. 0
  misc_feature: MA Experiment 20000180 PARAMETER Experiment Name: At_Germinating_Seeds_P Parameter: Tissue Value: Germinating Seeds
  misc_feature: MA Experiment ID: 20000224 Result: Up-regulated in Transcription
  misc_feature: MA Experiment ID: 20000264 Result: Up-regulated in Transcription
  misc_feature: MA Experiment 20000264 PARAMETER Experiment Name: At_Open_Flower_P Parameter: Age (day) Value: 21
  misc_feature: MA Experiment 20000264 PARAMETER Experiment Name: At_Open_Flower_P Parameter: Plant Line Value: WS
  misc_feature: MA Experiment 20000264 PARAMETER Experiment Name: At_Open_Flower_P Parameter: Tissue Value: Open Flower vs. Whole Plant
  misc_feature: MA Experiment ID: 20000267 Result: Down-regulated in Transcription
  misc_feature: MA Experiment 20000267 PARAMETER Experiment Name: At_Drought_P Parameter: Age (day) Value: 7
  misc_feature: MA Experiment 20000267 PARAMETER Experiment Name: At_Drought_P Parameter: Organism Value: A. thaliana
  misc_feature: MA Experiment 20000267 PARAMETER Experiment Name: At_Drought_P Parameter: Plant Line Value: WS
  misc_feature: MA Experiment 20000267 PARAMETER Experiment Name: At_Drought_P Parameter: Timepoint (hr) Value: 6
  misc_feature: MA Experiment 20000267 PARAMETER Experiment Name: At_Drought_P Parameter: Tissue Value: Whole Plant
  misc_feature: MA Experiment 20000267 PARAMETER Experiment Name: At_Drought_P Parameter: Treatment Value: Drought vs. No Drought
  misc_feature: MA Experiment ID: 20000436 Result: Down-regulated in Transcription
  misc_feature: MA Experiment 20000436 PARAMETER Experiment Name: At_Drought_P Parameter: Age (day) Value: 7
  misc_feature: MA Experiment 20000436 PARAMETER Experiment Name: At_Drought_P Parameter: Organism Value: A. thaliana
  misc_feature: MA Experiment 20000436 PARAMETER Experiment Name: At_Drought_P Parameter: Plant Line Value: WS
  misc_feature: MA Experiment 20000436 PARAMETER Experiment Name: At_Drought_P Parameter: Timepoint (hr) Value: 12
  misc_feature: MA Experiment 20000436 PARAMETER Experiment Name: At_Drought_P Parameter: Tissue Value: Whole Plant
  misc_feature: MA Experiment 20000436 PARAMETER Experiment Name: At_Drought_P Parameter: Treatment Value: Drought vs. No Drought
  misc_feature: MA Experiment ID: 20000437 Result: Down-regulated in Transcription
  misc_feature: MA Experiment 20000437 PARAMETER Experiment Name: At_Drought_P Parameter: Age (day) Value: 8
  misc_feature: MA Experiment 20000437 PARAMETER Experiment Name: At_Drought_P Parameter: Organism Value: A. thaliana
  misc_feature: MA Experiment 20000437 PARAMETER Experiment Name: At_Drought_P Parameter: Plant Line Value: WS
  misc_feature: MA Experiment 20000437 PARAMETER Experiment Name: At_Drought_P Parameter: Timepoint (hr) Value: 24
  misc_feature: MA Experiment 20000437 PARAMETER Experiment Name: At_Drought_P Parameter: Tissue Value: Whole Plant
  misc_feature: MA Experiment 20000437 PARAMETER Experiment Name: At_Drought_P Parameter: Treatment Value: Drought vs. No Drought
  misc_feature: MA Experiment ID: 20000438 Result: Up-regulated in Transcription
  misc_feature: MA Experiment 20000438 PARAMETER Experiment Name: At_Shoots__P Parameter: Age (day) Value: 14
  misc_feature: MA Experiment 20000438 PARAMETER Experiment Name: At_Shoots__P Parameter: Tissue Value: Shoots vs. Whole Plant
  misc_feature: MA Experiment ID: 20000441 Result: Up-regulated in Transcription
  misc_feature: MA Experiment 20000441 PARAMETER Experiment Name: At_1uM_BR-BRZ__P Parameter: Tissue Value: Shoot Apices
  misc_feature: MA Experiment 20000441 PARAMETER Experiment Name: At_1uM_BR-BRZ__P Parameter: Treatment Value: 1uM BR vs. No Treatment
  misc_feature: MA Experiment ID: 20000443 Result: Up-regulated in Transcription
  misc_feature: MA Experiment 20000443 PARAMETER Experiment Name: At_1uM_BR-BRZ__P Parameter: Tissue Value: Shoot Apices
  misc_feature: MA Experiment 20000443 PARAMETER Experiment Name: At_1uM_BR-BRZ__P Parameter: Treatment Value: 1uM BRZ vs. No Treatment
  misc_feature: MA Experiment ID: 20000496 Result: Down-regulated in Transcription
  misc_feature: MA Experiment 20000496 PARAMETER Experiment Name: At_Guard_Cells_P Parameter: Harvest Date Value: 7/19/2002
  misc_feature: MA Experiment 20000496 PARAMETER Experiment Name: At_Guard_Cells_P Parameter: Organism Value: Canola
  misc_feature: MA Experiment 20000496 PARAMETER Experiment Name: At_Guard_Cells_P Parameter: Tissue Value: Guard Cells vs. Leaves
  misc_feature: MA Experiment ID: 20000794 Result: Up-regulated in Transcription
  misc_feature: MA Experiment 20000794 PARAMETER Experiment Name: At_Petals_P Parameter: Age (day) Value: 23-25 days
  misc_feature: MA Experiment 20000794 PARAMETER Experiment Name: At_Petals_P Parameter: Plant Line Value: WS
  misc_feature: MA Experiment 20000794 PARAMETER Experiment Name: At_Petals_P Parameter: Tissue Value: Petals vs. Whole plant
  misc_feature: MA Experiment ID: 20001451 Result: Down-regulated in Transcription
  misc_feature: MA Experiment 20001451 PARAMETER Experiment Name: At_Far-red-induction_P Parameter: Age (day) Value: 7
  misc_feature: MA Experiment 20001451 PARAMETER Experiment Name: At_Far-red-induction_P Parameter: Light Value: Far-red vs. White
  misc_feature: MA Experiment 20001451 PARAMETER Experiment Name: At_Far-red-induction_P Parameter: Organism Value: A. thaliana
  misc_feature: MA Experiment 20001451 PARAMETER Experiment Name: At_Far-red-induction_P Parameter: Plant Line Value: Columbia
  misc_feature: MA Experiment 20001451 PARAMETER Experiment Name: At_Far-red-induction_P Parameter: Timepoint (hr) Value: 24
  misc_feature: MA Experiment 20001451 PARAMETER Experiment Name: At_Far-red-induction_P Parameter: Tissue Value: Whole Plant
  misc_feature: MA Experiment ID: 20001554 Result: Down-regulated in Transcription
  misc_feature: MA Experiment 20001554 PARAMETER Experiment Name: At_Drought_Soil_Dry_P Parameter: Age (day) Value: 21
  misc_feature: MA Experiment 20001554 PARAMETER Experiment Name: At_Drought_Soil_Dry_P Parameter: Organism Value: A. thaliana
  misc_feature: MA Experiment 20001554 PARAMETER Experiment Name: At_Drought_Soil_Dry_P Parameter: Plant Line Value: WS
  misc_feature: MA Experiment 20001554 PARAMETER Experiment Name: At_Drought_Soil_Dry_P Parameter: Post Timepoint (hr) Value: None
  misc_feature: MA Experiment 20001554 PARAMETER Experiment Name: At_Drought_Soil_Dry_P Parameter: Post-Treatment Value: None
  misc_feature: MA Experiment 20001554 PARAMETER Experiment Name: At_Drought_Soil_Dry_P Parameter: Timepoint (day) Value: 7
  misc_feature: MA Experiment 20001554 PARAMETER Experiment Name: At_Drought_Soil_Dry_P Parameter: Treatment Value: Drought vs. No Drought
  misc_feature: MA Experiment ID: 20001555 Result: Down-regulated in Transcription
  misc_feature: MA Experiment 20001555 PARAMETER Experiment Name: At_Drought_Soil_Dry_P Parameter: Age (day) Value: 24
  misc_feature: MA Experiment 20001555 PARAMETER Experiment Name: At_Drought_Soil_Dry_P Parameter: Organism Value: A. thaliana
  misc_feature: MA Experiment 20001555 PARAMETER Experiment Name: At_Drought_Soil_Dry_P Parameter: Plant Line Value: WS
  misc_feature: MA Experiment 20001555 PARAMETER Experiment Name: At_Drought_Soil_Dry_P Parameter: Post Timepoint (hr) Value: None
  misc_feature: MA Experiment 20001555 PARAMETER Experiment Name: At_Drought_Soil_Dry_P Parameter: Post-Treatment Value: None
  misc_feature: MA Experiment 20001555 PARAMETER Experiment Name: At_Drought_Soil_Dry_P Parameter: Timepoint (day) Value: 10
  misc_feature: MA Experiment 20001555 PARAMETER Experiment Name: At_Drought_Soil_Dry_P Parameter: Treatment Value: Drought vs. No Drought
  misc_feature: MA Experiment ID: 20001556 Result: Down-regulated in Transcription
  misc_feature: MA Experiment 20001556 PARAMETER Experiment Name: At_Drought_Soil_Dry_P Parameter: Age (day) Value: 26
  misc_feature: MA Experiment 20001556 PARAMETER Experiment Name: At_Drought_Soil_Dry_P Parameter: Organism Value: A. thaliana
  misc_feature: MA Experiment 20001556 PARAMETER Experiment Name: At_Drought_Soil_Dry_P Parameter: Plant Line Value: WS
  misc_feature: MA Experiment 20001556 PARAMETER Experiment Name: At_Drought_Soil_Dry_P Parameter: Post Timepoint (hr) Value: None
  misc_feature: MA Experiment 20001556 PARAMETER Experiment Name: At_Drought_Soil_Dry_P Parameter: Post-Treatment Value: None
  misc_feature: MA Experiment 20001556 PARAMETER Experiment Name: At_Drought_Soil_Dry_P Parameter: Timepoint (day) Value: 12
  misc_feature: MA Experiment 20001556 PARAMETER Experiment Name: At_Drought_Soil_Dry_P Parameter: Treatment Value: Drought vs. No Drought
  misc_feature: MA Experiment ID: 20001559 Result: Down-regulated in Transcription
  misc_feature: MA Experiment 20001559 PARAMETER Experiment Name: At_Drought_Soil_Dry_P Parameter: Age (day) Value: 28
  misc_feature: MA Experiment 20001559 PARAMETER Experiment Name: At_Drought_Soil_Dry_P Parameter: Organism Value: A. thaliana
  misc_feature: MA Experiment 20001559 PARAMETER Experiment Name: At_Drought_Soil_Dry_P Parameter: Plant Line Value: WS
  misc_feature: MA Experiment 20001559 PARAMETER Experiment Name: At_Drought_Soil_Dry_P Parameter: Post Timepoint (hr) Value: 29
  misc_feature: MA Experiment 20001559 PARAMETER Experiment Name: At_Drought_Soil_Dry_P Parameter: Post-Treatment Value: Re-Water vs. No Drought
  misc_feature: MA Experiment 20001559 PARAMETER Experiment Name: At_Drought_Soil_Dry_P Parameter: Timepoint (day) Value: 14
  misc_feature: MA Experiment 20001559 PARAMETER Experiment Name: At_Drought_Soil_Dry_P Parameter: Treatment Value: Drought vs. No Drought
  misc_feature: MA Experiment ID: 20001771 Result: Up-regulated in Transcription
  misc_feature: MA Experiment 20001771 PARAMETER Experiment Name: At_Far-red-enriched-adult_P Parameter: Age (day) Value: 28
  misc_feature: MA Experiment 20001771 PARAMETER Experiment Name: At_Far-red-enriched-adult_P Parameter: Light Value: Far-red enriched vs. White
  misc_feature: MA Experiment 20001771 PARAMETER Experiment Name: At_Far-red-enriched-adult_P Parameter: Organism Value: A. thaliana
  misc_feature: MA Experiment 20001771 PARAMETER Experiment Name: At_Far-red-enriched-adult_P Parameter: Plant Line Value: Columbia
  misc_feature: MA Experiment 20001771 PARAMETER Experiment Name: At_Far-red-enriched-adult_P Parameter: Timepoint (hr) Value: 16
  misc_feature: MA Experiment 20001771 PARAMETER Experiment Name: At_Far-red-enriched-adult_P Parameter: Tissue Value: Aerial
  misc_feature: MA Experiment ID: 20001905 Result: Up-regulated in Transcription
  misc_feature: MA Experiment 20001905 PARAMETER Experiment Name: At_Drought_Reproduction_P Parameter: Age (day) Value: 40
  misc_feature: MA Experiment 20001905 PARAMETER Experiment Name: At_Drought_Reproduction_P Parameter: Organism Value: A. thaliana
  misc_feature: MA Experiment 20001905 PARAMETER Experiment Name: At_Drought_Reproduction_P Parameter: Plant Line Value: WS
  misc_feature: MA Experiment 20001905 PARAMETER Experiment Name: At_Drought_Reproduction_P Parameter: Timepoint (day) Value: 10
  misc_feature: MA Experiment 20001905 PARAMETER Experiment Name: At_Drought_Reproduction_P Parameter: Tissue Value: Rosettes
  misc_feature: MA Experiment 20001905 PARAMETER Experiment Name: At_Drought_Reproduction_P Parameter: Treatment Value: Drought vs. No Drought
  misc_feature: MA Experiment ID: 20001911 Result: Down-regulated in Transcription
  misc_feature: MA Experiment 20001911 PARAMETER Experiment Name: At_Drought_Reproduction_P Parameter: Age (day) Value: 40
  misc_feature: MA Experiment 20001911 PARAMETER Experiment Name: At_Drought_Reproduction_P Parameter: Organism Value: A. thaliana
  misc_feature: MA Experiment 20001911 PARAMETER Experiment Name: At_Drought_Reproduction_P Parameter: Plant Line Value: WS
  misc_feature: MA Experiment 20001911 PARAMETER Experiment Name: At_Drought_Reproduction_P Parameter: Timepoint (day) Value: 10
  misc_feature: MA Experiment 20001911 PARAMETER Experiment Name: At_Drought_Reproduction_P Parameter: Tissue Value: Flowers
  misc_feature: MA Experiment 20001911 PARAMETER Experiment Name: At_Drought_Reproduction_P Parameter: Treatment Value: Drought vs. No Drought
acatcaaagcaattaacaaatacacaacttgtaacttcaaatagattactttcaaagaagagagagagaaagaaagatggagaagaacatgaagtttccagtagtagacttgtccaaagctccaaattggggggaagagagagaccaaaccatggctctaatcaatgaagcttgtgagaattggggcttctttgagatagtgaaccatggattaccacatgacttaatggacaagatcgagaagatgacaaaggaccattacaagacatgccaagaacaaaagttcaatgacatgctcaagtccaaaggtttggataatcttgagacagaagtcgaagatgtcgattgggaaagcactttctacgttcgtcacctccctcaatccaatctcaatgacatttcagatgtgtctgatgaatacaggacggccatgaaagactttggtaagagactggagaatcttgctgaggatttgttggatctactgtgtgagaatctagggttagagaaagggggtatttgagaaagtgtttcatggaacaaaaggcccaacctttgggacaaaggtgagcaattatccaccatgtcctaaaccagagatgatcaaaggtcttagggcccacactgatgcaggaggcatcatcttgttgtttcaagacgacaaggtcagtggtctccagcttcttaaagatggtgactggattgatgttcctcctctcaaccactctattgtcatcaatcttggtgaccaacttgaggtgataaccaacgggaagtataagagtgtgctgcaccgtgtggtgactcaacaagaaggaaacaggatgtcggttgcatcgttttacaacccgggaagcgatgcggagatctcaccagctacttcgcttgtcgagaaagattccgagtacccgagtttcgtctttgatgactacatgaagctttatgcaggggtcaagtttcagcccaaggagccacggttcgcagcaatgaagaatgcttctgcagttacagaactgagtcctacagcagccgtagagactttctaaaaatggatttgagattcaagtgaagcagagaaagaaagatgattttgtgtgttatgtcaataagttaaaacttgtattagtgttgattaattgttggtcaattggtgtgttttaaagtgtggggtgtttatgtttatggaagatgataataattataaaaatctaaattctaagc

SEQ ID NO: 20490 - protein, 148 aa, Arabidopsis thaliana
  peptide (1)..(148): Ceres Seq. ID no. 12562216
  misc_feature (1)..(84): Pfam Name: 2OG-Fe(II) oxygenase superfamily Pfam Description: 2OG-Fe(II) oxygenase superfamily
  misc_feature (1)..(84): Pfam Name: 2OG-Fe(II) oxygenase superfamily Pfam Description: 2OG-Fe(II) oxygenase superfamily
  misc_feature (1)..(143): Homolog of NCBI NO: 1813891 NR Description: 1-aminocyclopropane-1-carboxylate oxidase [Betula
  misc_feature (1)..(143): Homolog of NCBI NO: 584711 NR Description: 1-aminocyclopropane-1-carboxylate oxidase 3 (ACC
  misc_feature (1)..(143): Homolog of NCBI NO: 18496053 NR Description: ACC oxidase 1 [Fagus sylvatica]
  misc_feature (1)..(148): Homolog of NCBI NO: 14148975 NR Description: ACC oxidase [Brassica rapa subsp. rapa]
  misc_feature (1)..(148): Homolog of NCBI NO: 7433194 NR Description: probable 1-aminocyclopropane-1-carboxylate
  misc_feature (1)..(143): Homolog of NCBI NO: 1813891 NR Description: 1-aminocyclopropane-1-carboxylate oxidase [Betula
  misc_feature (1)..(143): Homolog of NCBI NO: 18496053 NR Description: ACC oxidase 1 [Fagus sylvatica]
  misc_feature (1)..(148): Homolog of NCBI NO: 7433194 NR Description: probable 1-aminocyclopropane-1-carboxylate
  misc_feature (1)..(148): Homolog of NCBI NO: 587086 NR Description: ACC oxidase [Brassica oleracea]
  misc_feature (1)..(148): Homolog of NCBI NO: 728780 NR Description: 1-aminocyclopropane-1-carboxylate oxidase (ACC
  misc_feature (1)..(148): Homolog of NCBI NO: 7638440 NR Description: 1-aminocyclopropane-1-carboxylate oxidase
  misc_feature (1)..(148): Homolog of NCBI NO: 7433206 NR Description: probable 1-aminocyclopropane-1-carboxylate
  misc_feature (1)..(148): Homolog of NCBI NO: 15221170 NR Description: putative amino-cyclopropane-carboxylic acid
  misc_feature (1)..(148): Homolog of NCBI NO: 14148975 NR Description: ACC oxidase [Brassica rapa subsp. rapa]
  misc_feature (1)..(143): Homolog of NCBI NO: 584711 NR Description: 1-aminocyclopropane-1-carboxylate oxidase 3 (ACC
  misc_feature (1)..(148): Homolog of NCBI NO: 15221170 NR Description: putative amino-cyclopropane-carboxylic acid
  misc_feature (1)..(148): Homolog of NCBI NO: 7433206 NR Description: probable 1-aminocyclopropane-1-carboxylate
  misc_feature (1)..(148): Homolog of NCBI NO: 7638440 NR Description: 1-aminocyclopropane-1-carboxylate oxidase
  misc_feature (1)..(148): Homolog of NCBI NO: 728780 NR Description: 1-aminocyclopropane-1-carboxylate oxidase (ACC
  misc_feature (1)..(148): Homolog of NCBI NO: 587086 NR Description: ACC oxidase [Brassica oleracea]
MIKGLRAHTDAGGIILLFQDDKVSGLQLLKDGDWIDVPPLNHSIVINLGDQLEVITNGKYKSVLHRVVTQQEGNRMSVASFYNPGSDAEISPATSLVEKDSEYPSFVFDDYMKLYAGVKFQPKEPRFAAMKNASAVTELSPTAAVETF

SEQ ID NO: 20491 - protein, 148 aa, Arabidopsis thaliana
  peptide (1)..(148): Ceres Seq. ID no. 12562217
  misc_feature (7)..(148): Homolog of NCBI NO: 1813891 NR Description: 1-aminocyclopropane-1-carboxylate oxidase [Betula
  misc_feature (7)..(148): Homolog of NCBI NO: 584711 NR Description: 1-aminocyclopropane-1-carboxylate oxidase 3 (ACC
  misc_feature (7)..(148): Homolog of NCBI NO: 18496053 NR Description: ACC oxidase 1 [Fagus sylvatica]
  misc_feature (1)..(148): Homolog of NCBI NO: 14148975 NR Description: ACC oxidase [Brassica rapa subsp. rapa]
  misc_feature (1)..(148): Homolog of NCBI NO: 7433194 NR Description: probable 1-aminocyclopropane-1-carboxylate
  misc_feature (1)..(146): Homolog of NCBI NO: 15221170 NR Description: putative amino-cyclopropane-carboxylic acid
  misc_feature (1)..(148): Homolog of NCBI NO: 7433206 NR Description: probable 1-aminocyclopropane-1-carboxylate
  misc_feature (1)..(148): Homolog of NCBI NO: 7638440 NR Description: 1-aminocyclopropane-1-carboxylate oxidase
  misc_feature (1)..(148): Homolog of NCBI NO: 728780 NR Description: 1-aminocyclopropane-1-carboxylate oxidase (ACC
  misc_feature (1)..(148): Homolog of NCBI NO: 587086 NR Description: ACC oxidase [Brassica oleracea]
  misc_feature (1)..(148): Homolog of NCBI NO: 7433206 NR Description: probable 1-aminocyclopropane-1-carboxylate
  misc_feature (1)..(148): Homolog of NCBI NO: 7638440 NR Description: 1-aminocyclopropane-1-carboxylate oxidase
  misc_feature (1)..(148): Homolog of NCBI NO: 728780 NR Description: 1-aminocyclopropane-1-carboxylate oxidase (ACC
  misc_feature (1)..(148): Homolog of NCBI NO: 587086 NR Description: ACC oxidase [Brassica oleracea]
  misc_feature (7)..(148): Homolog of NCBI NO: 1813891 NR Description: 1-aminocyclopropane-1-carboxylate oxidase [Betula
  misc_feature (7)..(148): Homolog of NCBI NO: 584711 NR Description: 1-aminocyclopropane-1-carboxylate oxidase 3 (ACC
  misc_feature (7)..(148): Homolog of NCBI NO: 18496053 NR Description: ACC oxidase 1 [Fagus sylvatica]
  misc_feature (1)..(148): Homolog of NCBI NO: 14148975 NR Description: ACC oxidase [Brassica rapa subsp. rapa]
  misc_feature (1)..(148): Homolog of NCBI NO: 7433194 NR Description: probable 1-aminocyclopropane-1-carboxylate
  misc_feature (1)..(146): Homolog of NCBI NO: 15221170 NR Description: putative amino-cyclopropane-carboxylic acid
MEKNMKFPVVDLSKAPNWGEERDQTMALINEACENWGFFEIVNHGLPHDLMDKIEKMTKDHYKTCQEQKFNDMLKSKGLDNLETEVEDVDWESTFYVRHLPQSNLNDISDVSDEYRTAMKDFGKRLENLAEDLLDLLCENLGLEKGGI

SEQ ID NO: 20492 - protein, 144 aa, Arabidopsis thaliana
  peptide (1)..(144): Ceres Seq. ID no. 12562218
  misc_feature (3)..(144): Homolog of NCBI NO: 1813891 NR Description: 1-aminocyclopropane-1-carboxylate oxidase [Betula
  misc_feature (3)..(144): Homolog of NCBI NO: 584711 NR Description: 1-aminocyclopropane-1-carboxylate oxidase 3 (ACC
  misc_feature (3)..(144): Homolog of NCBI NO: 18496053 NR Description: ACC oxidase 1 [Fagus sylvatica]
  misc_feature (1)..(144): Homolog of NCBI NO: 14148975 NR Description: ACC oxidase [Brassica rapa subsp. rapa]
  misc_feature (1)..(144): Homolog of NCBI NO: 7433194 NR Description: probable 1-aminocyclopropane-1-carboxylate
  misc_feature (1)..(142): Homolog of NCBI NO: 15221170 NR Description: putative amino-cyclopropane-carboxylic acid
  misc_feature (1)..(144): Homolog of NCBI NO: 7433206 NR Description: probable 1-aminocyclopropane-1-carboxylate
  misc_feature (1)..(144): Homolog of NCBI NO: 7638440 NR Description: 1-aminocyclopropane-1-carboxylate oxidase
  misc_feature (1)..(144): Homolog of NCBI NO: 728780 NR Description: 1-aminocyclopropane-1-carboxylate oxidase (ACC
  misc_feature (1)..(144): Homolog of NCBI NO: 587086 NR Description: ACC oxidase [Brassica oleracea]
  misc_feature (3)..(144): Homolog of NCBI NO: 1813891 NR Description: 1-aminocyclopropane-1-carboxylate oxidase [Betula
  misc_feature (3)..(144): Homolog of NCBI NO: 584711 NR Description: 1-aminocyclopropane-1-carboxylate oxidase 3 (ACC
  misc_feature (3)..(144): Homolog of NCBI NO: 18496053 NR Description: ACC oxidase 1 [Fagus sylvatica]
  misc_feature (1)..(144): Homolog of NCBI NO: 14148975 NR Description: ACC oxidase [Brassica rapa subsp. rapa]
  misc_feature (1)..(144): Homolog of NCBI NO: 7433194 NR Description: probable 1-aminocyclopropane-1-carboxylate
  misc_feature (1)..(142): Homolog of NCBI NO: 15221170 NR Description: putative amino-cyclopropane-carboxylic acid
  misc_feature (1)..(144): Homolog of NCBI NO: 7433206 NR Description: probable 1-aminocyclopropane-1-carboxylate
  misc_feature (1)..(144): Homolog of NCBI NO: 7638440 NR Description: 1-aminocyclopropane-1-carboxylate oxidase
  misc_feature (1)..(144): Homolog of NCBI NO: 728780 NR Description: 1-aminocyclopropane-1-carboxylate oxidase (ACC
  misc_feature (1)..(144): Homolog of NCBI NO: 587086 NR Description: ACC oxidase [Brassica oleracea]
MKFPVVDLSKAPNWGEERDQTMALINEACENWGFFEIVNHGLPHDLMDKIEKMTKDHYKTCQEQKFNDMLKSKGLDNLETEVEDVDWESTFYVRHLPQSNLNDISDVSDEYRTAMKDFGKRLENLAEDLLDLLCENLGLEKGGI

SEQ ID NO: 20493 - DNA, 569 bp, Arabidopsis thaliana
  misc_feature (1)..(569): Ceres Seq. ID no. 12337669
  misc_feature: MA Experiment ID: 108434 Result: Down-regulated in Transcription
  misc_feature: MA Experiment 108434 PARAMETER Experiment Name: At_Root_Tips_cDNA_P Parameter: Tissue Value: Root Tips
  misc_feature: MA Experiment ID: 108473 Result: Up-regulated in Transcription
  misc_feature: MA Experiment 108473 PARAMETER Experiment Name: At_Drought_Flowers_cDNA_P Parameter: Timepoint (hr) Value: 7 d
  misc_feature: MA Experiment 108473 PARAMETER Experiment Name: At_Drought_Flowers_cDNA_P Parameter: Tissue Value: Flower
  misc_feature: MA Experiment 108473 PARAMETER Experiment Name: At_Drought_Flowers_cDNA_P Parameter: Treatment Value: Drought vs. No Drought
  misc_feature: MA Experiment ID: 108572 Result: Up-regulated in Transcription
  misc_feature: MA Experiment 108572 PARAMETER Experiment Name: At_Drought_cDNA_P Parameter: Timepoint (hr) Value: 1
  misc_feature: MA Experiment 108572 PARAMETER Experiment Name: At_Drought_cDNA_P Parameter: Tissue Value: Aerial
  misc_feature: MA Experiment 108572 PARAMETER Experiment Name: At_Drought_cDNA_P Parameter: Treatment Value: Drought vs. No Drought
  misc_feature: MA Experiment ID: 108594 Result: Down-regulated in Transcription
  misc_feature: MA Experiment 108594 PARAMETER Experiment Name: At_Ler-rhl_Root_cDNA_P Parameter: Plant Line Value: null
  misc_feature: MA Experiment ID: 108608 Result: Up-regulated in Transcription
  misc_feature: MA Experiment 108608 PARAMETER Experiment Name: At_100uM_ABA_cDNA_P Parameter: Timepoint (hr) Value: 1
  misc_feature: MA Experiment 108608 PARAMETER Experiment Name: At_100uM_ABA_cDNA_P Parameter: Tissue Value: Aerial
  misc_feature: MA Experiment 108608 PARAMETER Experiment Name: At_100uM_ABA_cDNA_P Parameter: Treatment Value: 100uM ABA vs. No Treatment
  misc_feature: MA Experiment ID: 108668 Result: Up-regulated in Transcription
  misc_feature: MA Experiment 108668 PARAMETER Experiment Name: At_2mM_SA_cDNA_P Parameter: Plant Line Value: WS
  misc_feature: MA Experiment 108668 PARAMETER Experiment Name: At_2mM_SA_cDNA_P Parameter: Timepoint (hr) Value: 6
  misc_feature: MA Experiment 108668 PARAMETER Experiment Name: At_2mM_SA_cDNA_P Parameter: Treatment Value: 2mM SA vs. No Treatment
  misc_feature: MA Experiment ID: 20000089 Result: Down-regulated in Transcription
  misc_feature: MA Experiment ID: 20000090 Result: Down-regulated in Transcription
  misc_feature: MA Experiment ID: 20000113 Result: Up-regulated in Transcription
  misc_feature: MA Experiment 20000113 PARAMETER Experiment Name: At_42deg_Heat_cDNA_P Parameter: Temperature (deg C) Value: 42 vs. 22
  misc_feature: MA Experiment 20000113 PARAMETER Experiment Name: At_42deg_Heat_cDNA_P Parameter: Timepoint (hr) Value: 8
  misc_feature: MA Experiment 20000113 PARAMETER Experiment Name: At_42deg_Heat_cDNA_P Parameter: Tissue Value: Aerial
  misc_feature: MA Experiment ID: 20000166 Result: Up-regulated in Transcription
  misc_feature: MA Experiment 20000166 PARAMETER Experiment Name: At_100uM_ABA_P Parameter: Age (day) Value: 14
  misc_feature: MA Experiment 20000166 PARAMETER Experiment Name: At_100uM_ABA_P Parameter: Organism Value: A. thaliana
  misc_feature: MA Experiment 20000166 PARAMETER Experiment Name: At_100uM_ABA_P Parameter: Plant Line Value: WS
  misc_feature: MA Experiment 20000166 PARAMETER Experiment Name: At_100uM_ABA_P Parameter: Timepoint (hr) Value: 1
  misc_feature: MA Experiment 20000166 PARAMETER Experiment Name: At_100uM_ABA_P Parameter: Tissue Value: Aerial
  misc_feature: MA Experiment 20000166 PARAMETER Experiment Name: At_100uM_ABA_P Parameter: Treatment Value: 100uM ABA vs. No Treatment
  misc_feature: MA Experiment ID: 20000182 Result: Up-regulated in Transcription
  misc_feature: MA Experiment 20000182 PARAMETER Experiment Name: At_2mM_SA_P Parameter: Age (day) Value: 14
  misc_feature: MA Experiment 20000182 PARAMETER Experiment Name: At_2mM_SA_P Parameter: Organism Value: A. thaliana
  misc_feature: MA Experiment 20000182 PARAMETER Experiment Name: At_2mM_SA_P Parameter: Plant Line Value: WS
  misc_feature: MA Experiment 20000182 PARAMETER Experiment Name: At_2mM_SA_P Parameter: Timepoint (hr) Value: 6
  misc_feature: MA Experiment 20000182 PARAMETER Experiment Name: At_2mM_SA_P Parameter: Tissue Value: Aerial
  misc_feature: MA Experiment 20000182 PARAMETER Experiment Name: At_2mM_SA_P Parameter: Treatment Value: 2mM SA vs. No Treatment
  misc_feature: MA Experiment ID: 20000185 Result: Up-regulated in Transcription
  misc_feature: MA Experiment 20000185 PARAMETER Experiment Name: At_Roots__P Parameter: Age (day) Value: 7 vs. 21
  misc_feature: MA Experiment 20000185 PARAMETER Experiment Name: At_Roots__P Parameter: Organism Value: A. thaliana
  misc_feature: MA Experiment 20000185 PARAMETER Experiment Name: At_Roots__P Parameter: Tissue Value: Roots vs. Whole Plant
  misc_feature: MA Experiment ID: 20000227 Result: Down-regulated in Transcription
  misc_feature: MA Experiment 20000227 PARAMETER Experiment Name: At_Root-Tips-vs-Tops_P Parameter: Tissue Value: Root Tips vs. Root Tops
  misc_feature: MA Experiment ID: 20000264 Result: Down-regulated in Transcription
  misc_feature: MA Experiment 20000264 PARAMETER Experiment Name: At_Open_Flower_P Parameter: Age (day) Value: 21
  misc_feature: MA Experiment 20000264 PARAMETER Experiment Name: At_Open_Flower_P Parameter: Plant Line Value: WS
  misc_feature: MA Experiment 20000264 PARAMETER Experiment Name: At_Open_Flower_P Parameter: Tissue Value: Open Flower vs. Whole Plant
  misc_feature: MA Experiment ID: 20000265 Result: Down-regulated in Transcription
  misc_feature: MA Experiment 20000265 PARAMETER Experiment Name: At_Open_Flower_P Parameter: Age (day) Value: 21
  misc_feature: MA Experiment 20000265 PARAMETER Experiment Name: At_Open_Flower_P Parameter: Plant Line Value: WS
  misc_feature: MA Experiment 20000265 PARAMETER Experiment Name: At_Open_Flower_P Parameter: Tissue Value: Closed Flower vs. Whole Plant
  misc_feature: MA Experiment ID: 20000267 Result: Up-regulated in Transcription
  misc_feature: MA Experiment 20000267 PARAMETER Experiment Name: At_Drought_P Parameter: Age (day) Value: 7
  misc_feature: MA Experiment 20000267 PARAMETER Experiment Name: At_Drought_P Parameter: Organism Value: A. thaliana
  misc_feature: MA Experiment 20000267 PARAMETER Experiment Name: At_Drought_P Parameter: Plant Line Value: WS
  misc_feature: MA Experiment 20000267 PARAMETER Experiment Name: At_Drought_P Parameter: Timepoint (hr) Value: 6
  misc_feature: MA Experiment 20000267 PARAMETER Experiment Name: At_Drought_P Parameter: Tissue Value: Whole Plant
  misc_feature: MA Experiment 20000267 PARAMETER Experiment Name: At_Drought_P Parameter: Treatment Value: Drought vs. No Drought
  misc_feature: MA Experiment ID: 20000268 Result: Up-regulated in Transcription
  misc_feature: MA Experiment 20000268 PARAMETER Experiment Name: At_100mM_NaCl__P Parameter: Age (day) Value: 14
  misc_feature: MA Experiment 20000268 PARAMETER Experiment Name: At_100mM_NaCl__P Parameter: Organism Value: A. thaliana
  misc_feature: MA Experiment 20000268 PARAMETER Experiment Name: At_100mM_NaCl__P Parameter: Plant Line Value: WS
  misc_feature: MA Experiment 20000268 PARAMETER Experiment Name: At_100mM_NaCl__P Parameter: Timepoint (hr) Value: 6
  misc_feature: MA Experiment 20000268 PARAMETER Experiment Name: At_100mM_NaCl__P Parameter: Tissue Value: Whole Plant
  misc_feature: MA Experiment 20000268 PARAMETER Experiment Name: At_100mM_NaCl__P Parameter: Treatment Value: 100mM NaCl vs. No Treatment
  misc_feature: MA Experiment ID: 20000286 Result: Down-regulated in Transcription
  misc_feature: MA Experiment 20000286 PARAMETER Experiment Name: At_Open_Flower_P Parameter: Age (day) Value: 21
  misc_feature: MA Experiment 20000286 PARAMETER Experiment Name: At_Open_Flower_P Parameter: Plant Line Value: WS
  misc_feature: MA Experiment 20000286 PARAMETER Experiment Name: At_Open_Flower_P Parameter: Tissue Value: Half Open vs. Whole Plant
  misc_feature: MA Experiment ID: 20000436 Result: Up-regulated in Transcription
  misc_feature: MA Experiment 20000436 PARAMETER Experiment Name: At_Drought_P Parameter: Age (day) Value: 7
  misc_feature: MA Experiment 20000436 PARAMETER Experiment Name: At_Drought_P Parameter: Organism Value: A. thaliana
  misc_feature: MA Experiment 20000436 PARAMETER Experiment Name: At_Drought_P Parameter: Plant Line Value: WS
  misc_feature: MA Experiment 20000436 PARAMETER Experiment Name: At_Drought_P Parameter: Timepoint (hr) Value: 12
  misc_feature: MA Experiment 20000436 PARAMETER Experiment Name: At_Drought_P Parameter: Tissue Value: Whole Plant
  misc_feature: MA Experiment 20000436 PARAMETER Experiment Name: At_Drought_P Parameter: Treatment Value: Drought vs. No Drought
  misc_feature: MA Experiment ID: 20000439 Result: Up-regulated in Transcription
  misc_feature: MA Experiment 20000439 PARAMETER Experiment Name: At_Roots__P Parameter: Age (day) Value: 14 vs. 21
  misc_feature: MA Experiment 20000439 PARAMETER Experiment Name: At_Roots__P Parameter: Organism Value: A. thaliana
  misc_feature: MA Experiment 20000439 PARAMETER Experiment Name: At_Roots__P Parameter: Tissue Value: Roots vs. Whole Plant
  misc_feature: MA Experiment ID: 20000495 Result: Up-regulated in Transcription
  misc_feature: MA Experiment 20000495 PARAMETER Experiment Name: At_Guard_Cells_P Parameter: Harvest Date Value: 8/2/2002
  misc_feature: MA Experiment 20000495 PARAMETER Experiment Name: At_Guard_Cells_P Parameter: Organism Value: A. thaliana
  misc_feature: MA Experiment 20000495 PARAMETER Experiment Name: At_Guard_Cells_P Parameter: Tissue Value: Guard Cells vs. Leaves
  misc_feature: MA Experiment ID: 20000573 Result: Down-regulated in Transcription
  misc_feature: MA Experiment 20000573 PARAMETER Experiment Name: At_100uM_ABA_Mutants__P Parameter: Organism Value: A. thaliana
  misc_feature: MA Experiment 20000573 PARAMETER Experiment Name: At_100uM_ABA_Mutants__P Parameter: Plant Line Value: CS22 vs. Ler wt
  misc_feature: MA Experiment 20000573 PARAMETER Experiment Name: At_100uM_ABA_Mutants__P Parameter: Timepoint (hr) Value: N/A
  misc_feature: MA Experiment 20000573 PARAMETER Experiment Name: At_100uM_ABA_Mutants__P Parameter: Tissue Value: Whole Plant
  misc_feature: MA Experiment 20000573 PARAMETER Experiment Name: At_100uM_ABA_Mutants__P Parameter: Treatment Value: None
  misc_feature: MA Experiment ID: 20000574 Result: Down-regulated in Transcription
  misc_feature: MA Experiment 20000574 PARAMETER Experiment Name: At_100uM_ABA_Mutants__P Parameter: Organism Value: A. thaliana
  misc_feature: MA Experiment 20000574 PARAMETER Experiment Name: At_100uM_ABA_Mutants__P Parameter: Plant Line Value: CS23 vs. Ler wt
  misc_feature: MA Experiment 20000574 PARAMETER Experiment Name: At_100uM_ABA_Mutants__P Parameter: Timepoint (hr) Value: N/A
  misc_feature: MA Experiment 20000574 PARAMETER Experiment Name: At_100uM_ABA_Mutants__P Parameter: Tissue Value: Whole Plant
  misc_feature: MA Experiment 20000574 PARAMETER Experiment Name: At_100uM_ABA_Mutants__P Parameter: Treatment Value: None
  misc_feature: MA Experiment ID: 20000709 Result: Down-regulated in Transcription
  misc_feature: MA Experiment 20000709 PARAMETER Experiment Name: At_15mM_NH4NO3_L-to-H_P Parameter: Age (hr) Value: 14
  misc_feature: MA Experiment 20000709 PARAMETER Experiment Name: At_15mM_NH4NO3_L-to-H_P Parameter: Organism Value: A. thaliana
  misc_feature: MA Experiment 20000709 PARAMETER Experiment Name: At_15mM_NH4NO3_L-to-H_P Parameter: Plant Line Value: WS
  misc_feature: MA Experiment 20000709 PARAMETER Experiment Name: At_15mM_NH4NO3_L-to-H_P Parameter: Timepoint (hr) Value: 4
  misc_feature: MA Experiment 20000709 PARAMETER Experiment Name: At_15mM_NH4NO3_L-to-H_P Parameter: Tissue Value: Aerial
  misc_feature: MA Experiment 20000709 PARAMETER Experiment Name: At_15mM_NH4NO3_L-to-H_P Parameter: Treatment Value: 15mM NH4NO3 vs. 30mM Mannitol
  misc_feature: MA Experiment ID: 20000794 Result: Down-regulated in Transcription
  misc_feature: MA Experiment 20000794 PARAMETER Experiment Name: At_Petals_P Parameter: Age (day) Value: 23-25 days
  misc_feature: MA Experiment 20000794 PARAMETER Experiment Name: At_Petals_P Parameter: Plant Line Value: WS
  misc_feature: MA Experiment 20000794 PARAMETER Experiment Name: At_Petals_P Parameter: Tissue Value: Petals vs. Whole plant
  misc_feature: MA Experiment ID: 20001248 Result: Down-regulated in Transcription
  misc_feature: MA Experiment 20001248 PARAMETER Experiment Name: At_Far-red-induction_P Parameter: Age (day) Value: 7
  misc_feature: MA Experiment 20001248 PARAMETER Experiment Name: At_Far-red-induction_P Parameter: Light Value: Far-red vs. White
  misc_feature: MA Experiment 20001248 PARAMETER Experiment Name: At_Far-red-induction_P Parameter: Organism Value: A. thaliana
  misc_feature: MA Experiment 20001248 PARAMETER Experiment Name: At_Far-red-induction_P Parameter: Plant Line Value: Columbia
  misc_feature: MA Experiment 20001248 PARAMETER Experiment Name: At_Far-red-induction_P Parameter: Timepoint (hr) Value: 4
  misc_feature: MA Experiment 20001248 PARAMETER Experiment Name: At_Far-red-induction_P Parameter: Tissue Value: Whole Plant
  misc_feature: MA Experiment ID: 20001554 Result: Up-regulated in Transcription
  misc_feature: MA Experiment 20001554 PARAMETER Experiment Name: At_Drought_Soil_Dry_P Parameter: Age (day) Value: 21
  misc_feature: MA Experiment 20001554 PARAMETER Experiment Name: At_Drought_Soil_Dry_P Parameter: Organism Value: A. thaliana
  misc_feature: MA Experiment 20001554 PARAMETER Experiment Name: At_Drought_Soil_Dry_P Parameter: Plant Line Value: WS
  misc_feature: MA Experiment 20001554 PARAMETER Experiment Name: At_Drought_Soil_Dry_P Parameter: Post Timepoint (hr) Value: None
  misc_feature: MA Experiment 20001554 PARAMETER Experiment Name: At_Drought_Soil_Dry_P Parameter: Post-Treatment Value: None
  misc_feature: MA Experiment 20001554 PARAMETER Experiment Name: At_Drought_Soil_Dry_P Parameter: Timepoint (day) Value: 7
  misc_feature: MA Experiment 20001554 PARAMETER Experiment Name: At_Drought_Soil_Dry_P Parameter: Treatment Value: Drought vs. No Drought
  misc_feature: MA Experiment ID: 20001555 Result: Up-regulated in Transcription
  misc_feature: MA Experiment 20001555 PARAMETER Experiment Name: At_Drought_Soil_Dry_P Parameter: Age (day) Value: 24
  misc_feature: MA Experiment 20001555 PARAMETER Experiment Name: At_Drought_Soil_Dry_P Parameter: Organism Value: A. thaliana
  misc_feature: MA Experiment 20001555 PARAMETER Experiment Name: At_Drought_Soil_Dry_P Parameter: Plant Line Value: WS
  misc_feature: MA Experiment 20001555 PARAMETER Experiment Name: At_Drought_Soil_Dry_P Parameter: Post Timepoint (hr) Value: None
  misc_feature: MA Experiment 20001555 PARAMETER Experiment Name: At_Drought_Soil_Dry_P Parameter: Post-Treatment Value: None
  misc_feature: MA Experiment 20001555 PARAMETER Experiment Name: At_Drought_Soil_Dry_P Parameter: Timepoint (day) Value: 10
  misc_feature: MA Experiment 20001555 PARAMETER Experiment Name: At_Drought_Soil_Dry_P Parameter: Treatment Value: Drought vs. No Drought
  misc_feature: MA Experiment ID: 20001557 Result: Down-regulated in Transcription
  misc_feature: MA Experiment 20001557 PARAMETER Experiment Name: At_Drought_Soil_Dry_P Parameter: Age (day) Value: 27
  misc_feature: MA Experiment 20001557 PARAMETER Experiment Name: At_Drought_Soil_Dry_P Parameter: Organism Value: A. thaliana
  misc_feature: MA Experiment 20001557 PARAMETER Experiment Name: At_Drought_Soil_Dry_P Parameter: Plant Line Value: WS
  misc_feature: MA Experiment 20001557 PARAMETER Experiment Name: At_Drought_Soil_Dry_P Parameter: Post Timepoint (hr) Value: 3
  misc_feature: MA Experiment 20001557 PARAMETER Experiment Name: At_Drought_Soil_Dry_P Parameter: Post-Treatment Value: Re-Water vs. No Drought
  misc_feature: MA Experiment 20001557 PARAMETER Experiment Name: At_Drought_Soil_Dry_P Parameter: Timepoint (day) Value: 13
  misc_feature: MA Experiment 20001557 PARAMETER Experiment Name: At_Drought_Soil_Dry_P Parameter: Treatment Value: Drought vs. No Drought
  misc_feature: MA Experiment ID: 20001558 Result: Down-regulated in Transcription
  misc_feature: MA Experiment 20001558 PARAMETER Experiment Name: At_Drought_Soil_Dry_P Parameter: Age (day) Value: 27
  misc_feature: MA Experiment 20001558 PARAMETER Experiment Name: At_Drought_Soil_Dry_P Parameter: Organism Value: A. thaliana
  misc_feature: MA Experiment 20001558 PARAMETER Experiment Name: At_Drought_Soil_Dry_P Parameter: Plant Line Value: WS
  misc_feature: MA Experiment 20001558 PARAMETER Experiment Name: At_Drought_Soil_Dry_P Parameter: Post Timepoint (hr) Value: 6
  misc_feature: MA Experiment 20001558 PARAMETER Experiment Name: At_Drought_Soil_Dry_P Parameter: Post-Treatment Value: Re-Water vs. No Drought
  misc_feature: MA Experiment 20001558 PARAMETER Experiment Name: At_Drought_Soil_Dry_P Parameter: Timepoint (day) Value: 13
  misc_feature: MA Experiment 20001558 PARAMETER Experiment Name: At_Drought_Soil_Dry_P Parameter: Treatment Value: Drought vs. No Drought
  misc_feature: MA Experiment ID: 20001560 Result: Down-regulated in Transcription
  misc_feature: MA Experiment 20001560 PARAMETER Experiment Name: At_Drought_Soil_Dry_P Parameter: Age (day) Value: 28
  misc_feature: MA Experiment 20001560 PARAMETER Experiment Name: At_Drought_Soil_Dry_P Parameter: Organism Value: A. thaliana
  misc_feature: MA Experiment 20001560 PARAMETER Experiment Name: At_Drought_Soil_Dry_P Parameter: Plant Line Value: WS
  misc_feature: MA Experiment 20001560 PARAMETER Experiment Name: At_Drought_Soil_Dry_P Parameter: Post Timepoint (hr) Value: None
  misc_feature: MA Experiment 20001560 PARAMETER Experiment Name: At_Drought_Soil_Dry_P Parameter: Post-Treatment Value: None
  misc_feature: MA Experiment 20001560 PARAMETER Experiment Name: At_Drought_Soil_Dry_P Parameter: Timepoint (day) Value: 14
  misc_feature: MA Experiment 20001560 PARAMETER Experiment Name: At_Drought_Soil_Dry_P Parameter: Treatment Value: Drought vs. No Drought
  misc_feature: MA Experiment ID: 20001905 Result: Up-regulated in Transcription
  misc_feature: MA Experiment 20001905 PARAMETER Experiment Name: At_Drought_Reproduction_P Parameter: Age (day) Value: 40
  misc_feature: MA Experiment 20001905 PARAMETER Experiment Name: At_Drought_Reproduction_P Parameter: Organism Value: A. thaliana
  misc_feature: MA Experiment 20001905 PARAMETER Experiment Name: At_Drought_Reproduction_P Parameter: Plant Line Value: WS
  misc_feature: MA Experiment 20001905 PARAMETER Experiment Name: At_Drought_Reproduction_P Parameter: Timepoint (day) Value: 10
  misc_feature: MA Experiment 20001905 PARAMETER Experiment Name: At_Drought_Reproduction_P Parameter: Tissue Value: Rosettes
  misc_feature: MA Experiment 20001905 PARAMETER Experiment Name: At_Drought_Reproduction_P Parameter: Treatment Value: Drought vs. No Drought
  misc_feature: MA Experiment ID: 20001910 Result: Up-regulated in Transcription
  misc_feature: MA Experiment 20001910 PARAMETER Experiment Name: At_Drought_Reproduction_P Parameter: Age (day) Value: 37
  misc_feature: MA Experiment 20001910 PARAMETER Experiment Name: At_Drought_Reproduction_P Parameter: Organism Value: A. thaliana
  misc_feature: MA Experiment 20001910 PARAMETER Experiment Name: At_Drought_Reproduction_P Parameter: Plant Line Value: WS
  misc_feature: MA Experiment 20001910 PARAMETER Experiment Name: At_Drought_Reproduction_P Parameter: Timepoint (day) Value: 7
  misc_feature: MA Experiment 20001910 PARAMETER Experiment Name: At_Drought_Reproduction_P Parameter: Tissue Value: Flowers
  misc_feature: MA Experiment 20001910 PARAMETER Experiment Name: At_Drought_Reproduction_P Parameter: Treatment Value: Drought vs. No Drought
  misc_feature: MA Experiment ID: 20001911 Result: Up-regulated in Transcription
  misc_feature: MA Experiment 20001911 PARAMETER Experiment Name: At_Drought_Reproduction_P Parameter: Age (day) Value: 40
  misc_feature: MA Experiment 20001911 PARAMETER Experiment Name: At_Drought_Reproduction_P Parameter: Organism Value: A. thaliana
  misc_feature: MA Experiment 20001911 PARAMETER Experiment Name: At_Drought_Reproduction_P Parameter: Plant Line Value: WS
  misc_feature: MA Experiment 20001911 PARAMETER Experiment Name: At_Drought_Reproduction_P Parameter: Timepoint (day) Value: 10
  misc_feature: MA Experiment 20001911 PARAMETER Experiment Name: At_Drought_Reproduction_P Parameter: Tissue Value: Flowers
  misc_feature: MA Experiment 20001911 PARAMETER Experiment Name: At_Drought_Reproduction_P Parameter: Treatment Value: Drought vs. No Drought
gttgggtttcttctccctttctacatcctctctcttctcttcctctatactttcatctaatggccggcctgagatggagagagtggtggaacacgatggccttccccacccggcgtatctggaatcgtttcaccgttcgcgtcgggtttcgacacagcggacttttgagattacaacatgacgtgagttcttgcgagtatgaagacatacacataatgtggaatttgttacacaagaacgaagatcttacacgcgtaccaatccaacaacaacaacaacaacaacagaggaagaaaccttgttggaatcttcttggttcgtatctttgccaaagattctgatccgttttatgatataaaccaaaccattgttgtatttgagagagccttgacgggtcccttgcagtgtggtgtggttttattgacaaatttcgcaaataatgaatccgaggttgcagagttttaattagctgttatatattccattgcatacctctatgtacttatcatcacatgagtgttgtatatatattacaaaatgcttcacatagtttgatactacctatgttc

SEQ ID NO: 20494 - protein, 112 aa, Arabidopsis thaliana
  peptide (1)..(112): Ceres Seq. ID no. 12337670
  misc_feature (33)..(112): Homolog of NCBI NO: 34915322 NR Description: hypothetical protein~similar to Oryza sativa
  misc_feature (28)..(102): Homolog of NCBI NO: 38344154 NR Description: OSJNBa0041A02.21 [Oryza sativa (japonica
  misc_feature (33)..(91): Homolog of NCBI NO: 17027277 NR Description: unknown protein [Oryza sativa (japonica
  misc_feature (28)..(78): Homolog of NCBI NO: 26006485 NR Description: Unknown protein [Oryza sativa (japonica
  misc_feature (20)..(112): Homolog of NCBI NO: 15239192 NR Description: unknown protein; protein id: At5g43150.1
WVSSPFLHPLSSLPLYFHLMAGLRWREWWNTMAFPTRRIWNRFTVRVGFRHSGLLRLQHDVSSCEYEDIHIMWNLLHKNEDLTRVPIQQQQQQQQRKKPCWNLLGSYLCQRF

SEQ ID NO: 20495 - protein, 93 aa, Arabidopsis thaliana
  peptide (1)..(93): Ceres Seq. ID no. 12337671
  misc_feature (14)..(93): Homolog of NCBI NO: 34915322 NR Description: hypothetical protein~similar to Oryza sativa
  misc_feature (9)..(83): Homolog of NCBI NO: 38344154 NR Description: OSJNBa0041A02.21 [Oryza sativa (japonica
  misc_feature (14)..(72): Homolog of NCBI NO: 17027277 NR Description: unknown protein [Oryza sativa (japonica
  misc_feature (9)..(59): Homolog of NCBI NO: 26006485 NR Description: Unknown protein [Oryza sativa (japonica
  misc_feature (1)..(93): Homolog of NCBI NO: 15239192 NR Description: unknown protein; protein id: At5g43150.1
MAGLRWREWWNTMAFPTRRIWNRFTVRVGFRHSGLLRLQHDVSSCEYEDIHIMWNLLHKNEDLTRVPIQQQQQQQQRKKPCWNLLGSYLCQRF

SEQ ID NO: 20496 - protein, 81 aa, Arabidopsis thaliana
  peptide (1)..(81): Ceres Seq. ID no. 12337672
  misc_feature (2)..(81): Homolog of NCBI NO: 34915322 NR Description: hypothetical protein~similar to Oryza sativa
  misc_feature (1)..(71): Homolog of NCBI NO: 38344154 NR Description: OSJNBa0041A02.21 [Oryza sativa (japonica
  misc_feature (2)..(60): Homolog of NCBI NO: 17027277 NR Description: unknown protein [Oryza sativa (japonica
  misc_feature (1)..(47): Homolog of NCBI NO: 26006485 NR Description: Unknown protein [Oryza sativa (japonica
  misc_feature (1)..(81): Homolog of NCBI NO: 15239192 NR Description: unknown protein; protein id: At5g43150.1
MAFPTRRIWNRFTVRVGFRHSGLLRLQHDVSSCEYEDIHIMWNLLHKNEDLTRVPIQQQQQQQQRKKPCWNLLGSYLCQRF

SEQ ID NO: 20497 - DNA, 1768 bp, Arabidopsis thaliana
  misc_feature (1)..(1768): Ceres Seq. ID no. 12327642
  misc_feature: MA Experiment ID: 20000184 Result: Up-regulated in Transcription
  misc_feature: MA Experiment 20000184 PARAMETER Experiment Name: At_Shoots__P Parameter: Age (day) Value: 7
  misc_feature: MA Experiment 20000184 PARAMETER Experiment Name: At_Shoots__P Parameter: Tissue Value: Shoots vs. Whole Plant
  misc_feature: MA Experiment ID: 20000224 Result: Down-regulated in Transcription
  misc_feature: MA Experiment ID: 20001558 Result: Down-regulated in Transcription
  misc_feature: MA Experiment 20001558 PARAMETER Experiment Name: At_Drought_Soil_Dry_P Parameter: Age (day) Value: 27
  misc_feature: MA Experiment 20001558 PARAMETER Experiment Name: At_Drought_Soil_Dry_P Parameter: Organism Value: A. thaliana
  misc_feature: MA Experiment 20001558 PARAMETER Experiment Name: At_Drought_Soil_Dry_P Parameter: Plant Line Value: WS
  misc_feature: MA Experiment 20001558 PARAMETER Experiment Name: At_Drought_Soil_Dry_P Parameter: Post Timepoint (hr) Value: 6
  misc_feature: MA Experiment 20001558 PARAMETER Experiment Name: At_Drought_Soil_Dry_P Parameter: Post-Treatment Value: Re-Water vs. No Drought
  misc_feature: MA Experiment 20001558 PARAMETER Experiment Name: At_Drought_Soil_Dry_P Parameter: Timepoint (day) Value: 13
  misc_feature: MA Experiment 20001558 PARAMETER Experiment Name: At_Drought_Soil_Dry_P Parameter: Treatment Value: Drought vs. No Drought
acaaaatagaattgatctctcttcttcattctctctcttctcgatctacccaaagtagcgggagcgaatagtaaaacaatgaccgatcaccaccaccaccaccataaccaccacgcgcggctgagccgcctccgtacaacaacacagctcctccgtcaaacaacatcttctttctcttcccaccctctcactttcatcttcctcactttcctcctcttctctttccattctctcgtcgatcattgctctctcctcttaacatctttcgtcgacagtgacccttctcttcgctctctcctctctcgactccctcttaactctcgctcccataccccgacgcgcttcaatcatcaccgacgtgctccgtttcttcagctcacgcgccttggtaccctcgacgacgacttcttctccacagacgaacacgatcctcatcgccgatcgcttcaaggctcttcctttcgttcacccatcaacgccaccactgtattcctctccggatttgagagcatttctggcttctctcgtcctatcatcgataacggacttctccttcctcagatcattcgctccggtatcgttttgcggcagcttgagaaggaagaccatggcggcgatgaagacgagacggaattggatgaatctgagctcgatcgtgaaagtgagaagaaagataaagactttgagagttttgtggatctgaagatgatttttaaaggattggagctaggacgtagtgacgcagcggctctgttcttcttggtgagctttttatcagctgcgtatggatgggtgattctagggtttacaactgtttactcattggtgttggcgattatgtttgttactgtaatcaacgatttgcttggtaggtttccttcgtttcttggggttttttggagaggttcaagattggggtttaagagagttacaggatttgttttaatgagatgggcagtgagagatgctttgacacagcttcttggtttatggtacttcggagaggttgaagatcagtactcgtttttcaggctctttgtgaggttaaagctgatgcctttcactgttatgccgccatggattagaggttttgagaaggagatatctggtttcttgttcgcttggtttctacttgatacacttgttggtttgatattagctgttgatgcgtttgttgctattgtggattcgagaaggagaggaagggagatagtgaaggaaggtttatatttgatatctcttttgttgcatcaggctgtgcagctgaagtgtcttgaagcgattctttgtgggtctttcttcagatgggttttgattcgaatggtagggaaaagctttgcttctgtgatccaatctgcgttggaagtttacttcatggcggcttggttagtgttctacttagcagctaagtgtaaagatgcacacgcagatggtaggaggtttgggagaagagaaatggagagcttgatcgatgggctgagatgataatgaattgtggatctgtaggatgagctttttgtttccaaaggagcaaaccttggcttcgatgcttaatgccagtggcgacatctctgtgctactagttgtcatgacttaggttcctttggttttagaattacagttgattgataagaattgctagcaattcgatgtatgtacgcacctaggattacttgggagctgtgaaagagggagaatgatacaactactgtgtataatcatttgcaagattttcctttgtatatatcttgctgcagtttttgatatc

SEQ ID NO: 20498 - protein, 468 aa, Arabidopsis thaliana
  peptide (1)..(468): Ceres Seq. ID no. 12327643
  misc_feature (215)..(447): Homolog of NCBI NO: 37535392 NR Description: hypothetical protein [Oryza sativa (japonica
  misc_feature (417)..(468): Homolog of NCBI NO: 30687010 NR Description: expressed protein [Arabidopsis thaliana]
  misc_feature (1)..(403): Homolog of NCBI NO: 30687010 NR Description: expressed protein [Arabidopsis thaliana]
MTDHHHHHHNHHARLSRLRTTTQLLRQTTSSFSSHPLTFIFLTFLLFSFHSLVDHCSLLLTSFVDSDPSLRSLLSRLPLNSRSHTPTRFNHHRRAPFLQLTRLGTLDDDFFSTDEHDPHRRSLQGSSFRSPINATTVFLSGFESISGFSRPIIDNGLLLPQIIRSGIVLRQLEKEDHGGDEDETELDESELDRESEKKDKDFESFVDLKMIFKGLELGRSDAAALFFLVSFLSAAYGWVILGFTTVYSLVLAIMFVTVINDLLGRFPSFLGVFWRGSRLGFKRVTGFVLMRWAVRDALTQLLGLWYFGEVEDQYSFFRLFVRLKLMPFTVMPPWIRGFEKEISGFLFAWFLLDTLVGLILAVDAFVAIVDSRRRGREIVKEGLYLISLLLHQAVQLKCLEAILCGSFFRWVLIRMVGKSFASVIQSALEVYFMAAWLVFYLAAKCKDAHADGRRFGRREMESLIDGLR

SEQ ID NO: 20499 - protein, 259 aa, Arabidopsis thaliana
  peptide (1)..(259): Ceres Seq. ID no. 12327644
  misc_feature (6)..(238): Homolog of NCBI NO: 37535392 NR Description: hypothetical protein [Oryza sativa (japonica
  misc_feature (208)..(259): Homolog of NCBI NO: 30687010 NR Description: expressed protein [Arabidopsis thaliana]
  misc_feature (1)..(194): Homolog of NCBI NO: 30687010 NR Description: expressed protein [Arabidopsis thaliana]
MIFKGLELGRSDAAALFFLVSFLSAAYGWVILGFTTVYSLVLAIMFVTVINDLLGRFPSFLGVFWRGSRLGFKRVTGFVLMRWAVRDALTQLLGLWYFGEVEDQYSFFRLFVRLKLMPFTVMPPWIRGFEKEISGFLFAWFLLDTLVGLILAVDAFVAIVDSRRRGREIVKEGLYLISLLLHQAVQLKCLEAILCGSFFRWVLIRMVGKSFASVIQSALEVYFMAAWLVFYLAAKCKDAHADGRRFGRREMESLIDGLR

SEQ ID NO: 20500 - DNA, 964 bp, Arabidopsis thaliana
  misc_feature (1)..(964): Ceres Seq. ID no. 13491587
  misc_feature: MA Experiment ID: 108595 Result: Up-regulated in Transcription
  misc_feature: MA Experiment 108595 PARAMETER Experiment Name: At_Ler-pi_Ovule_cDNA_P Parameter: Plant Line Value: null
  misc_feature: MA Experiment ID: 20000171 Result: Up-regulated in Transcription
  misc_feature: MA Experiment 20000171 PARAMETER Experiment Name: At_42deg_Heat_P Parameter: Age (day) Value: 14
  misc_feature: MA Experiment 20000171 PARAMETER Experiment Name: At_42deg_Heat_P Parameter: Organism Value: A. thaliana
  misc_feature: MA Experiment 20000171 PARAMETER Experiment Name: At_42deg_Heat_P Parameter: Plant Line Value: WS
  misc_feature: MA Experiment 20000171 PARAMETER Experiment Name: At_42deg_Heat_P Parameter: Temperature (deg C) Value: 42 vs. 22
  misc_feature: MA Experiment 20000171 PARAMETER Experiment Name: At_42deg_Heat_P Parameter: Timepoint (hr) Value: 1
  misc_feature: MA Experiment 20000171 PARAMETER Experiment Name: At_42deg_Heat_P Parameter: Tissue Value: Aerial
  misc_feature: MA Experiment ID: 20000173 Result: Up-regulated in Transcription
  misc_feature: MA Experiment 20000173 PARAMETER Experiment Name: At_42deg_Heat_P Parameter: Age (day) Value: 14
  misc_feature: MA Experiment 20000173 PARAMETER Experiment Name: At_42deg_Heat_P Parameter: Organism Value: A. thaliana
  misc_feature: MA Experiment 20000173 PARAMETER Experiment Name: At_42deg_Heat_P Parameter: Plant Line Value: WS
  misc_feature: MA Experiment 20000173 PARAMETER Experiment Name: At_42deg_Heat_P Parameter: Temperature (deg C) Value: 42 vs. 22
  misc_feature: MA Experiment 20000173 PARAMETER Experiment Name: At_42deg_Heat_P Parameter: Timepoint (hr) Value: 6
  misc_feature: MA Experiment 20000173 PARAMETER Experiment Name: At_42deg_Heat_P Parameter: Tissue Value: Aerial
  misc_feature: MA Experiment ID: 20000234 Result: Down-regulated in Transcription
  misc_feature: MA Experiment 20000234 PARAMETER Experiment Name: At_Siliques_P Parameter: Age (day) Value: 21
  misc_feature: MA Experiment 20000234 PARAMETER Experiment Name: At_Siliques_P Parameter: Organism Value: A. thaliana
  misc_feature: MA Experiment 20000234 PARAMETER Experiment Name: At_Siliques_P Parameter: Plant Line Value: WS
  misc_feature: MA Experiment 20000234 PARAMETER Experiment Name: At_Siliques_P Parameter: Tissue Value: Less Than 5mm Siliques vs. Whole Plant
  misc_feature: MA Experiment ID: 20000264 Result: Down-regulated in Transcription
  misc_feature: MA Experiment 20000264 PARAMETER Experiment Name: At_Open_Flower_P Parameter: Age (day) Value: 21
  misc_feature: MA Experiment 20000264 PARAMETER Experiment Name: At_Open_Flower_P Parameter: Plant Line Value: WS
  misc_feature: MA Experiment 20000264 PARAMETER Experiment Name: At_Open_Flower_P Parameter: Tissue Value: Open Flower vs. Whole Plant
  misc_feature: MA Experiment ID: 20000286 Result: Down-regulated in Transcription
  misc_feature: MA Experiment 20000286 PARAMETER Experiment Name: At_Open_Flower_P Parameter: Age (day) Value: 21
  misc_feature: MA Experiment 20000286 PARAMETER Experiment Name: At_Open_Flower_P Parameter: Plant Line Value: WS
  misc_feature: MA Experiment 20000286 PARAMETER Experiment Name: At_Open_Flower_P Parameter: Tissue Value: Half Open vs. Whole Plant
  misc_feature: MA Experiment ID: 20000794 Result: Down-regulated in Transcription
  misc_feature: MA Experiment 20000794 PARAMETER Experiment Name: At_Petals_P Parameter: Age (day) Value: 23-25 days
  misc_feature: MA Experiment 20000794 PARAMETER Experiment Name: At_Petals_P Parameter: Plant Line Value: WS
  misc_feature: MA Experiment 20000794 PARAMETER Experiment Name: At_Petals_P Parameter: Tissue Value: Petals vs. Whole plant
tccaaacttcgtctcccccaattgaacgagcaaaagttgcagagcacacacacacactttcaagtttcaatacagagatggcgaggcactgagccagagcgtgagaaccgtgaagatgaaaccgaagtcaacgaagatgaagataccggagctcaggtagctccgatcgttaggcttgaagaggttgcagtcaccaccggcgaagaagatgaagacgccgtcctcgatctgaaatcgaagatgtatcgatttgataaagaagggaaccaatggaagagaggagctggaactgtgaaattattgaagcataaggaaactggaaaagttcgtcttgttatgagacaatctaaaaccctaaagatctgtgccaatcacctcatttcgtctgggatgagtgttcaggaacatagtgggaatgaaaagtcttgtttatggcacgctactgatttctccgacggcgagttgaaagatgagcttttctgcattcgatttgcttccattgagaattgcaaaacatttatggagaagttcactgaaatagctgaaagccagcaagtagggaaagagagcacagagggcgatgaggcagctggtttaatagagaatctatcggttgaagaaaagaaaagtgtggagcaagccaaggaagcagaagagaaagagcctgcaaaggaagataaagaaacaaaaaaggagaaggtagaagaagagaagaaaacagagacaagcacttaaatgatcaaattaaaattggtttttggtaacacaaagtgtgctttgctttgttttaatatattatacttggcactgaacatgatggtagcttcaaaagtttgagtcttgcgctgtgttagagaaagttgaatcttaagtttttttatgttcttgtaagtgtttgactattgtgtggtctatttactgtgtcgttttggtttaagataatagtatttggcctcaaattagt

SEQ ID NO: 20501 - protein, 244 aa, Arabidopsis thaliana
  peptide (1)..(244): Ceres Seq. ID no. 13491588
  misc_feature (63)..(183): Pfam Name: RanBP1 domain Pfam Description: RanBP1 domain
  misc_feature (63)..(183): Pfam Name: RanBP1 domain Pfam Description: RanBP1 domain
  misc_feature (30)..(232): Homolog of NCBI NO: 38174136 NR Description: Unknown (protein for MGC:76028) [Silurana
  misc_feature (31)..(238): Homolog of NCBI NO: 14091665 NR Description: Ran binding protein-1 [Lycopersicon esculentum]
  misc_feature (31)..(244): Homolog of NCBI NO: 5106769 NR Description: Ran-binding protein siRanBP [Arabidopsis thaliana]
  misc_feature (31)..(243): Homolog of NCBI NO: 2058282 NR Description: atranbp1a [Arabidopsis thaliana]
  misc_feature (31)..(243): Homolog of NCBI NO: 15222310 NR Description: Ran-binding protein (atranbp1a) [Arabidopsis
  misc_feature (30)..(232): Homolog of NCBI NO: 38174136 NR Description: Unknown (protein for MGC:76028) [Silurana
  misc_feature (31)..(244): Homolog of NCBI NO: 5106769 NR Description: Ran-binding protein siRanBP [Arabidopsis thaliana]
  misc_feature (31)..(243): Homolog of NCBI NO: 15222310 NR Description: Ran-binding protein (atranbp1a) [Arabidopsis
  misc_feature (30)..(244): Homolog of NCBI NO: 8843780 NR Description: contains similarity to small GTPase Ran binding
  misc_feature (30)..(244): Homolog of NCBI NO: 30697102 NR Description: Ran binding protein 1 homolog - like [Arabidopsis
  misc_feature (31)..(243): Homolog of NCBI NO: 15227700 NR Description: Ran binding protein (AtRanBP1b) [Arabidopsis
  misc_feature (31)..(243): Homolog of NCBI NO: 20260400 NR Description: Ran binding protein [Arabidopsis thaliana]
  misc_feature (31)..(243): Homolog of NCBI NO: 2058284 NR Description: atranbp1b [Arabidopsis thaliana]
  misc_feature (31)..(243): Homolog of NCBI NO: 2058282 NR Description: atranbp1a [Arabidopsis thaliana]
  misc_feature (31)..(238): Homolog of NCBI NO: 14091665 NR Description: Ran binding protein-1 [Lycopersicon esculentum]
  misc_feature (31)..(243): Homolog of NCBI NO: 2058284 NR Description: atranbp1b [Arabidopsis thaliana]
  misc_feature (31)..(243): Homolog of NCBI NO: 20260400 NR Description: Ran binding protein [Arabidopsis thaliana]
  misc_feature (31)..(243): Homolog of NCBI NO: 15227700 NR Description: Ran binding protein (AtRanBP1b) [Arabidopsis
  misc_feature (30)..(244): Homolog of NCBI NO: 30697102 NR Description: Ran binding protein 1 homolog - like [Arabidopsis
  misc_feature (30)..(244): Homolog of NCBI NO: 8843780 NR Description: contains similarity to small GTPase Ran binding
SKLRLPQLNEQKLQSTHTHFQVSIQRWRGTEPERENREDETEVNEDEDTGAQVAPIVRLEEVAVTTGEEDEDAVLDLKSKMYRFDKEGNQWKRGAGTVKLLKHKETGKVRLVMRQSKTLKICANHLISSGMSVQEHSGNEKSCLWHATDFSDGELKDELFCIRFASIENCKTFMEKFTEIAESQQVGKESTEGDEAAGLIENLSVEEKKSVEQAKEAEEKEPAKEDKETKKEKVEEEKKTETST

SEQ ID NO: 20502 - protein, 164 aa, Arabidopsis thaliana
  peptide (1)..(164): Ceres Seq. ID no. 13491589
  misc_feature (1)..(103): Pfam Name: RanBP1 domain Pfam Description: RanBP1 domain
  misc_feature (1)..(103): Pfam Name: RanBP1 domain Pfam Description: RanBP1 domain
  misc_feature (1)..(152): Homolog of NCBI NO: 38174136 NR Description: Unknown (protein for MGC:76028) [Silurana
  misc_feature (1)..(158): Homolog of NCBI NO: 14091665 NR Description: Ran binding protein-1 [Lycopersicon esculentum]
  misc_feature (1)..(164): Homolog of NCBI NO: 5106769 NR Description: Ran-binding protein siRanBP [Arabidopsis thaliana]
  misc_feature (1)..(163): Homolog of NCBI NO: 2058282 NR Description: atranbp1a [Arabidopsis thaliana]
  misc_feature (1)..(163): Homolog of NCBI NO: 15222310 NR Description: Ran-binding protein (atranbp1a) [Arabidopsis
  misc_feature (1)..(152): Homolog of NCBI NO: 38174136 NR Description: Unknown (protein for MGC:76028) [Silurana
  misc_feature (1)..(164): Homolog of NCBI NO: 5106769 NR Description: Ran-binding protein siRanBP [Arabidopsis thaliana]
  misc_feature (1)..(163): Homolog of NCBI NO: 15222310 NR Description: Ran-binding protein (atranbp1a) [Arabidopsis
  misc_feature (1)..(164): Homolog of NCBI NO: 8843780 NR Description: contains similarity to small GTPase Ran binding
  misc_feature (1)..(164): Homolog of NCBI NO: 30697102 NR Description: Ran binding protein 1 homolog - like [Arabidopsis
  misc_feature (1)..(163): Homolog of NCBI NO: 15227700 NR Description: Ran binding protein (AtRanBP1b) [Arabidopsis
  misc_feature (1)..(163): Homolog of NCBI NO: 20260400 NR Description: Ran binding protein [Arabidopsis thaliana]
  misc_feature (1)..(163): Homolog of NCBI NO: 2058284 NR Description: atranbp1b [Arabidopsis thaliana]
  misc_feature (1)..(163): Homolog of NCBI NO: 2058282 NR Description: atranbp1a [Arabidopsis thaliana]
  misc_feature (1)..(158): Homolog of NCBI NO: 14091665 NR Description: Ran binding protein-1 [Lycopersicon esculentum]
  misc_feature (1)..(163): Homolog of NCBI NO: 2058284 NR Description: atranbp1b [Arabidopsis thaliana]
  misc_feature (1)..(163): Homolog of NCBI NO: 20260400 NR Description: Ran binding protein [Arabidopsis thaliana]
  misc_feature (1)..(163): Homolog of NCBI NO: 15227700 NR Description: Ran binding protein (AtRanBP1b) [Arabidopsis
  misc_feature (1)..(164): Homolog of NCBI NO: 30697102 NR Description: Ran binding protein 1 homolog - like [Arabidopsis
  misc_feature (1)..(164): Homolog of NCBI NO: 8843780 NR Description: contains similarity to small GTPase Ran binding
MYRFDKEGNQWKRGAGTVKLLKHKETGKVRLVMRQSKTLKICANHLISSGMSVQEHSGNEKSCLWHATDFSDGELKDELFCIRFASIENCKTFMEKFTEIAESQQVGKESTEGDEAAGLIENLSVEEKKSVEQAKEAEEKEPAKEDKETKKEKVEEEKKTETST

SEQ ID NO: 20503 - protein, 132 aa, Arabidopsis thaliana
  peptide (1)..(132): Ceres Seq. ID no. 13491590
  misc_feature (1)..(71): Pfam Name: RanBP1 domain Pfam Description: RanBP1 domain
  misc_feature (1)..(71): Pfam Name: RanBP1 domain Pfam Description: RanBP1 domain
  misc_feature (1)..(120): Homolog of NCBI NO: 38174136 NR Description: Unknown (protein for MGC:76028) [Silurana
  misc_feature (1)..(126): Homolog of NCBI NO: 14091665 NR Description: Ran binding protein-1 [Lycopersicon esculentum]
  misc_feature (1)..(132): Homolog of NCBI NO: 5106769 NR Description: Ran-binding protein siRanBP [Arabidopsis thaliana]
  misc_feature (1)..(131): Homolog of NCBI NO: 2058282 NR Description: atranbp1a [Arabidopsis thaliana]
  misc_feature (1)..(131): Homolog of NCBI NO: 15222310 NR Description: Ran-binding protein (atranbp1a) [Arabidopsis
  misc_feature (1)..(120): Homolog of NCBI NO: 38174136 NR Description: Unknown (protein for MGC:76028) [Silurana
  misc_feature (1)..(132): Homolog of NCBI NO: 5106769 NR Description: Ran-binding protein siRanBP [Arabidopsis thaliana]
  misc_feature (1)..(131): Homolog of NCBI NO: 15222310 NR Description: Ran-binding protein (atranbp1a) [Arabidopsis
  misc_feature (1)..(132): Homolog of NCBI NO: 8843780 NR Description: contains similarity to small GTPase Ran binding
  misc_feature (1)..(132): Homolog of NCBI NO: 30697102 NR Description: Ran binding protein 1 homolog - like [Arabidopsis
  misc_feature (1)..(131): Homolog of NCBI NO: 15227700 NR Description: Ran binding protein (AtRanBP1b) [Arabidopsis
  misc_feature (1)..(131): Homolog of NCBI NO: 20260400 NR Description: Ran binding protein [Arabidopsis thaliana]
  misc_feature (1)..(131): Homolog of NCBI NO: 2058284 NR Description: atranbp1b [Arabidopsis thaliana]
  misc_feature (1)..(131): Homolog of NCBI NO: 2058282 NR Description: atranbp1a [Arabidopsis thaliana]
  misc_feature (1)..(126): Homolog of NCBI NO: 14091665 NR Description: Ran binding protein-1 [Lycopersicon esculentum]
  misc_feature (1)..(131): Homolog of NCBI NO: 2058284 NR Description: atranbp1b [Arabidopsis thaliana]
  misc_feature (1)..(131): Homolog of NCBI NO: 20260400 NR Description: Ran binding protein [Arabidopsis thaliana]
  misc_feature (1)..(131): Homolog of NCBI NO: 15227700 NR Description: Ran binding protein (AtRanBP1b) [Arabidopsis
  misc_feature (1)..(132): Homolog of NCBI NO: 30697102 NR Description: Ran binding protein 1 homolog - like [Arabidopsis
  misc_feature (1)..(132): Homolog of NCBI NO: 8843780 NR Description: contains similarity to small GTPase Ran binding
MRQSKTLKICANHLISSGMSVQEHSGNEKSCLWHATDFSDGELKDELFCIRFASIENCKTFMEKFTEIAESQQVGKESTEGDEAAGLIENLSVEEKKSVEQAKEAEEKEPAKEDKETKKEKVEEEKKTETST

SEQ ID NO: 20504 - DNA, 1616 bp, Arabidopsis thaliana
  misc_feature (1)..(1616): Ceres Seq. ID no. 14307863
  misc_feature: MA Experiment ID: 108434 Result: Up-regulated in Transcription
  misc_feature: MA Experiment 108434 PARAMETER Experiment Name: At_Root_Tips_cDNA_P Parameter: Tissue Value: Root Tips
  misc_feature: MA Experiment ID: 108463 Result: Down-regulated in Transcription
  misc_feature: MA Experiment 108463 PARAMETER Experiment Name: At_Germinating_Seeds_cDNA_P Parameter: Age (day) Value: 3 vs. 0
  misc_feature: MA Experiment 108463 PARAMETER Experiment Name: At_Germinating_Seeds_cDNA_P Parameter: Tissue Value: Germinating Seeds
  misc_feature: MA Experiment ID: 108572 Result: Down-regulated in Transcription
  misc_feature: MA Experiment 108572 PARAMETER Experiment Name: At_Drought_cDNA_P Parameter: Timepoint (hr) Value: 1
  misc_feature: MA Experiment 108572 PARAMETER Experiment Name: At_Drought_cDNA_P Parameter: Tissue Value: Aerial
  misc_feature: MA Experiment 108572 PARAMETER Experiment Name: At_Drought_cDNA_P Parameter: Treatment Value: Drought vs. No Drought
  misc_feature: MA Experiment ID: 108573 Result: Up-regulated in Transcription
  misc_feature: MA Experiment 108573 PARAMETER Experiment Name: At_Drought_cDNA_P Parameter: Timepoint (hr) Value: 6
  misc_feature: MA Experiment 108573 PARAMETER Experiment Name: At_Drought_cDNA_P Parameter: Tissue Value: Aerial
  misc_feature: MA Experiment 108573 PARAMETER Experiment Name: At_Drought_cDNA_P Parameter: Treatment Value: Drought vs. No Drought
  misc_feature: MA Experiment ID: 108594 Result: Down-regulated in Transcription
  misc_feature: MA Experiment 108594 PARAMETER Experiment Name: At_Ler-rhl_Root_cDNA_P Parameter: Plant Line Value: null
  misc_feature: MA Experiment ID: 108595 Result: Down-regulated in Transcription
  misc_feature: MA Experiment 108595 PARAMETER Experiment Name: At_Ler-pi_Ovule_cDNA_P Parameter: Plant Line Value: null
  misc_feature: MA Experiment ID: 108607 Result: Down-regulated in Transcription
  misc_feature: MA Experiment 108607 PARAMETER Experiment Name: At_100uM_ABA_cDNA_P Parameter: Timepoint (hr) Value: 4
  misc_feature: MA Experiment 108607 PARAMETER Experiment Name: At_100uM_ABA_cDNA_P Parameter: Tissue Value: Aerial
  misc_feature: MA Experiment 108607 PARAMETER Experiment Name: At_100uM_ABA_cDNA_P Parameter: Treatment Value: 100uM ABA vs. No Treatment
  misc_feature: MA Experiment ID: 108668 Result: Down-regulated in Transcription
  misc_feature: MA Experiment 108668 PARAMETER Experiment Name: At_2mM_SA_cDNA_P Parameter: Plant Line Value: WS
  misc_feature: MA Experiment 108668 PARAMETER Experiment Name: At_2mM_SA_cDNA_P Parameter: Timepoint (hr) Value: 6
  misc_feature: MA Experiment 108668 PARAMETER Experiment Name: At_2mM_SA_cDNA_P Parameter: Treatment Value: 2mM SA vs. No Treatment
  misc_feature: MA Experiment ID: 20000087 Result: Down-regulated in Transcription
  misc_feature: MA Experiment 20000087 PARAMETER Experiment Name: At_100uM_ABA_Mutants_cDNA_P Parameter: Plant Line Value: WS
  misc_feature: MA Experiment 20000087 PARAMETER Experiment Name: At_100uM_ABA_Mutants_cDNA_P Parameter: Timepoint (hr) Value: 6
  misc_feature: MA Experiment 20000087 PARAMETER Experiment Name: At_100uM_ABA_Mutants_cDNA_P Parameter: Tissue Value: Aerial
  misc_feature: MA Experiment 20000087 PARAMETER Experiment Name: At_100uM_ABA_Mutants_cDNA_P Parameter: Treatment Value: 100uM ABA vs. No Treatment
  misc_feature: MA Experiment ID: 20000224 Result: Down-regulated in Transcription
  misc_feature: MA Experiment ID: 20000347 Result: Down-regulated in Transcription
  misc_feature: MA Experiment 20000347 PARAMETER Experiment Name: At_2mM_SA_Sub_P Parameter: Age (day) Value: 14
  misc_feature: MA Experiment 20000347 PARAMETER Experiment Name: At_2mM_SA_Sub_P Parameter: Organism Value: A. thaliana
  misc_feature: MA Experiment 20000347 PARAMETER Experiment Name: At_2mM_SA_Sub_P Parameter: Plant Line Value: WS
  misc_feature: MA Experiment 20000347 PARAMETER Experiment Name: At_2mM_SA_Sub_P Parameter: Timepoint (hr) Value: 6
  misc_feature: MA Experiment 20000347 PARAMETER Experiment Name: At_2mM_SA_Sub_P Parameter: Tissue Value: Aerial
  misc_feature: MA Experiment 20000347 PARAMETER Experiment Name: At_2mM_SA_Sub_P Parameter: Treatment Value: 2mM SA vs. No Treatment
  misc_feature: MA Experiment ID: 20000355 Result: Down-regulated in Transcription
  misc_feature: MA Experiment 20000355 PARAMETER Experiment Name: At_Siliques_Sub_P Parameter: Age (day) Value: 21
  misc_feature: MA Experiment 20000355 PARAMETER Experiment Name: At_Siliques_Sub_P Parameter: Organism Value: A. thaliana
  misc_feature: MA Experiment 20000355 PARAMETER Experiment Name: At_Siliques_Sub_P Parameter: Plant Line Value: WS
  misc_feature: MA Experiment 20000355 PARAMETER Experiment Name: At_Siliques_Sub_P Parameter: Tissue Value: Less Than 5mm Siliques vs. Whole Plant
aaaaaagaagatctcactctcaccgccttcatttcctcgatctccgtcttcctccttctccgtctgtcgcagagcatcgctcgaattagggtttctgctgagagaagatgagggaaattattagcattcatatcggacaagccgggatccaagtcggaaattcctgctgggagctttactgtctcgaacatggaatccagcccgacggaatgatgccgagtgatactacagttggtgttgcacacgatgcgttcaatactttctttagcgagactggagctgggaagcatgttcctagggctgtcttcgttgatctcgagcctaccgttatcgacgaagttcgtactggtacttaccgtcaacttttccatccagagcagctcatttctgggaaagaagatgctgctaacaacttcgctagaggacattacactgttggaaaggaaattgtggatctatgtcttgaccgtgtgaggaagcttgccgacaactgtactggcttacaagggtttttggtgttcaatgctgttggtggtggaactggttctggattgggttctctgttgctagagcgtttgtctgtagattacggaaaaaagtctaagcttggttttaccatatacccttctcctcaggtttctactgctgttgtagaaccttacaacagtgttctctcaacgcattcccttcttgaacatacggatgtagctgtcctcttggataacgaagccatctatgacatttgccgcagatccctagatatcgagaggccaacctacacaaacttgaacaggttgatatcacagatcatttcatccttgacaacatctttgaggtttgatggtgccatcaacgtggatatcactgagttccagaccaatcttgtcccatatccccgtatccatttcatgctgtcatcttatgcaccagtcatctcagccgccaaggcttaccacgagcagctatcagtccctgagatcaccaatgccgtgtttgagccagcgagcatgatggcaaagtgtgacccaaggcacggaaagtacatggcatgttgtttgatgtaccgaggagatgttgttcccaaagatgttaatgctgccgttggcaccatcaagacaaagaggactgttcagtttgttgactggtgcccaactgggttcaaatgtggaatcaactaccaacctccaacagttgttccaggtggtgacctcgctaaggttcagagagctgtatgcatgatcagtaacaacacagcagttgcagaggtgttctcacggatcgaccacaagtttgatctcatgtatgcgaagagggcattcgtgcactggtacgttggtgaaggaatggaggaaggtgaattcgatgacaagaccaacgtcaaggccgcctggggtaaggtcggcgcgcacgctggcgagtatggtgcggaggccctggagaggatgttcctgtccttccccaccaccaagacctacttcccgcacttcgacctgagccacggctctgcccaggttaagggccacggcaagaaggtggccgacgcgctgaccaacgccgtggcgcacgtggacgacatgcccaacgcgctgtccgccctgagcgacctgcacgcgcac

SEQ ID NO: 20505 - protein, 503 aa, Arabidopsis thaliana
  peptide (1)..(503): Ceres Seq. ID no. 14307864
  misc_feature (49)..(246): Pfam Name: Tubulin/FtsZ family, GTPase domain Pfam Description: Tubulin/FtsZ family, GTPase domain
  misc_feature (1)..(444): Homolog of NCBI NO: 15029368 NR Description: alpha tubulin subunit [Rosa hybrid cultivar]
  misc_feature (1)..(441): Homolog of NCBI NO: 7271241 NR Description: alpha-tubulin [Miscanthus sinensis]
  misc_feature (1)..(441): Homolog of NCBI NO: 8928404 NR Description: Tubulin alpha chain
  misc_feature (1)..(441): Homolog of NCBI NO: 401161 NR Description: Tubulin alpha-5 chain (Alpha-5 tubulin)
  misc_feature (1)..(441): Homolog of NCBI NO: 8928419 NR Description: Tubulin alpha-1 chain
  misc_feature (1)..(441): Homolog of NCBI NO: 25396545 NR Description: alpha tubulin [Physcomitrella patens]
  misc_feature (1)..(441): Homolog of NCBI NO: 6094431 NR Description: Tubulin alpha-3 chain (Alpha-3 tubulin)
  misc_feature (1)..(441): Homolog of NCBI NO: 464846 NR Description: Tubulin alpha-6 chain (Alpha-6 tubulin)
  misc_feature (1)..(441): Homolog of NCBI NO: 135399 NR Description: Tubulin alpha-1 chain
  misc_feature (1)..(437): Homolog of NCBI NO: 15241168 NR Description: tubulin alpha-3/alpha-5 chain (TUA3) [Arabidopsis
MREIISIHIGQAGIQVGNSCWELYCLEHGIQPDGMMPSDTTVGVAHDAFNTFFSETGAGKHVPRAVFVDLEPTVIDEVRTGTYRQLFHPEQLISGKEDAANNFARGHYTVGKEIVDLCLDRVRKLADNCTGLQGFLVFNAVGGGTGSGLGSLLLERLSVDYGKKSKLGFTIYPSPQVSTAVVEPYNSVLSTHSLLEHTDVAVLLDNEAIYDICRRSLDIERPTYTNLNRLISQIISSLTTSLRFDGAINVDITEFQTNLVPYPRIHFMLSSYAPVISAAKAYHEQLSVPEITNAVFEPASMMAKCDPRHGKYMACCLMYRGDVVPKDVNAAVGTIKTKRTVQFVDWCPTGFKCGINYQPPTVVPGGDLAKVQRAVCMISNNTAVAEVFSRIDHKFDLMYAKRAFVHWYVGEGMEEGEFDDKTNVKAAWGKVGAHAGEYGAEALERMFLSFPTTKTYFPHFDLSHGSAQVKGHGKKVADALTNAVAHVDDMPNALSALSDLHAH

SEQ ID NO: 20506 - protein, 469 aa, Arabidopsis thaliana
  peptide (1)..(469): Ceres Seq. ID no. 14307865
  misc_feature (15)..(212): Pfam Name: Tubulin/FtsZ family, GTPase domain Pfam Description: Tubulin/FtsZ family, GTPase domain
  misc_feature (1)..(410): Homolog of NCBI NO: 15029368 NR Description: alpha tubulin subunit [Rosa hybrid cultivar]
  misc_feature (1)..(407): Homolog of NCBI NO: 7271241 NR Description: alpha-tubulin [Miscanthus sinensis]
  misc_feature (1)..(407): Homolog of NCBI NO: 8928404 NR Description: Tubulin alpha chain
  misc_feature (1)..(407): Homolog of NCBI NO: 401161 NR Description: Tubulin alpha-5 chain (Alpha-5 tubulin)
  misc_feature (1)..(407): Homolog of NCBI NO: 8928419 NR Description: Tubulin alpha-1 chain
  misc_feature (1)..(407): Homolog of NCBI NO: 25396545 NR Description: alpha tubulin [Physcomitrella patens]
  misc_feature (1)..(407): Homolog of NCBI NO: 6094431 NR Description: Tubulin alpha-3 chain (Alpha-3 tubulin)
  misc_feature (1)..(407): Homolog of NCBI NO: 464846 NR Description: Tubulin alpha-6 chain (Alpha-6 tubulin)
  misc_feature (1)..(407): Homolog of NCBI NO: 135399 NR Description: Tubulin alpha-1 chain
  misc_feature (1)..(403): Homolog of NCBI NO: 15241168 NR Description: tubulin alpha-3/alpha-5 chain (TUA3) [Arabidopsis
MMPSDTTVGVAHDAFNTFFSETGAGKHVPRAVFVDLEPTVIDEVRTGTYRQLFHPEQLISGKEDAANNFARGHYTVGKEIVDLCLDRVRKLADNCTGLQGFLVFNAVGGGTGSGLGSLLLERLSVDYGKKSKLGFTIYPSPQVSTAVVEPYNSVLSTHSLLEHTDVAVLLDNEAIYDICRRSLDIERPTYTNLNRLISQIISSLTTSLRFDGAINVDITEFQTNLVPYPRIHFMLSSYAPVISAAKAYHEQLSVPEITNAVFEPASMMAKCDPRHGKYMACCLMYRGDVVPKDVNAAVGTIKTKRTVQFVDWCPTGFKCGINYQPPTVVPGGDLAKVQRAVCMISNNTAVAEVFSRIDHKFDLMYAKRAFVHWYVGEGMEEGEFDDKTNVKAAWGKVGAHAGEYGAEALERMFLSFPTTKTYFPHFDLSHGSAQVKGHGKKVADALTNAVAHVDDMPNALSALSDLHAH

SEQ ID NO: 20507 - protein, 468 aa, Arabidopsis thaliana
  peptide (1)..(468): Ceres Seq. ID no. 14307866
  misc_feature (14)..(211): Pfam Name: Tubulin/FtsZ family, GTPase domain Pfam Description: Tubulin/FtsZ family, GTPase domain
  misc_feature (1)..(406): Homolog of NCBI NO: 8928419 NR Description: Tubulin alpha-1 chain
  misc_feature (1)..(406): Homolog of NCBI NO: 25396545 NR Description: alpha tubulin [Physcomitrella patens]
  misc_feature (1)..(406): Homolog of NCBI NO: 6094431 NR Description: Tubulin alpha-3 chain (Alpha-3 tubulin)
  misc_feature (1)..(409): Homolog of NCBI NO: 15029368 NR Description: alpha tubulin subunit [Rosa hybrid cultivar]
  misc_feature (1)..(406): Homolog of NCBI NO: 8928404 NR Description: Tubulin alpha chain
  misc_feature (1)..(406): Homolog of NCBI NO: 401161 NR Description: Tubulin alpha-5 chain (Alpha-5 tubulin)
  misc_feature (1)..(406): Homolog of NCBI NO: 7271241 NR Description: alpha-tubulin [Miscanthus sinensis]
  misc_feature (1)..(406): Homolog of NCBI NO: 464846 NR Description: Tubulin alpha-6 chain (Alpha-6 tubulin)
  misc_feature (1)..(406): Homolog of NCBI NO: 135399 NR Description: Tubulin alpha-1 chain
  misc_feature (1)..(402): Homolog of NCBI NO: 15241168 NR Description: tubulin alpha-3/alpha-5 chain (TUA3) [Arabidopsis
MPSDTTVGVAHDAFNTFFSETGAGKHVPRAVFVDLEPTVIDEVRTGTYRQLFHPEQLISGKEDAANNFARGHYTVGKEIVDLCLDRVRKLADNCTGLQGFLVFNAVGGGTGSGLGSLLLERLSVDYGKKSKLGFTIYPSPQVSTAVVEPYNSVLSTHSLLEHTDVAVLLDNEAIYDICRRSLDIERPTYTNLNRLISQIISSLTTSLRFDGAINVDITEFQTNLVPYPRIHFMLSSYAPVISAAKAYHEQLSVPEITNAVFEPASMMAKCDPRHGKYMACCLMYRGDVVPKDVNAAVGTIKTKRTVQFVDWCPTGFKCGINYQPPTVVPGGDLAKVQRAVCMISNNTAVAEVFSRIDHKFDLMYAKRAFVHWYVGEGMEEGEFDDKTNVKAAWGKVGAHAGEYGAEALERMFLSFPTTKTYFPHFDLSHGSAQVKGHGKKVADALTNAVAHVDDMPNALSALSDLHAH

SEQ ID NO: 20508 - DNA, 1305 bp, Arabidopsis thaliana
  misc_feature (1)..(1305): Ceres Seq. ID no. 14307843
  misc_feature: MA Experiment ID: 20000184 Result: Up-regulated in Transcription
  misc_feature: MA Experiment 20000184 PARAMETER Experiment Name: At_Shoots__P Parameter: Age (day) Value: 7
  misc_feature: MA Experiment 20000184 PARAMETER Experiment Name: At_Shoots__P Parameter: Tissue Value: Shoots vs. Whole Plant
  misc_feature: MA Experiment ID: 20000185 Result: Down-regulated in Transcription
  misc_feature: MA Experiment 20000185 PARAMETER Experiment Name: At_Roots__P Parameter: Age (day) Value: 7 vs. 21
  misc_feature: MA Experiment 20000185 PARAMETER Experiment Name: At_Roots__P Parameter: Organism Value: A. thaliana
  misc_feature: MA Experiment 20000185 PARAMETER Experiment Name: At_Roots__P Parameter: Tissue Value: Roots vs. Whole Plant
  misc_feature: MA Experiment ID: 20000264 Result: Down-regulated in Transcription
  misc_feature: MA Experiment 20000264 PARAMETER Experiment Name: At_Open_Flower_P Parameter: Age (day) Value: 21
  misc_feature: MA Experiment 20000264 PARAMETER Experiment Name: At_Open_Flower_P Parameter: Plant Line Value: WS
  misc_feature: MA Experiment 20000264 PARAMETER Experiment Name: At_Open_Flower_P Parameter: Tissue Value: Open Flower vs. Whole Plant
  misc_feature: MA Experiment ID: 20000308 Result: Down-regulated in Transcription
  misc_feature: MA Experiment 20000308 PARAMETER Experiment Name: At_100mM_NaCl__P Parameter: Age (day) Value: 17
  misc_feature: MA Experiment 20000308 PARAMETER Experiment Name: At_100mM_NaCl__P Parameter: Organism Value: A. thaliana
  misc_feature: MA Experiment 20000308 PARAMETER Experiment Name: At_100mM_NaCl__P Parameter: Plant Line Value: WS
  misc_feature: MA Experiment 20000308 PARAMETER Experiment Name: At_100mM_NaCl__P Parameter: Timepoint (hr) Value: 72
  misc_feature: MA Experiment 20000308 PARAMETER Experiment Name: At_100mM_NaCl__P Parameter: Tissue Value: Whole Plant
  misc_feature: MA Experiment 20000308 PARAMETER Experiment Name: At_100mM_NaCl__P Parameter: Treatment Value: 100mM NaCl vs. No Treatment
  misc_feature: MA Experiment ID: 20000438 Result: Up-regulated in Transcription
  misc_feature: MA Experiment 20000438 PARAMETER Experiment Name: At_Shoots__P Parameter: Age (day) Value: 14
  misc_feature: MA Experiment 20000438 PARAMETER Experiment Name: At_Shoots__P Parameter: Tissue Value: Shoots vs. Whole Plant
  misc_feature: MA Experiment ID: 20000439 Result: Down-regulated in Transcription
  misc_feature: MA Experiment 20000439 PARAMETER Experiment Name: At_Roots__P Parameter: Age (day) Value: 14 vs. 21
  misc_feature: MA Experiment 20000439 PARAMETER Experiment Name: At_Roots__P Parameter: Organism Value: A. thaliana
  misc_feature: MA Experiment 20000439 PARAMETER Experiment Name: At_Roots__P Parameter: Tissue Value: Roots vs. Whole Plant
  misc_feature: MA Experiment ID: 20000460 Result: Down-regulated in Transcription
  misc_feature: MA Experiment 20000460 PARAMETER Experiment Name: At_10percent_PEG_P Parameter: Age (day) Value: 12
  misc_feature: MA Experiment 20000460 PARAMETER Experiment Name: At_10percent_PEG_P Parameter: Organism Value: A. thaliana
  misc_feature: MA Experiment 20000460 PARAMETER Experiment Name: At_10percent_PEG_P Parameter: Plant Line Value: WS
  misc_feature: MA Experiment 20000460 PARAMETER Experiment Name: At_10percent_PEG_P Parameter: Timepoint (day) Value: 12
  misc_feature: MA Experiment 20000460 PARAMETER Experiment Name: At_10percent_PEG_P Parameter: Tissue Value: Whole Plant
  misc_feature: MA Experiment 20000460 PARAMETER Experiment Name: At_10percent_PEG_P Parameter: Treatment Value: 10percent PEG vs. No Treatment
  misc_feature: MA Experiment ID: 20000794 Result: Down-regulated in Transcription
  misc_feature: MA Experiment 20000794 PARAMETER Experiment Name: At_Petals_P Parameter: Age (day) Value: 23-25 days
  misc_feature: MA Experiment 20000794 PARAMETER Experiment Name: At_Petals_P Parameter: Plant Line Value: WS
  misc_feature: MA Experiment 20000794 PARAMETER Experiment Name: At_Petals_P Parameter: Tissue Value: Petals vs. Whole plant
  misc_feature: MA Experiment ID: 20001450 Result: Down-regulated in Transcription
  misc_feature: MA Experiment 20001450 PARAMETER Experiment Name: At_Far-red-induction_P Parameter: Age (day) Value: 7
  misc_feature: MA Experiment 20001450 PARAMETER Experiment Name: At_Far-red-induction_P Parameter: Light Value: Far-red vs. White
  misc_feature: MA Experiment 20001450 PARAMETER Experiment Name: At_Far-red-induction_P Parameter: Organism Value: A. thaliana
  misc_feature: MA Experiment 20001450 PARAMETER Experiment Name: At_Far-red-induction_P Parameter: Plant Line Value: Columbia
  misc_feature: MA Experiment 20001450 PARAMETER Experiment Name: At_Far-red-induction_P Parameter: Timepoint (hr) Value: 8
  misc_feature: MA Experiment 20001450 PARAMETER Experiment Name: At_Far-red-induction_P Parameter: Tissue Value: Whole Plant
  misc_feature: MA Experiment ID: 20001451 Result: Down-regulated in Transcription
  misc_feature: MA Experiment 20001451 PARAMETER Experiment Name: At_Far-red-induction_P Parameter: Age (day) Value: 7
  misc_feature: MA Experiment 20001451 PARAMETER Experiment Name: At_Far-red-induction_P Parameter: Light Value: Far-red vs. White
  misc_feature: MA Experiment 20001451 PARAMETER Experiment Name: At_Far-red-induction_P Parameter: Organism Value: A. thaliana
  misc_feature: MA Experiment 20001451 PARAMETER Experiment Name: At_Far-red-induction_P Parameter: Plant Line Value: Columbia
  misc_feature: MA Experiment 20001451 PARAMETER Experiment Name: At_Far-red-induction_P Parameter: Timepoint (hr) Value: 24
  misc_feature: MA Experiment 20001451 PARAMETER Experiment Name: At_Far-red-induction_P Parameter: Tissue Value: Whole Plant
  misc_feature: MA Experiment ID: 20001555 Result: Down-regulated in Transcription
  misc_feature: MA Experiment 20001555 PARAMETER Experiment Name: At_Drought_Soil_Dry_P Parameter: Age (day) Value: 24
  misc_feature: MA Experiment 20001555 PARAMETER Experiment Name: At_Drought_Soil_Dry_P Parameter: Organism Value: A. thaliana
  misc_feature: MA Experiment 20001555 PARAMETER Experiment Name: At_Drought_Soil_Dry_P Parameter: Plant Line Value: WS
  misc_feature: MA Experiment 20001555 PARAMETER Experiment Name: At_Drought_Soil_Dry_P Parameter: Post Timepoint (hr) Value: None
  misc_feature: MA Experiment 20001555 PARAMETER Experiment Name: At_Drought_Soil_Dry_P Parameter: Post-Treatment Value: None
  misc_feature: MA Experiment 20001555 PARAMETER Experiment Name: At_Drought_Soil_Dry_P Parameter: Timepoint (day) Value: 10
  misc_feature: MA Experiment 20001555 PARAMETER Experiment Name: At_Drought_Soil_Dry_P Parameter: Treatment Value: Drought vs. No Drought
  misc_feature: MA Experiment ID: 20001557 Result: Down-regulated in Transcription
  misc_feature: MA Experiment 20001557 PARAMETER Experiment Name: At_Drought_Soil_Dry_P Parameter: Age (day) Value: 27
  misc_feature: MA Experiment 20001557 PARAMETER Experiment Name: At_Drought_Soil_Dry_P Parameter: Organism Value: A. thaliana
  misc_feature: MA Experiment 20001557 PARAMETER Experiment Name: At_Drought_Soil_Dry_P Parameter: Plant Line Value: WS
  misc_feature: MA Experiment 20001557 PARAMETER Experiment Name: At_Drought_Soil_Dry_P Parameter: Post Timepoint (hr) Value: 3
  misc_feature: MA Experiment 20001557 PARAMETER Experiment Name: At_Drought_Soil_Dry_P Parameter: Post-Treatment Value: Re-Water vs. No Drought
  misc_feature: MA Experiment 20001557 PARAMETER Experiment Name: At_Drought_Soil_Dry_P Parameter: Timepoint (day) Value: 13
  misc_feature: MA Experiment 20001557 PARAMETER Experiment Name: At_Drought_Soil_Dry_P Parameter: Treatment Value: Drought vs. No Drought
  misc_feature: MA Experiment ID: 20001559 Result: Down-regulated in Transcription
  misc_feature: MA Experiment 20001559 PARAMETER Experiment Name: At_Drought_Soil_Dry_P Parameter: Age (day) Value: 28
  misc_feature: MA Experiment 20001559 PARAMETER Experiment Name: At_Drought_Soil_Dry_P Parameter: Organism Value: A. thaliana
  misc_feature: MA Experiment 20001559 PARAMETER Experiment Name: At_Drought_Soil_Dry_P Parameter: Plant Line Value: WS
  misc_feature: MA Experiment 20001559 PARAMETER Experiment Name: At_Drought_Soil_Dry_P Parameter: Post Timepoint (hr) Value: 29
  misc_feature: MA Experiment 20001559 PARAMETER Experiment Name: At_Drought_Soil_Dry_P Parameter: Post-Treatment Value: Re-Water vs. No Drought
  misc_feature: MA Experiment 20001559 PARAMETER Experiment Name: At_Drought_Soil_Dry_P Parameter: Timepoint (day) Value: 14
  misc_feature: MA Experiment 20001559 PARAMETER Experiment Name: At_Drought_Soil_Dry_P Parameter: Treatment Value: Drought vs. No Drought
  misc_feature: MA Experiment ID: 20001560 Result: Down-regulated in Transcription
  misc_feature: MA Experiment 20001560 PARAMETER Experiment Name: At_Drought_Soil_Dry_P Parameter: Age (day) Value: 28
  misc_feature: MA Experiment 20001560 PARAMETER Experiment Name: At_Drought_Soil_Dry_P Parameter: Organism Value: A. thaliana
  misc_feature: MA Experiment 20001560 PARAMETER Experiment Name: At_Drought_Soil_Dry_P Parameter: Plant Line Value: WS
  misc_feature: MA Experiment 20001560 PARAMETER Experiment Name: At_Drought_Soil_Dry_P Parameter: Post Timepoint (hr) Value: None
  misc_feature: MA Experiment 20001560 PARAMETER Experiment Name: At_Drought_Soil_Dry_P Parameter: Post-Treatment Value: None
  misc_feature: MA Experiment 20001560 PARAMETER Experiment Name: At_Drought_Soil_Dry_P Parameter: Timepoint (day) Value: 14
  misc_feature: MA Experiment 20001560 PARAMETER Experiment Name: At_Drought_Soil_Dry_P Parameter: Treatment Value: Drought vs. No Drought
  misc_feature: MA Experiment ID: 20001757 Result: Up-regulated in Transcription
  misc_feature: MA Experiment 20001757 PARAMETER Experiment Name: At_50mM_NH4NO3_L-to-H_P Parameter: Timepoint (hr) Value: 6
  misc_feature: MA Experiment 20001757 PARAMETER Experiment Name: At_50mM_NH4NO3_L-to-H_P Parameter: Tissue Value: Leaf
  misc_feature: MA Experiment 20001757 PARAMETER Experiment Name: At_50mM_NH4NO3_L-to-H_P Parameter: Treatment Value: 50mM NH4NO3 vs 100mM Mannitol
  misc_feature: MA Experiment ID: 20001905 Result: Down-regulated in Transcription
  misc_feature: MA Experiment 20001905 PARAMETER Experiment Name: At_Drought_Reproduction_P Parameter: Age (day) Value: 40
  misc_feature: MA Experiment 20001905 PARAMETER Experiment Name: At_Drought_Reproduction_P Parameter: Organism Value: A. thaliana
  misc_feature: MA Experiment 20001905 PARAMETER Experiment Name: At_Drought_Reproduction_P Parameter: Plant Line Value: WS
  misc_feature: MA Experiment 20001905 PARAMETER Experiment Name: At_Drought_Reproduction_P Parameter: Timepoint (day) Value: 10
  misc_feature: MA Experiment 20001905 PARAMETER Experiment Name: At_Drought_Reproduction_P Parameter: Tissue Value: Rosettes
  misc_feature: MA Experiment 20001905 PARAMETER Experiment Name: At_Drought_Reproduction_P Parameter: Treatment Value: Drought vs. No Drought
  misc_feature: MA Experiment ID: 20001906 Result: Down-regulated in Transcription
  misc_feature: MA Experiment 20001906 PARAMETER Experiment Name: At_Drought_Reproduction_P Parameter: Age (day) Value: 35
  misc_feature: MA Experiment 20001906 PARAMETER Experiment Name: At_Drought_Reproduction_P Parameter: Organism Value: A. thaliana
  misc_feature: MA Experiment 20001906 PARAMETER Experiment Name: At_Drought_Reproduction_P Parameter: Plant Line Value: WS
  misc_feature: MA Experiment 20001906 PARAMETER Experiment Name: At_Drought_Reproduction_P Parameter: Timepoint (day) Value: 5
  misc_feature: MA Experiment 20001906 PARAMETER Experiment Name: At_Drought_Reproduction_P Parameter: Tissue Value: Siliques
  misc_feature: MA Experiment 20001906 PARAMETER Experiment Name: At_Drought_Reproduction_P Parameter: Treatment Value: Drought vs. No Drought
aaaaattgaaaattgaaaataaaaccttccaaagtagcatcctttatcgctgcaatggcgatgagagagctctcgcagcttaacagagacagcgacggtgatgaagaagtatgggtcaaacactattcatccaaccatcagatacttctcgtcggcgaaggagatttctcattctctcacagcttagccactctcttcggctctgcttccaatatctgcgcttcctctctcgattcatacgatgttgtggttagaaagtacaagaaggcaagatcaaaccttaaaactttgaagagacttggagctttacttttacatggagttgatgctaccacactgcattttcaccctgaccttcgttatagaagatttgatcgcgtcatcttcaacttccctcacgccggtttccacggcagagagtctgattcctctcttatacggaagcatagagaactggtgtttggatttttcaatggtgcaagccgtttactaagagctaatggggaagttcatgtctctcacaagaacaaagcacctttttctgagtggaatctcgaggagctcgctagcagatgctttcttgtgttgattcaacgtgtggccttcgagaagaacaattaccctggttatgagaataagagaggagatgggcgtagatgtgaccaacctttccttttgggagagtgcagtactttcaagttcagattctctcgtgtcgctaaggaactttatgcagagaaagtgagatcgagagaatctgaacagacttcactctctgctttgttctatgcccatctctcaaaagaagcgggaattcctgatggtgtgctcaacattgtaactggttttggatcaactgctggagctgccattgcctcccatatggacgtagacaaagttagtttcactgggtcaacagatgttggaaggaagataatgcaagccgcagccgcaagtaatctcaaaaaagtttcccttgaattaggcgggaaatcgccacttctcatattcaacgacgctgatattgacaaagccgccgatcttgcgcttctcggttgcttttacaacaagggtgaaatttgcgtggcgagctctcgtgtgtttgttcaagaaggtatatacgataaggttgtggagaagttagtagagaaggctaaagattggaccgttggtgatccttttgattccactgctcgacaaggaccttatcgtatataatatatatctaccccatatgtaatttgtaatgtgcctttgactgtgatgagttatctctccctctctaccaactttcttcatatatat

SEQ ID NO: 20509 - protein, 387 aa, Arabidopsis thaliana
  peptide (1)..(387): Ceres Seq. ID no. 14307844
  misc_feature (233)..(384): Homolog of NCBI NO: 18404212 NR Description: aldehyde dehydrogenase (ALDH1a) [Arabidopsis
  misc_feature (6)..(63): Homolog of NCBI NO: 8778492 NR Description: F20N2.18 [Arabidopsis thaliana]
  misc_feature (63)..(236): Homolog of NCBI NO: 8778492 NR Description: F20N2.18 [Arabidopsis thaliana]
  misc_feature (1)..(63): Homolog of NCBI NO: 8778331 NR Description: F14J16.3 [Arabidopsis thaliana]
  misc_feature (63)..(236): Homolog of NCBI NO: 8778331 NR Description: F14J16.3 [Arabidopsis thaliana]
  misc_feature (129)..(240): Homolog of NCBI NO: 8778331 NR Description: F14J16.3 [Arabidopsis thaliana]
  misc_feature (1)..(129): Homolog of NCBI NO: 8778331 NR Description: F14J16.3 [Arabidopsis thaliana]
  misc_feature (130)..(240): Homolog of NCBI NO: 8778493 NR Description: F20N2.17 [Arabidopsis thaliana]
  misc_feature (1)..(129): Homolog of NCBI NO: 8778493 NR Description: F20N2.17 [Arabidopsis thaliana]
  misc_feature (1)..(270): Homolog of NCBI NO: 18405537 NR Description: hypothetical protein [Arabidopsis thaliana]
MAMRELSQLNRDSDGDEEVWVKHYSSNHQILLVGEGDFSFSHSLATLFGSASNICASSLDSYDVVVRKYKKARSNLKTLKRLGALLLHGVDATTLHFHPDLRYRRFDRVIFNFPHAGFHGRESDSSLIRKHRELVFGFFNGASRLLRANGEVHVSHKNKAPFSEWNLEELASRCFLVLIQRVAFEKNNYPGYENKRGDGRRCDQPFLLGECSTFKFRFSRVAKELYAEKVRSRESEQTSLSALFYAHLSKEAGIPDGVLNIVTGFGSTAGAAIASHMDVDKVSFTGSTDVGRKIMQAAAASNLKKVSLELGGKSPLLIFNDADIDKAADLALLGCFYNKGEICVASSRVFVQEGIYDKVVEKLVEKAKDWTVGDPFDSTARQGPYRI

SEQ ID NO: 20510 - protein, 385 aa, Arabidopsis thaliana
  peptide (1)..(385): Ceres Seq. ID no. 14307845
  misc_feature (231)..(382): Homolog of NCBI NO: 18404212 NR Description: aldehyde dehydrogenase (ALDH1a) [Arabidopsis
  misc_feature (4)..(61): Homolog of NCBI NO: 8778492 NR Description: F20N2.18 [Arabidopsis thaliana]
  misc_feature (61)..(234): Homolog of NCBI NO: 8778492 NR Description: F20N2.18 [Arabidopsis thaliana]
  misc_feature (1)..(61): Homolog of NCBI NO: 8778331 NR Description: F14J16.3 [Arabidopsis thaliana]
  misc_feature (61)..(234): Homolog of NCBI NO: 8778331 NR Description: F14J16.3 [Arabidopsis thaliana]
  misc_feature (127)..(238): Homolog of NCBI NO: 8778331 NR Description: F14J16.3 [Arabidopsis thaliana]
  misc_feature (1)..(127): Homolog of NCBI NO: 8778331 NR Description: F14J16.3 [Arabidopsis thaliana]
  misc_feature (128)..(238): Homolog of NCBI NO: 8778493 NR Description: F20N2.17 [Arabidopsis thaliana]
  misc_feature (1)..(127): Homolog of NCBI NO: 8778493 NR Description: F20N2.17 [Arabidopsis thaliana]
  misc_feature (1)..(268): Homolog of NCBI NO: 18405537 NR Description: hypothetical protein [Arabidopsis thaliana]
MRELSQLNRDSDGDEEVWVKHYSSNHQILLVGEGDFSFSHSLATLFGSASNICASSLDSYDVVVRKYKKARSNLKTLKRLGALLLHGVDATTLHFHPDLRYRRFDRVIFNFPHAGFHGRESDSSLIRKHRELVFGFFNGASRLLRANGEVHVSHKNKAPFSEWNLEELASRCFLVLIQRVAFEKNNYPGYENKRGDGRRCDQPFLLGECSTFKFRFSRVAKELYAEKVRSRESEQTSLSALFYAHLSKEAGIPDGVLNIVTGFGSTAGAAIASHMDVDKVSFTGSTDVGRKIMQAAAASNLKKVSLELGGKSPLLIFNDADIDKAADLALLGCFYNKGEICVASSRVFVQEGIYDKVVEKLVEKAKDWTVGDPFDSTARQGPYRI

SEQ ID NO: 20511 - DNA, 3885 bp, Arabidopsis thaliana
  misc_feature (1)..(3885): Ceres Seq. ID no. 12388487
  misc_feature: MA Experiment ID: 108462 Result: Down-regulated in Transcription
  misc_feature: MA Experiment 108462 PARAMETER Experiment Name: At_Germinating_Seeds_cDNA_P Parameter: Age (day) Value: 2 vs. 0
  misc_feature: MA Experiment 108462 PARAMETER Experiment Name: At_Germinating_Seeds_cDNA_P Parameter: Tissue Value: Germinating Seeds
  misc_feature: MA Experiment ID: 108463 Result: Down-regulated in Transcription
  misc_feature: MA Experiment 108463 PARAMETER Experiment Name: At_Germinating_Seeds_cDNA_P Parameter: Age (day) Value: 3 vs. 0
  misc_feature: MA Experiment 108463 PARAMETER Experiment Name: At_Germinating_Seeds_cDNA_P Parameter: Tissue Value: Germinating Seeds
  misc_feature: MA Experiment ID: 108576 Result: Down-regulated in Transcription
  misc_feature: MA Experiment 108576 PARAMETER Experiment Name: At_42deg_Heat_cDNA_P Parameter: Temperature (deg C) Value: 42 vs. 22
  misc_feature: MA Experiment 108576 PARAMETER Experiment Name: At_42deg_Heat_cDNA_P Parameter: Timepoint (hr) Value: 1
  misc_feature: MA Experiment 108576 PARAMETER Experiment Name: At_42deg_Heat_cDNA_P Parameter: Tissue Value: Aerial
  misc_feature: MA Experiment ID: 20001557 Result: Up-regulated in Transcription
  misc_feature: MA Experiment 20001557 PARAMETER Experiment Name: At_Drought_Soil_Dry_P Parameter: Age (day) Value: 27
  misc_feature: MA Experiment 20001557 PARAMETER Experiment Name: At_Drought_Soil_Dry_P Parameter: Organism Value: A. thaliana
  misc_feature: MA Experiment 20001557 PARAMETER Experiment Name: At_Drought_Soil_Dry_P Parameter: Plant Line Value: WS
  misc_feature: MA Experiment 20001557 PARAMETER Experiment Name: At_Drought_Soil_Dry_P Parameter: Post Timepoint (hr) Value: 3
  misc_feature: MA Experiment 20001557 PARAMETER Experiment Name: At_Drought_Soil_Dry_P Parameter: Post-Treatment Value: Re-Water vs. No Drought
  misc_feature: MA Experiment 20001557 PARAMETER Experiment Name: At_Drought_Soil_Dry_P Parameter: Timepoint (day) Value: 13
  misc_feature: MA Experiment 20001557 PARAMETER Experiment Name: At_Drought_Soil_Dry_P Parameter: Treatment Value: Drought vs. No Drought
aaaccatcctctcctttctctctctagatttttatcccctttccctctctctctctctctctcctagggttttcgtctctctcgttcactgttaatagtcttaacggagaggtttgattagcctccgggaagattctactgcgaactttggacacatctctctctgccatggcggctgagaagttaagggacttgagccagccgattgacgtcggtgtgctcgatgccactgttgcggccttctttgttaccggatctaaagaagagagagctgctgcggaccagattttgcgggatttgcaggctaatccagatatgtggcttcaagttgtccacattctacaaaatacaaacagcttggataccaagttctttgctctgcaggttctagaaggtgttataaagtatagatggaatgcactgcctgttgaacaacgagatggaatgaaaaattacatctcagaggttattgtacagctctcgagtaatgaagcatctttcagatcagaaaggctctatgtcaacaagctaaatgtcattttggtccagatcgtgaaacatgattggccggcaaagtggacaagcttcattcctgatctagttgcagctgctaaaactagcgaaactatctgcgaaaattgcatggccattttgaaactcctaagtgaagaggtttttgatttctcaagaggagaaatgactcagcagaagattaaagagctgaaacaatctctaaacagtgagtttaaactcattcatgagttatgcctatatgtcctctcagcttctcaaagacaggatcttatacgtgcaacactgtctgcattgcatgcctatctttcctggattccattgggttacatttttgagtctactttgcttgagaccctccttaaattttttcctgtgccagcatataggaacctcactattcaatgtctgaccgaggtcgcagctcttaatttcggggacttctacaatgttcaatatgtcaaaatgtataccatatttatagggcagctgcggataattctcccaccgagtacaaagatccctgaggcatattccagtggaagtggtgaagaacaagcatttatccagaacctggcactatttttcacttcctttttcaagtttcatattcgagtcctagaatcaacgccagaagttgtctctttgttactcgctggtctagaatatctcattaatatatcttatgttgacgacactgaagtatttaaggtttgtttggactattggaactcgttggtgttggagctatttgatgcgcatcataattctgataaccctgcagtaagtgcaagcctgatgggtttgcagcctttccttcctggtatggttgatggccttggttctcaagtcatgcagcggcgtcaactttattctcacccaatgtccaaattaagagggttaatgattaaccgcatggcgaagcctgaagaagtgcttattgttgaagatgaaaatgggaacatcgttcgtgaaaccatgaaggacaatgatgttcttgtccaatataagataatgcgggagacattaatctacctctcacaccttgaccatgatgataccgagaagcagatgttgaggaagctaaacaaacaattaagtggggaggaatgggcatggaacaatttgaacactttgtgctgggctattgggtctatttccggatctatggcagaagatcaggaaaacaggtttttggtgatggtcattcgtgatttgttgaatttatgtgaaattaccaagggaaaagacaataaagccgttattgcaagcaacatcatgtatgtcgttggccagtatccaagattcttaagggcccattggaagtttttgaagacagttgtgaacaagttgtttgaattcatgcatgaaacacatcctggtgttcaggacatggcctgtgatacattcttgaaaatagttcaaaagtgcaagcgaaaattcgttattgtacaggttggagagaatgaaccatttgtatctgaacttctaacaggccttgcaacaactgttcaagatcttgagcctcatcaaatacactcattttatgaatcagttggtaatatgatccaagcagaatcagatcctcagaagagagatgaatatctccagaggttgatggcactccccaaccagaaatgggcagaaatcataggacaggcacgccacagtgtagaattcctcaaggatcaagttgtgatacgtacagtgctaaacatcctacagactaatactagtgctgctacttcactgggaacatacttcttatcccaaatttccttgattttcttggatatgttgaatgtatacagaatgtacagtgagcttgtgtcaaccaacattactgagggaggaccatatgcttccaagacatcttttgtaaaactcttaagatcggttaagagggaaacacttaagctgatagaaacctttttagacaaagctgaagaccagccacacatagggaaacaatttgtgccgccaatgatggaatcagtacttggtgactatgcgaggaatgtgcctgatgctagggaatccgaagttctttcactctttgcaacgattataaacaagtacaaggcaacaatgttagacgacgtgcctcacatatttgaagctgtattccagtgtacattggagatgataactaagaactttgaagattatccagaacaccgcctcaagtttttctcattactccgtgctattgctacgttttgtttccctgccttgataaagttatcaagtccgcaactgaagctagtgatggattcaattatctgggcatttagacatactgagagaaatattgctgaaaccgggcttaatcttttgcttgagatgctgaaaaactttcagcaatctgaattttgtaatcaattctaccggtcatactttatgcaaatcgagcaagaaatatttgccgttttgaccgataccttccataagcctggcttcaagctacatgtgttggtgctgcagcaactgttttgcctgcctgagagcggtgctttgacagaacccttgtgggatgctacaaccgttccttacccgtatccggacaacgttgcatttgttcgcgaatacaccattaagctactgagctcttcattcccaaacatgactgcagcagaggtcacacaatttgtgaatggactatacgagtctagaaatgacccgtctggatttaagaataacattcgtgacttccttgtacagtctaaggagttttccgctcaggataacaaagatctctatgctgaggaagcagctgcacagagagagagagaacgtcaaagaatgctttcaattcctgggcttattgctcctaatgagattcaagacgagatggtggactcataaaattaagaagggtgcaacaagaagaagcttcctgtgttcaatgggctggattttttgtaatcataggtttttgaaaacaggaaagagttcaaggagagattaatttccccgaccgtatctctactaccgtattccgaagcttctcaattcgattttgaggattggaaaagctaagaaaacagagatctttttggggataaattagtgtcttgtttggttaattaattgggtttaatgtagatttaaacattagggaccttctctagttatctcatatggttggctcctttttgctttgacctttttttgggggtttgtttctattactcagtgattcgtgttttaggtgcaagatatttttttagactctatctttgtcaccccctagggggtttaaaattgtaagattgacttgtggtgatgtttctcattaaaatcgtccactttaaagtgtgctttgacaattttatcaaacaaaactttgaattt

SEQ ID NO: 20512 - protein, 1075 aa, Arabidopsis thaliana
  peptide (1)..(1075): Ceres Seq. ID no. 12388488
  misc_feature (37)..(103): Pfam Name: Importin-beta N-terminal domain Pfam Description: Importin-beta N-terminal domain
  misc_feature (324)..(506): Homolog of NCBI NO: 5690335 NR Description: null
  misc_feature (345)..(530): Homolog of NCBI NO: 6714425 NR Description: null
  misc_feature (298)..(548): Homolog of NCBI NO: 14250864 NR Description: null
  misc_feature (4)..(364): Homolog of NCBI NO: 30790419 NR Description: CRM1 [Trypanosoma cruzi]
  misc_feature (416)..(1044): Homolog of NCBI NO: 30790419 NR Description: CRM1 [Trypanosoma cruzi]
  misc_feature (4)..(364): Homolog of NCBI NO: 30794645 NR Description: exportin 1 [Trypanosoma brucei brucei]
  misc_feature (416)..(1052): Homolog of NCBI NO: 30794645 NR Description: exportin 1 [Trypanosoma brucei brucei]
  misc_feature (4)..(364): Homolog of NCBI NO: 30790417 NR Description: CRM1 [Trypanosoma brucei]
  misc_feature (416)..(1052): Homolog of NCBI NO: 30790417 NR Description: CRM1 [Trypanosoma brucei]
  misc_feature (1)..(1074): Homolog of NCBI NO: 29789299 NR Description: exportin 1 (CRM1, yeast, homolog) [Rattus
MAAEKLRDLSQPIDVGVLDATVAAFFVTGSKEERAAADQILRDLQANPDMWLQVVHILQNTNSLDTKFFALQVLEGVIKYRWNALPVEQRDGMKNYISEVIVQLSSNEASFRSERLYVNKLNVILVQIVKHDWPAKWTSFIPDLVAAAKTSETICENCMAILKLLSEEVFDFSRGEMTQQKIKELKQSLNSEFKLIHELCLYVLSASQRQDLIRATLSALHAYLSWIPLGYIFESTLLETLLKFFPVPAYRNLTIQCLTEVAALNFGDFYNVQYVKMYTIFIGQLRIILPPSTKIPEAYSSGSGEEQAFIQNLALFFTSFFKFHIRVLESTPEVVSLLLAGLEYLINISYVDDTEVFKVCLDYWNSLVLELFDAHHNSDNPAVSASLMGLQPFLPGMVDGLGSQVMQRRQLYSHPMSKLRGLMINRMAKPEEVLIVEDENGNIVRETMKDNDVLVQYKIMRETLIYLSHLDHDDTEKQMLRKLNKQLSGEEWAWNNLNTLCWAIGSISGSMAEDQENRFLVMVIRDLLNLCEITKGKDNKAVIASNIMYVVGQYPRFLRAHWKFLKTVVNKLFEFMHETHPGVQDMACDTFLKIVQKCKRKFVIVQVGENEPFVSELLTGLATTVQDLEPHQIHSFYESVGNMIQAESDPQKRDEYLQRLMALPNQKWAEIIGQARHSVEFLKDQVVIRTVLNILQTNTSAATSLGTYFLSQISLIFLDMLNVYRMYSELVSTNITEGGPYASKTSFVKLLRSVKRETLKLIETFLDKAEDQPHIGKQFVPPMMESVLGDYARNVPDARESEVLSLFATIINKYKATMLDDVPHIFEAVFQCTLEMITKNFEDYPEHRLKFFSLLRAIATFCFPALIKLSSPQLKLVMDSIIWAFRHTERNIAETGLNLLLEMLKNFQQSEFCNQFYRSYFMQIEQEIFAVLTDTFHKPGFKLHVLVLQQLFCLPESGALTEPLWDATTVPYPYPDNVAFVREYTIKLLSSSFPNMTAAEVTQFVNGLYESRNDPSGFKNNIRDFLVQSKEFSAQDNKDLYAEEAAAQRERERQRMLSIPGLIAPNEIQDEMVDS

SEQ ID NO: 20513 - protein, 1026 aa, Arabidopsis thaliana
  peptide (1)..(1026): Ceres Seq. ID no. 12388489
  misc_feature (1)..(54): Pfam Name: Importin-beta N-terminal domain Pfam Description: Importin-beta N-terminal domain
  misc_feature (275)..(457): Homolog of NCBI NO: 5690335 NR Description: null
  misc_feature (296)..(481): Homolog of NCBI NO: 6714425 NR Description: null
  misc_feature (249)..(499): Homolog of NCBI NO: 14250864 NR Description: null
  misc_feature (1)..(315): Homolog of NCBI NO: 30790419 NR Description: CRM1 [Trypanosoma cruzi]
  misc_feature (367)..(995): Homolog of NCBI NO: 30790419 NR Description: CRM1 [Trypanosoma cruzi]
  misc_feature (1)..(315): Homolog of NCBI NO: 30794645 NR Description: exportin 1 [Trypanosoma brucei brucei]
  misc_feature (367)..(1003): Homolog of NCBI NO: 30794645 NR Description: exportin 1 [Trypanosoma brucei brucei]
  misc_feature (1)..(315): Homolog of NCBI NO: 30790417 NR Description: CRM1 [Trypanosoma brucei]
  misc_feature (367)..(1003): Homolog of NCBI NO: 30790417 NR Description: CRM1 [Trypanosoma brucei]
  misc_feature (1)..(1025): Homolog of NCBI NO: 29789299 NR Description: exportin 1 (CRM1, yeast, homolog) [Rattus
MWLQVVHILQNTNSLDTKFFALQVLEGVIKYRWNALPVEQRDGMKNYISEVIVQLSSNEASFRSERLYVNKLNVILVQIVKHDWPAKWTSFIPDLVAAAKTSETICENCMAILKLLSEEVFDFSRGEMTQQKIKELKQSLNSEFKLIHELCLYVLSASQRQDLIRATLSALHAYLSWIPLGYIFESTLLETLLKFFPVPAYRNLTIQCLTEVAALNFGDFYNVQYVKMYTIFIGQLRIILPPSTKIPEAYSSGSGEEQAFIQNLALFFTSFFKFHIRVLESTPEVVSLLLAGLEYLINISYVDDTEVFKVCLDYWNSLVLELFDAHHNSDNPAVSASLMGLQPFLPGMVDGLGSQVMQRRQLYSHPMSKLRGLMINRMAKPEEVLIVEDENGNIVRETMKDNDVLVQYKIMRETLIYLSHLDHDDTEKQMLRKLNKQLSGEEWAWNNLNTLCWAIGSISGSMAEDQENRFLVMVIRDLLNLCEITKGKDNKAVIASNIMYVVGQYPRFLRAHWKFLKTVVNKLFEFMHETHPGVQDMACDTFLKIVQKCKRKFVIVQVGENEPFVSELLTGLATTVQDLEPHQIHSFYESVGNMIQAESDPQKRDEYLQRLMALPNQKWAEIIGQARHSVEFLKDQVVIRTVLNILQTNTSAATSLGTYFLSQISLIFLDMLNVYRMYSELVSTNITEGGPYASKTSFVKLLRSVKRETLKLIETFLDKAEDQPHIGKQFVPPMMESVLGDYARNVPDARESEVLSLFATIINKYKATMLDDVPHIFEAVFQCTLEMITKNFEDYPEHRLKFFSLLRAIATFCFPALIKLSSPQLKLVMDSIIWAFRHTERNIAETGLNLLLEMLKNFQQSEFCNQFYRSYFMQIEQEIFAVLTDTFHKPGFKLHVLVLQQLFCLPESGALTEPLWDATTVPYPYPDNVAFVREYTIKLLSSSFPNMTAAEVTQFVNGLYESRNDPSGFKNNIRDFLVQSKEFSAQDNKDLYAEEAAAQRERERQRMLSIPGLIAPNEIQDEMVDS

SEQ ID NO: 20514 - protein, 983 aa, Arabidopsis thaliana
  peptide (1)..(983): Ceres Seq. ID no. 12388490
  misc_feature (232)..(414): Homolog of NCBI NO: 5690335 NR Description: null
  misc_feature (253)..(438): Homolog of NCBI NO: 6714425 NR Description: null
  misc_feature (206)..(456): Homolog of NCBI NO: 14250864 NR Description: null
  misc_feature (1)..(272): Homolog of NCBI NO: 30790419 NR Description: CRM1 [Trypanosoma cruzi]
  misc_feature (324)..(952): Homolog of NCBI NO: 30790419 NR Description: CRM1 [Trypanosoma cruzi]
  misc_feature (1)..(272): Homolog of NCBI NO: 30794645 NR Description: exportin 1 [Trypanosoma brucei brucei]
  misc_feature (324)..(960): Homolog of NCBI NO: 30794645 NR Description: exportin 1 [Trypanosoma brucei brucei]
  misc_feature (1)..(272): Homolog of NCBI NO: 30790417 NR Description: CRM1 [Trypanosoma brucei]
  misc_feature (324)..(960): Homolog of NCBI NO: 30790417 NR Description: CRM1 [Trypanosoma brucei]
  misc_feature (1)..(982): Homolog of NCBI NO: 29789299 NR Description: exportin 1 (CRM1, yeast, homolog) [Rattus
MKNYISEVIVQLSSNEASFRSERLYVNKLNVILVQIVKHDWPAKWTSFIPDLVAAAKTSETICENCMAILKLLSEEVFDFSRGEMTQQKIKELKQSLNSEFKLIHELCLYVLSASQRQDLIRATLSALHAYLSWIPLGYIFESTLLETLLKFFPVPAYRNLTIQCLTEVAALNFGDFYNVQYVKMYTIFIGQLRIILPPSTKIPEAYSSGSGEEQAFIQNLALFFTSFFKFHIRVLESTPEVVSLLLAGLEYLINISYVDDTEVFKVCLDYWNSLVLELFDAHHNSDNPAVSASLMGLQPFLPGMVDGLGSQVMQRRQLYSHPMSKLRGLMINRMAKPEEVLIVEDENGNIVRETMKDNDVLVQYKIMRETLIYLSHLDHDDTEKQMLRKLNKQLSGEEWAWNNLNTLCWAIGSISGSMAEDQENRFLVMVIRDLLNLCEITKGKDNKAVIASNIMYVVGQYPRFLRAHWKFLKTVVNKLFEFMHETHPGVQDMACDTFLKIVQKCKRKFVIVQVGENEPFVSELLTGLATTVQDLEPHQIHSFYESVGNMIQAESDPQKRDEYLQRLMALPNQKWAEIIGQARHSVEFLKDQVVIRTVLNILQTNTSAATSLGTYFLSQISLIFLDMLNVYRMYSELVSTNITEGGPYASKTSFVKLLRSVKRETLKLIETFLDKAEDQPHIGKQFVPPMMESVLGDYARNVPDARESEVLSLFATIINKYKATMLDDVPHIFEAVFQCTLEMITKNFEDYPEHRLKFFSLLRAIATFCFPALIKLSSPQLKLVMDSIIWAFRHTERNIAETGLNLLLEMLKNFQQSEFCNQFYRSYFMQIEQEIFAVLTDTFHKPGFKLHVLVLQQLFCLPESGALTEPLWDATTVPYPYPDNVAFVREYTIKLLSSSFPNMTAAEVTQFVNGLYESRNDPSGFKNNIRDFLVQSKEFSAQDNKDLYAEEAAAQRERERQRMLSIPGLIAPNEIQDEMVDS

SEQ ID NO: 20515 - DNA, 666 bp, Arabidopsis thaliana
  misc_feature (1)..(666): Ceres Seq. ID no. 13575779
  misc_feature: MA Experiment ID: 108434 Result: Up-regulated in Transcription
  misc_feature: MA Experiment 108434 PARAMETER Experiment Name: At_Root_Tips_cDNA_P Parameter: Tissue Value: Root Tips
  misc_feature: MA Experiment ID: 108462 Result: Down-regulated in Transcription
  misc_feature: MA Experiment 108462 PARAMETER Experiment Name: At_Germinating_Seeds_cDNA_P Parameter: Age (day) Value: 2 vs. 0
  misc_feature: MA Experiment 108462 PARAMETER Experiment Name: At_Germinating_Seeds_cDNA_P Parameter: Tissue Value: Germinating Seeds
  misc_feature: MA Experiment ID: 108463 Result: Down-regulated in Transcription
  misc_feature: MA Experiment 108463 PARAMETER Experiment Name: At_Germinating_Seeds_cDNA_P Parameter: Age (day) Value: 3 vs. 0
  misc_feature: MA Experiment 108463 PARAMETER Experiment Name: At_Germinating_Seeds_cDNA_P Parameter: Tissue Value: Germinating Seeds
  misc_feature: MA Experiment ID: 108464 Result: Down-regulated in Transcription
  misc_feature: MA Experiment 108464 PARAMETER Experiment Name: At_Germinating_Seeds_cDNA_P Parameter: Age (day) Value: 4 vs. 0
  misc_feature: MA Experiment 108464 PARAMETER Experiment Name: At_Germinating_Seeds_cDNA_P Parameter: Tissue Value: Germinating Seeds
  misc_feature: MA Experiment ID: 108573 Result: Down-regulated in Transcription
  misc_feature: MA Experiment 108573 PARAMETER Experiment Name: At_Drought_cDNA_P Parameter: Timepoint (hr) Value: 6
  misc_feature: MA Experiment 108573 PARAMETER Experiment Name: At_Drought_cDNA_P Parameter: Tissue Value: Aerial
  misc_feature: MA Experiment 108573 PARAMETER Experiment Name: At_Drought_cDNA_P Parameter: Treatment Value: Drought vs. No Drought
  misc_feature: MA Experiment ID: 20001807 Result: Up-regulated in Transcription
  misc_feature: MA Experiment 20001807 PARAMETER Experiment Name: At_50mM_NH4NO3_L-to-H_Sub_P Parameter: Timepoint (hr) Value: 6
  misc_feature: MA Experiment 20001807 PARAMETER Experiment Name: At_50mM_NH4NO3_L-to-H_Sub_P Parameter: Tissue Value: Leaf
  misc_feature: MA Experiment 20001807 PARAMETER Experiment Name: At_50mM_NH4NO3_L-to-H_Sub_P Parameter: Treatment Value: 50mM NH4NO3 vs 100mM Mannitol
aagggtttcgtcagagacagaagtgagagaggaggaaaaatgccggcgggacacggagtgagggcgagaacaagagatctgttcgcgagaccattcaggaagaagggttatattccactctccacttacctcagaaccttcaaggtcggcgattacgtcgatgtcaaggttaatggagctatccacaagggtatgcctcataagttctaccatggtcgtactggtcgcatctggaatgtcactaagcgtgccgttggtgttgaagtcaacaaacagattgggaacagaatcataaggaagaggatacatgtgcgtgtggagcatgtgcaacagtcaaggtgtgctgaggagtttaaactcagaaagaagcagaacgatgtgcttaaggctgatgctaaagccagaggagagactatcagcaccaagagacagcctaaaggtcctaaaccgggtttcatggtcgaaggtatgacattggagactgtcactcccattccttacgatgttgtcaacgatctcaagggtggttattgagttttttccattttattatcattctctactcagaatttttgcacttgcttttttaatgatgtttttgtatcaaacaagagtgaattctatatggtatgagttcatattttgttaggaaagatggtttatccc

SEQ ID NO: 20516 - protein, 177 aa, Arabidopsis thaliana
  peptide (1)..(177): Ceres Seq. ID no. 13575780
  misc_feature (15)..(113): Pfam Name: Ribosomal protein L21e Pfam Description: Ribosomal protein L21e
  misc_feature (14)..(170): Homolog of NCBI NO: 38048363 NR Description: similar to Drosophila melanogaster CG12775
  misc_feature (14)..(168): Homolog of NCBI NO: 6325178 NR Description: Homology to rat L21; Rpl21bp [Saccharomyces
  misc_feature (14)..(170): Homolog of NCBI NO: 20129705 NR Description: CG12775-PA [Drosophila melanogaster]
  misc_feature (14)..(168): Homolog of NCBI NO: 6319668 NR Description: Homology to rat L21; Rpl21ap [Saccharomyces
  misc_feature (14)..(170): Homolog of NCBI NO: 15213768 NR Description: ribosomal protein L21 [Spodoptera frugiperda]
  misc_feature (14)..(168): Homolog of NCBI NO: 6094029 NR Description: 60S RIBOSOMAL PROTEIN L21
  misc_feature (14)..(177): Homolog of NCBI NO: 11276828 NR Description: ribosomal protein L21 [imported] - rice
  misc_feature (14)..(177): Homolog of NCBI NO: 37535194 NR Description: 60S ribosomal protein L21
  misc_feature (14)..(177): Homolog of NCBI NO: 18391042 NR Description: 60S ribosomal protein L21 (RPL21A) [Arabidopsis
  misc_feature (14)..(177): Homolog of NCBI NO: 18406015 NR Description: 60S ribosomal protein L21 (RPL21E) [Arabidopsis
KGFVRDRSERGGKMPAGHGVRARTRDLFARPFRKKGYIPLSTYLRTFKVGDYVDVKVNGAIHKGMPHKFYHGRTGRIWNVTKRAVGVEVNKQIGNRIIRKRIHVRVEHVQQSRCAEEFKLRKKQNDVLKADAKARGETISTKRQPKGPKPGFMVEGMTLETVTPIPYDVVNDLKGGY

SEQ ID NO: 20517 - protein, 164 aa, Arabidopsis thaliana
  peptide (1)..(164): Ceres Seq. ID no. 13575781
  misc_feature (2)..(100): Pfam Name: Ribosomal protein L21e Pfam Description: Ribosomal protein L21e
  misc_feature (1)..(157): Homolog of NCBI NO: 38048363 NR Description: similar to Drosophila melanogaster CG12775
  misc_feature (1)..(155): Homolog of NCBI NO: 6325178 NR Description: Homology to rat L21; Rpl21bp [Saccharomyces
  misc_feature (1)..(157): Homolog of NCBI NO: 20129705 NR Description: CG12775-PA [Drosophila melanogaster]
  misc_feature (1)..(155): Homolog of NCBI NO: 6319668 NR Description: Homology to rat L21; Rpl21ap [Saccharomyces
  misc_feature (1)..(157): Homolog of NCBI NO: 15213768 NR Description: ribosomal protein L21 [Spodoptera frugiperda]
  misc_feature (1)..(155): Homolog of NCBI NO: 6094029 NR Description: 60S RIBOSOMAL PROTEIN L21
  misc_feature (1)..(164): Homolog of NCBI NO: 11276828 NR Description: ribosomal protein L21 [imported] - rice
  misc_feature (1)..(164): Homolog of NCBI NO: 37535194 NR Description: 60S ribosomal protein L21
  misc_feature (1)..(164): Homolog of NCBI NO: 18391042 NR Description: 60S ribosomal protein L21 (RPL21A) [Arabidopsis
  misc_feature (1)..(164): Homolog of NCBI NO: 18406015 NR Description: 60S ribosomal protein L21 (RPL21E) [Arabidopsis
MPAGHGVRARTRDLFARPFRKKGYIPLSTYLRTFKVGDYVDVKVNGAIHKGMPHKFYHGRTGRIWNVTKRAVGVEVNKQIGNRIIRKRIHVRVEHVQQSRCAEEFKLRKKQNDVLKADAKARGETISTKRQPKGPKPGFMVEGMTLETVTPIPYDVVNDLKGGY

SEQ ID NO: 20518 - protein, 113 aa, Arabidopsis thaliana
  peptide (1)..(113): Ceres Seq. ID no. 13575782
  misc_feature (1)..(106): Homolog of NCBI NO: 38048363 NR Description: similar to Drosophila melanogaster CG12775
  misc_feature (1)..(104): Homolog of NCBI NO: 6325178 NR Description: Homology to rat L21; Rpl21bp [Saccharomyces
  misc_feature (1)..(106): Homolog of NCBI NO: 20129705 NR Description: CG12775-PA [Drosophila melanogaster]
  misc_feature (1)..(104): Homolog of NCBI NO: 6319668 NR Description: Homology to rat L21; Rpl21ap [Saccharomyces
  misc_feature (1)..(106): Homolog of NCBI NO: 15213768 NR Description: ribosomal protein L21 [Spodoptera frugiperda]
  misc_feature (1)..(104): Homolog of NCBI NO: 6094029 NR Description: 60S RIBOSOMAL PROTEIN L21
  misc_feature (1)..(113): Homolog of NCBI NO: 11276828 NR Description: ribosomal protein L21 [imported] - rice
  misc_feature (1)..(113): Homolog of NCBI NO: 37535194 NR Description: 60S ribosomal protein L21
  misc_feature (1)..(113): Homolog of NCBI NO: 18391042 NR Description: 60S ribosomal protein L21 (RPL21A) [Arabidopsis
  misc_feature (1)..(113): Homolog of NCBI NO: 18406015 NR Description: 60S ribosomal protein L21 (RPL21E) [Arabidopsis
MPHKFYHGRTGRIWNVTKRAVGVEVNKQIGNRIIRKRIHVRVEHVQQSRCAEEFKLRKKQNDVLKADAKARGETISTKRQPKGPKPGFMVEGMTLETVTPIPYDVVNDLKGGY

SEQ ID NO: 20519 - DNA, 1252 bp, Arabidopsis thaliana
  misc_feature (1)..(1252): Ceres Seq. ID no. 13490446
  misc_feature: MA Experiment ID: 108434 Result: Up-regulated in Transcription
  misc_feature: MA Experiment 108434 PARAMETER Experiment Name: At_Root_Tips_cDNA_P Parameter: Tissue Value: Root Tips
  misc_feature: MA Experiment ID: 108435 Result: Up-regulated in Transcription
  misc_feature: MA Experiment 108435 PARAMETER Experiment Name: At_stm_Mutants_cDNA_P Parameter: Plant Line Value: wt Landsburg vs stm
  misc_feature: MA Experiment 108435 PARAMETER Experiment Name: At_stm_Mutants_cDNA_P Parameter: Tissue Value: Shoot Apical Meristem Region
  misc_feature: MA Experiment ID: 108462 Result: Down-regulated in Transcription
  misc_feature: MA Experiment 108462 PARAMETER Experiment Name: At_Germinating_Seeds_cDNA_P Parameter: Age (day) Value: 2 vs. 0
  misc_feature: MA Experiment 108462 PARAMETER Experiment Name: At_Germinating_Seeds_cDNA_P Parameter: Tissue Value: Germinating Seeds
  misc_feature: MA Experiment ID: 108463 Result: Down-regulated in Transcription
  misc_feature: MA Experiment 108463 PARAMETER Experiment Name: At_Germinating_Seeds_cDNA_P Parameter: Age (day) Value: 3 vs. 0
  misc_feature: MA Experiment 108463 PARAMETER Experiment Name: At_Germinating_Seeds_cDNA_P Parameter: Tissue Value: Germinating Seeds
  misc_feature: MA Experiment ID: 108464 Result: Down-regulated in Transcription
  misc_feature: MA Experiment 108464 PARAMETER Experiment Name: At_Germinating_Seeds_cDNA_P Parameter: Age (day) Value: 4 vs. 0
  misc_feature: MA Experiment 108464 PARAMETER Experiment Name: At_Germinating_Seeds_cDNA_P Parameter: Tissue Value: Germinating Seeds
  misc_feature: MA Experiment ID: 20000180 Result: Down-regulated in Transcription
  misc_feature: MA Experiment 20000180 PARAMETER Experiment Name: At_Germinating_Seeds_P Parameter: Age (hr) Value: 24 vs. 0
  misc_feature: MA Experiment 20000180 PARAMETER Experiment Name: At_Germinating_Seeds_P Parameter: Tissue Value: Germinating Seeds
  misc_feature: MA Experiment ID: 20001557 Result: Up-regulated in Transcription
  misc_feature: MA Experiment 20001557 PARAMETER Experiment Name: At_Drought_Soil_Dry_P Parameter: Age (day) Value: 27
  misc_feature: MA Experiment 20001557 PARAMETER Experiment Name: At_Drought_Soil_Dry_P Parameter: Organism Value: A. thaliana
  misc_feature: MA Experiment 20001557 PARAMETER Experiment Name: At_Drought_Soil_Dry_P Parameter: Plant Line Value: WS
  misc_feature: MA Experiment 20001557 PARAMETER Experiment Name: At_Drought_Soil_Dry_P Parameter: Post Timepoint (hr) Value: 3
  misc_feature: MA Experiment 20001557 PARAMETER Experiment Name: At_Drought_Soil_Dry_P Parameter: Post-Treatment Value: Re-Water vs. No Drought
  misc_feature: MA Experiment 20001557 PARAMETER Experiment Name: At_Drought_Soil_Dry_P Parameter: Timepoint (day) Value: 13
  misc_feature: MA Experiment 20001557 PARAMETER Experiment Name: At_Drought_Soil_Dry_P Parameter: Treatment Value: Drought vs. No Drought
ctctgaaacggacatcgagaaattccaggagtgagttttgacaatcggagagaaatggggtcgacagaaaaagagcagacgacgcaacatcacccgcctcacatcagcagtctcgtcgtacgtccctccggaagcaacgacagagaagacggccgcaacgccgccggagactatgagcccggagaagtctctcgtgaccggccttcgtttaatcgctcggatcggtataagggtgacaatggtggacatagaactcgggcaagttctagctcaccaggccgtcgtggatatgaagatcacaagcatggctctgatcttaatcattcaggcgttccacctcgtggccgtgagttaagcagcagaagggaagcacctgggagacacagagactattccccacccttagctagaggtggagctggtgctcgtccttatcgaagaggtttagatgggcctgaacctccacatggaagggatggcatgagcagaaataatatatcaaaggtgcaaccaagagaaggagattggtactgtcttgatccattatgcagaaacttgaactttgcgagacgcgagtcctgctacaaatgcaagaggcatcgttatgcaccggctaatagtcctccactgcctcgccttcttcctcctcccatgaatcattccccaagaagagactttaatggctacagatctcctccgcgtggctggcccagagactacccgccgccaaggcatgaccatcccacatggagagacagagaacgagaccgtccgcattactcagaccatgagtaccctcctagcagaaggatagcatctgactgggcccatacagagccgctcccaaaacctcattatgacagacgaccacctctcagtccacctcgtggtggcagatggggacgagttttgagagagaggagcagatccccgccattgagagatgttccaccaccgccattgagagatggtccaccaccgtcattgagaggaggcggtccaccgctgcacagagattaccgccgtgacagtcactttgacagagaaagacgagacgatgggcgtggcggcagaggcagaatgggaaactcttactgatgcaaaaactgtgtatgtcttgggattttggtttagacagttcaaattttcgcggaatgtgaccttgtattacaccttagattctttgttcttgttagcaaaactcttgtgccattagtgcaaaaaccaaacaaatgagaagcaattttggtgc

SEQ ID NO: 20520 - protein, 347 aa, Arabidopsis thaliana
  peptide (1)..(347): Ceres Seq. ID no. 13490447
  misc_feature (154)..(183): Pfam Name: Zn-finger in Ran binding protein and others Pfam Description: Zn-finger in Ran binding protein and others
  misc_feature (218)..(344): Homolog of NCBI NO: 28631394 NR Description: similar to probable eukaryotic translation
  misc_feature (1)..(347): Homolog of NCBI NO: 26452825 NR Description: unknown protein [Arabidopsis thaliana]
  misc_feature (1)..(347): Homolog of NCBI NO: 15235521 NR Description: expressed protein [Arabidopsis thaliana]
MGSTEKEQTTQHHPPHISSLVVRPSGSNDREDGRNAAGDYEPGEVSRDRPSFNRSDRYKGDNGGHRTRASSSSPGRRGYEDHKHGSDLNHSGVPPRGRELSSRREAPGRHRDYSPPLARGGAGARPYRRGLDGPEPPHGRDGMSRNNISKVQPREGDWYCLDPLCRNLNFARRESCYKCKRHRYAPANSPPLPRLLPPPMNHSPRRDFNGYRSPPRGWPRDYPPPRHDHPTWRDRERDRPHYSDHEYPPSRRIASDWAHTEPLPKPHYDRRPPLSPPRGGRWGRVLRERSRSPPLRDVPPPPLRDGPPPSLRGGGPPLHRDYRRDSHFDRERRDDGRGGRGRMGNSY

SEQ ID NO: 20521 - protein, 205 aa, Arabidopsis thaliana
  peptide (1)..(205): Ceres Seq. ID no. 13490448
  misc_feature (12)..(41): Pfam Name: Zn-finger in Ran binding protein and others Pfam Description: Zn-finger in Ran binding protein and others
  misc_feature (76)..(202): Homolog of NCBI NO: 28631394 NR Description: similar to probable eukaryotic translation
  misc_feature (1)..(205): Homolog of NCBI NO: 26452825 NR Description: unknown protein [Arabidopsis thaliana]
  misc_feature (1)..(205): Homolog of NCBI NO: 15235521 NR Description: expressed protein [Arabidopsis thaliana]
MSRNNISKVQPREGDWYCLDPLCRNLNFARRESCYKCKRHRYAPANSPPLPRLLPPPMNHSPRRDFNGYRSPPRGWPRDYPPPRHDHPTWRDRERDRPHYSDHEYPPSRRIASDWAHTEPLPKPHYDRRPPLSPPRGGRWGRVLRERSRSPPLRDVPPPPLRDGPPPSLRGGGPPLHRDYRRDSHFDRERRDDGRGGRGRMGNSY

SEQ ID NO: 20522 - DNA, 1259 bp, Arabidopsis thaliana
  misc_feature (1)..(1259): Ceres Seq. ID no. 13592961
  misc_feature: MA Experiment ID: 20000314 Result: Down-regulated in Transcription
  misc_feature: MA Experiment 20000314 PARAMETER Experiment Name: At_14day_Shoots-Roots_Sub_P Parameter: Age (day) Value: 14
  misc_feature: MA Experiment 20000314 PARAMETER Experiment Name: At_14day_Shoots-Roots_Sub_P Parameter: Organism Value: A. thaliana
  misc_feature: MA Experiment 20000314 PARAMETER Experiment Name: At_14day_Shoots-Roots_Sub_P Parameter: Plant Line Value: WS
  misc_feature: MA Experiment 20000314 PARAMETER Experiment Name: At_14day_Shoots-Roots_Sub_P Parameter: Tissue Value: Roots vs. Whole Plant
  misc_feature: MA Experiment ID: 20000315 Result: Down-regulated in Transcription
  misc_feature: MA Experiment 20000315 PARAMETER Experiment Name: At_14day_Shoots-Roots_Sub_P Parameter: Age (day) Value: 14
  misc_feature: MA Experiment 20000315 PARAMETER Experiment Name: At_14day_Shoots-Roots_Sub_P Parameter: Organism Value: A. thaliana
  misc_feature: MA Experiment 20000315 PARAMETER Experiment Name: At_14day_Shoots-Roots_Sub_P Parameter: Plant Line Value: WS
  misc_feature: MA Experiment 20000315 PARAMETER Experiment Name: At_14day_Shoots-Roots_Sub_P Parameter: Tissue Value: Shoots vs. Whole Plant
  misc_feature: MA Experiment ID: 20000355 Result: Up-regulated in Transcription
  misc_feature: MA Experiment 20000355 PARAMETER Experiment Name: At_Siliques_Sub_P Parameter: Age (day) Value: 21
  misc_feature: MA Experiment 20000355 PARAMETER Experiment Name: At_Siliques_Sub_P Parameter: Organism Value: A. thaliana
  misc_feature: MA Experiment 20000355 PARAMETER Experiment Name: At_Siliques_Sub_P Parameter: Plant Line Value: WS
  misc_feature: MA Experiment 20000355 PARAMETER Experiment Name: At_Siliques_Sub_P Parameter: Tissue Value: Less Than 5mm Siliques vs. Whole Plant
  misc_feature: MA Experiment ID: 20000440 Result: Up-regulated in Transcription
  misc_feature: MA Experiment 20000440 PARAMETER Experiment Name: At_Closed-Flower__Sub_P Parameter: Tissue Value: Closed Flower vs. Whole Plant
agattctcatgtgttgatgaaactagttagcctctttttatctactctttttgtcactatcataagctcggaatcgcagtgccggaacttcgagtcgatcatcagtttcggtgattcgattgccgacactggaaacttgctcggtctctcagatcataacaatcttcctatgagcgcgtttccaccgtacggagaaactttcttccaccacccaaccggtcgtttctcagacggtcgcctcattattgacttcatcgctgaatttttggggcttccttatgtgcctccttacttcggatctacaaatggaaactttgagaaaggagttaattttgccgtagcctcagcaactgcattggaaagttctttcttagaagagagaggataccattgtcctcacaacatcagtttaggagttcagcttaacatcttcaaggagagtttaccaaatctatgtggcttaccatcagattgtagagatatgattggaaatggtttgattctcatgggagagattggagctaatgattacaatttcccattcttccaactcagacccttggacgaggtcaaagagctcgttccattggtgattaatacgatatcttctgcaatcacggagttgattggtatgggaggaagaacatttctggtgcccggagggttccctctcggatgctcagtagcatttttgacattacaccaaacatcaaacatggaagaatatgatcctttaacaggatgtttgaaatggctgaacaagtttggagaataccacagtgagcggcttcaggaagaactcaacagactcaggaagcttaaccctcacgtcaacatcatatatgctgactactacaatgcttcattgcgccttggccgagaaccaagtaaatacggattcataaacagacacttgtcagcttgttgcggtgtaggagggccgtacaacttcaacttaagtagaagttgtgggagtgtaggagtggaagcttgtagtgatccttcaaagtatgtggcctgggatggccttcatatgactgaggctgcacacaaatcgatggctgatggattagtcaaaggaccatatgcgattcctcctttcgattggtcatgtctcagctcaatgattaagaagaaggaagtcgttggaaacacaatattctttgatgaatagtagacacaagctaagttgatttcaaaatgtaaaatatctgaataaaaagatctaaggataaaaaatttctaataataaccaattt

SEQ ID NO: 20523 - protein, 390 aa, Arabidopsis thaliana
  peptide (1)..(390): Ceres Seq. ID no. 13592962
  misc_feature (33)..(357): Pfam Name: GDSL-like Lipase/Acylhydrolase Pfam Description: GDSL-like Lipase/Acylhydrolase
  misc_feature (1)..(390): Homolog of NCBI NO: 15218728 NR Description: lipase, putative [Arabidopsis thaliana]
  misc_feature (1)..(390): Homolog of NCBI NO: 10764858 NR Description: F1K23.17 [Arabidopsis thaliana]
  misc_feature (5)..(380): Homolog of NCBI NO: 25336243 NR Description: pnrotein F1K23.16 [imported] - Arabidopsis
  misc_feature (2)..(377): Homolog of NCBI NO: 15218725 NR Description: lipase, putative [Arabidopsis thaliana]
  misc_feature (5)..(381): Homolog of NCBI NO: 15218731 NR Description: lipase, putative [Arabidopsis thaliana]
  misc_feature (5)..(381): Homolog of NCBI NO: 21593234 NR Description: lipase, putative [Arabidopsis thaliana]
  misc_feature (5)..(385): Homolog of NCBI NO: 10764858 NR Description: F1K23.17 [Arabidopsis thaliana]
  misc_feature (1)..(390): Homolog of NCBI NO: 30692564 NR Description: lipase, putative [Arabidopsis thaliana]
  misc_feature (1)..(390): Homolog of NCBI NO: 12597843 NR Description: lipase, putative [Arabidopsis thaliana]
  misc_feature (1)..(390): Homolog of NCBI NO: 12322540 NR Description: unknown protein [Arabidopsis thaliana]
DSHVLMKLVSLFLSTLFVTIISSESQCRNFESIISFGDSIADTGNLLGLSDHNNLPMSAFPPYGETFFHHPTGRFSDGRLIIDFIAEFLGLPYVPPYFGSTNGNFEKGVNFAVASATALESSFLEERGYHCPHNISLGVQLNIFKESLPNLCGLPSDCRDMIGNGLILMGEIGANDYNFPFFQLRPLDEVKELVPLVINTISSAITELIGMGGRTFLVPGGFPLGCSVAFLTLHQTSNMEEYDPLTGCLKWLNKFGEYHSERLQEELNRLRKLNPHVNIIYADYYNASLRLGREPSKYGFINRHLSACCGVGGPYNFNLSRSCGSVGVEACSDPSKYVAWDGLHMTEAAHKSMADGLVKGPYAIPPFDWSCLSSMIKKKEVVGNTIFFDE

SEQ ID NO: 20524 - protein, 385 aa, Arabidopsis thaliana
  peptide (1)..(385): Ceres Seq. ID no. 13592963
  misc_feature (28)..(352): Pfam Name: GDSL-like Lipase/Acylhydrolase Pfam Description: GDSL-like Lipase/Acylhydrolase
  misc_feature (1)..(385): Homolog of NCBI NO: 15218728 NR Description: lipase, putative [Arabidopsis thaliana]
  misc_feature (1)..(385): Homolog of NCBI NO: 10764858 NR Description: F1K23.17 [Arabidopsis thaliana]
  misc_feature (1)..(375): Homolog of NCBI NO: 25336243 NR Description: pnrotein F1K23.16 [imported] - Arabidopsis
  misc_feature (1)..(372): Homolog of NCBI NO: 15218725 NR Description: lipase, putative [Arabidopsis thaliana]
  misc_feature (1)..(376): Homolog of NCBI NO: 15218731 NR Description: lipase, putative [Arabidopsis thaliana]
  misc_feature (1)..(376): Homolog of NCBI NO: 21593234 NR Description: lipase, putative [Arabidopsis thaliana]
  misc_feature (1)..(380): Homolog of NCBI NO: 10764858 NR Description: F1K23.17 [Arabidopsis thaliana]
  misc_feature (1)..(385): Homolog of NCBI NO: 30692564 NR Description: lipase, putative [Arabidopsis thaliana]
  misc_feature (1)..(385): Homolog of NCBI NO: 12597843 NR Description: lipase, putative [Arabidopsis thaliana]
  misc_feature (1)..(385): Homolog of NCBI NO: 12322540 NR Description: unknown protein [Arabidopsis thaliana]
MKLVSLFLSTLFVTIISSESQCRNFESIISFGDSIADTGNLLGLSDHNNLPMSAFPPYGETFFHHPTGRFSDGRLIIDFIAEFLGLPYVPPYFGSTNGNFEKGVNFAVASATALESSFLEERGYHCPHNISLGVQLNIFKESLPNLCGLPSDCRDMIGNGLILMGEIGANDYNFPFFQLRPLDEVKELVPLVINTISSAITELIGMGGRTFLVPGGFPLGCSVAFLTLHQTSNMEEYDPLTGCLKWLNKFGEYHSERLQEELNRLRKLNPHVNIIYADYYNASLRLGREPSKYGFINRHLSACCGVGGPYNFNLSRSCGSVGVEACSDPSKYVAWDGLHMTEAAHKSMADGLVKGPYAIPPFDWSCLSSMIKKKEVVGNTIFFDE

SEQ ID NO: 20525 - protein, 334 aa, Arabidopsis thaliana
  peptide (1)..(334): Ceres Seq. ID no. 13592964
  misc_feature (1)..(301): Pfam Name: GDSL-like Lipase/Acylhydrolase Pfam Description: GDSL-like Lipase/Acylhydrolase
  misc_feature (1)..(334): Homolog of NCBI NO: 12322540 NR Description: unknown protein [Arabidopsis thaliana]
  misc_feature (1)..(334): Homolog of NCBI NO: 15218728 NR Description: lipase, putative [Arabidopsis thaliana]
  misc_feature (1)..(334): Homolog of NCBI NO: 10764858 NR Description: F1K23.17 [Arabidopsis thaliana]
  misc_feature (1)..(324): Homolog of NCBI NO: 25336243 NR Description: pnrotein F1K23.16 [imported] - Arabidopsis
  misc_feature (1)..(321): Homolog of NCBI NO: 15218725 NR Description: lipase, putative [Arabidopsis thaliana]
  misc_feature (1)..(325): Homolog of NCBI NO: 15218731 NR Description: lipase, putative [Arabidopsis thaliana]
  misc_feature (1)..(325): Homolog of NCBI NO: 21593234 NR Description: lipase, putative [Arabidopsis thaliana]
  misc_feature (1)..(329): Homolog of NCBI NO: 10764858 NR Description: F1K23.17 [Arabidopsis thaliana]
  misc_feature (1)..(334): Homolog of NCBI NO: 30692564 NR Description: lipase, putative [Arabidopsis thaliana]
  misc_feature (1)..(334): Homolog of NCBI NO: 12597843 NR Description: lipase, putative [Arabidopsis thaliana]
MSAFPPYGETFFHHPTGRFSDGRLIIDFIAEFLGLPYVPPYFGSTNGNFEKGVNFAVASATALESSFLEERGYHCPHNISLGVQLNIFKESLPNLCGLPSDCRDMIGNGLILMGEIGANDYNFPFFQLRPLDEVKELVPLVINTISSAITELIGMGGRTFLVPGGFPLGCSVAFLTLHQTSNMEEYDPLTGCLKWLNKFGEYHSERLQEELNRLRKLNPHVNIIYADYYNASLRLGREPSKYGFINRHLSACCGVGGPYNFNLSRSCGSVGVEACSDPSKYVAWDGLHMTEAAHKSMADGLVKGPYAIPPFDWSCLSSMIKKKEVVGNTIFFDE

SEQ ID NO: 20526 - DNA, 489 bp, Arabidopsis thaliana
  misc_feature (1)..(489): Ceres Seq. ID no. 12337178
  misc_feature: MA Experiment ID: 108434 Result: Down-regulated in Transcription
  misc_feature: MA Experiment 108434 PARAMETER Experiment Name: At_Root_Tips_cDNA_P Parameter: Tissue Value: Root Tips
  misc_feature: MA Experiment ID: 20000265 Result: Down-regulated in Transcription
  misc_feature: MA Experiment 20000265 PARAMETER Experiment Name: At_Open_Flower_P Parameter: Age (day) Value: 21
  misc_feature: MA Experiment 20000265 PARAMETER Experiment Name: At_Open_Flower_P Parameter: Plant Line Value: WS
  misc_feature: MA Experiment 20000265 PARAMETER Experiment Name: At_Open_Flower_P Parameter: Tissue Value: Closed Flower vs. Whole Plant
  misc_feature: MA Experiment ID: 20000794 Result: Up-regulated in Transcription
  misc_feature: MA Experiment 20000794 PARAMETER Experiment Name: At_Petals_P Parameter: Age (day) Value: 23-25 days
  misc_feature: MA Experiment 20000794 PARAMETER Experiment Name: At_Petals_P Parameter: Plant Line Value: WS
  misc_feature: MA Experiment 20000794 PARAMETER Experiment Name: At_Petals_P Parameter: Tissue Value: Petals vs. Whole plant
  misc_feature: MA Experiment ID: 20001247 Result: Up-regulated in Transcription
  misc_feature: MA Experiment 20001247 PARAMETER Experiment Name: At_Far-red-induction_P Parameter: Age (day) Value: 7
  misc_feature: MA Experiment 20001247 PARAMETER Experiment Name: At_Far-red-induction_P Parameter: Light Value: Far-red vs. White
  misc_feature: MA Experiment 20001247 PARAMETER Experiment Name: At_Far-red-induction_P Parameter: Organism Value: A. thaliana
  misc_feature: MA Experiment 20001247 PARAMETER Experiment Name: At_Far-red-induction_P Parameter: Plant Line Value: Columbia
  misc_feature: MA Experiment 20001247 PARAMETER Experiment Name: At_Far-red-induction_P Parameter: Timepoint (hr) Value: 1
  misc_feature: MA Experiment 20001247 PARAMETER Experiment Name: At_Far-red-induction_P Parameter: Tissue Value: Whole Plant
  misc_feature: MA Experiment ID: 20001451 Result: Up-regulated in Transcription
  misc_feature: MA Experiment 20001451 PARAMETER Experiment Name: At_Far-red-induction_P Parameter: Age (day) Value: 7
  misc_feature: MA Experiment 20001451 PARAMETER Experiment Name: At_Far-red-induction_P Parameter: Light Value: Far-red vs. White
  misc_feature: MA Experiment 20001451 PARAMETER Experiment Name: At_Far-red-induction_P Parameter: Organism Value: A. thaliana
  misc_feature: MA Experiment 20001451 PARAMETER Experiment Name: At_Far-red-induction_P Parameter: Plant Line Value: Columbia
  misc_feature: MA Experiment 20001451 PARAMETER Experiment Name: At_Far-red-induction_P Parameter: Timepoint (hr) Value: 24
  misc_feature: MA Experiment 20001451 PARAMETER Experiment Name: At_Far-red-induction_P Parameter: Tissue Value: Whole Plant
aattctgcagaagacgcgtcttctttcttcttcggtaaaaatcagaagcgaagaagagatcaaatcaatctgatcgtagatgggttgtttcagttgcttcgacggaacccaaaaggaacagcgtaaggaagaagagagacaagcctccgccggagctcgtgccaaagccgccgaagctgcccagcaacggaaagagcagtttgataagtctgcagctggaagagctgcacaagctcaattacaacaaatggctaaacaatctgcaaatactaacaaaggagagcctgttcttaagtggcaaatgacgtagtgatgagtcctggtttcaaaaggaatcaatttgtgcgatttggttctttgtaaattgtgtgttcttcaatgtttgcaatactttggttatgtgaattgaagcttattttcttccttattcatctgattatcttttgacttttgtaaaacaaaaaagaaataacagagtacaatgttaag

SEQ ID NO: 20527 - protein, 76 aa, Arabidopsis thaliana
  peptide (1)..(76): Ceres Seq. ID no. 12337179
  misc_feature (1)..(76): Homolog of NCBI NO: 18424765 NR Description: Expressed protein
MGCFSCFDGTQKEQRKEEERQASAGARAKAAEAAQQRKEQFDKSAAGRAAQAQLQQMAKQSANTNKGEPVLKWQMT

SEQ ID NO: 20528 - protein, 41 aa, Arabidopsis thaliana
  peptide (1)..(41): Ceres Seq. ID no. 12337180
NSAEDASSFFFGKNQKRRRDQINLIVDGLFQLLRRNPKGTA

SEQ ID NO: 20529 - DNA, 708 bp, Arabidopsis thaliana
  misc_feature (1)..(708): Ceres Seq. ID no. 12600643
  misc_feature: MA Experiment ID: 108434 Result: Down-regulated in Transcription
  misc_feature: MA Experiment 108434 PARAMETER Experiment Name: At_Root_Tips_cDNA_P Parameter: Tissue Value: Root Tips
  misc_feature: MA Experiment ID: 108435 Result: Down-regulated in Transcription
  misc_feature: MA Experiment 108435 PARAMETER Experiment Name: At_stm_Mutants_cDNA_P Parameter: Plant Line Value: wt Landsburg vs stm
  misc_feature: MA Experiment 108435 PARAMETER Experiment Name: At_stm_Mutants_cDNA_P Parameter: Tissue Value: Shoot Apical Meristem Region
  misc_feature: MA Experiment ID: 108461 Result: Up-regulated in Transcription
  misc_feature: MA Experiment 108461 PARAMETER Experiment Name: At_Germinating_Seeds_cDNA_P Parameter: Age (day) Value: 1 vs. 0
  misc_feature: MA Experiment 108461 PARAMETER Experiment Name: At_Germinating_Seeds_cDNA_P Parameter: Tissue Value: Germinating Seeds
  misc_feature: MA Experiment ID: 108462 Result: Up-regulated in Transcription
  misc_feature: MA Experiment 108462 PARAMETER Experiment Name: At_Germinating_Seeds_cDNA_P Parameter: Age (day) Value: 2 vs. 0
  misc_feature: MA Experiment 108462 PARAMETER Experiment Name: At_Germinating_Seeds_cDNA_P Parameter: Tissue Value: Germinating Seeds
  misc_feature: MA Experiment ID: 108464 Result: Up-regulated in Transcription
  misc_feature: MA Experiment 108464 PARAMETER Experiment Name: At_Germinating_Seeds_cDNA_P Parameter: Age (day) Value: 4 vs. 0
  misc_feature: MA Experiment 108464 PARAMETER Experiment Name: At_Germinating_Seeds_cDNA_P Parameter: Tissue Value: Germinating Seeds
  misc_feature: MA Experiment ID: 108488 Result: Up-regulated in Transcription
  misc_feature: MA Experiment ID: 108489 Result: Down-regulated in Transcription
  misc_feature: MA Experiment ID: 108594 Result: Down-regulated in Transcription
  misc_feature: MA Experiment 108594 PARAMETER Experiment Name: At_Ler-rhl_Root_cDNA_P Parameter: Plant Line Value: null
  misc_feature: MA Experiment ID: 108595 Result: Down-regulated in Transcription
  misc_feature: MA Experiment 108595 PARAMETER Experiment Name: At_Ler-pi_Ovule_cDNA_P Parameter: Plant Line Value: null
  misc_feature: MA Experiment ID: 20000180 Result: Up-regulated in Transcription
  misc_feature: MA Experiment 20000180 PARAMETER Experiment Name: At_Germinating_Seeds_P Parameter: Age (hr) Value: 24 vs. 0
  misc_feature: MA Experiment 20000180 PARAMETER Experiment Name: At_Germinating_Seeds_P Parameter: Tissue Value: Germinating Seeds
  misc_feature: MA Experiment ID: 20000185 Result: Down-regulated in Transcription
  misc_feature: MA Experiment 20000185 PARAMETER Experiment Name: At_Roots__P Parameter: Age (day) Value: 7 vs. 21
  misc_feature: MA Experiment 20000185 PARAMETER Experiment Name: At_Roots__P Parameter: Organism Value: A. thaliana
  misc_feature: MA Experiment 20000185 PARAMETER Experiment Name: At_Roots__P Parameter: Tissue Value: Roots vs. Whole Plant
  misc_feature: MA Experiment ID: 20000224 Result: Down-regulated in Transcription
  misc_feature: MA Experiment ID: 20000439 Result: Down-regulated in Transcription
  misc_feature: MA Experiment 20000439 PARAMETER Experiment Name: At_Roots__P Parameter: Age (day) Value: 14 vs. 21
  misc_feature: MA Experiment 20000439 PARAMETER Experiment Name: At_Roots__P Parameter: Organism Value: A. thaliana
  misc_feature: MA Experiment 20000439 PARAMETER Experiment Name: At_Roots__P Parameter: Tissue Value: Roots vs. Whole Plant
  misc_feature: MA Experiment ID: 20000794 Result: Down-regulated in Transcription
  misc_feature: MA Experiment 20000794 PARAMETER Experiment Name: At_Petals_P Parameter: Age (day) Value: 23-25 days
  misc_feature: MA Experiment 20000794 PARAMETER Experiment Name: At_Petals_P Parameter: Plant Line Value: WS
  misc_feature: MA Experiment 20000794 PARAMETER Experiment Name: At_Petals_P Parameter: Tissue Value: Petals vs. Whole plant
  misc_feature: MA Experiment ID: 20001556 Result: Down-regulated in Transcription
  misc_feature: MA Experiment 20001556 PARAMETER Experiment Name: At_Drought_Soil_Dry_P Parameter: Age (day) Value: 26
  misc_feature: MA Experiment 20001556 PARAMETER Experiment Name: At_Drought_Soil_Dry_P Parameter: Organism Value: A. thaliana
  misc_feature: MA Experiment 20001556 PARAMETER Experiment Name: At_Drought_Soil_Dry_P Parameter: Plant Line Value: WS
  misc_feature: MA Experiment 20001556 PARAMETER Experiment Name: At_Drought_Soil_Dry_P Parameter: Post Timepoint (hr) Value: None
  misc_feature: MA Experiment 20001556 PARAMETER Experiment Name: At_Drought_Soil_Dry_P Parameter: Post-Treatment Value: None
  misc_feature: MA Experiment 20001556 PARAMETER Experiment Name: At_Drought_Soil_Dry_P Parameter: Timepoint (day) Value: 12
  misc_feature: MA Experiment 20001556 PARAMETER Experiment Name: At_Drought_Soil_Dry_P Parameter: Treatment Value: Drought vs. No Drought
  misc_feature: MA Experiment ID: 20001557 Result: Down-regulated in Transcription
  misc_feature: MA Experiment 20001557 PARAMETER Experiment Name: At_Drought_Soil_Dry_P Parameter: Age (day) Value: 27
  misc_feature: MA Experiment 20001557 PARAMETER Experiment Name: At_Drought_Soil_Dry_P Parameter: Organism Value: A. thaliana
  misc_feature: MA Experiment 20001557 PARAMETER Experiment Name: At_Drought_Soil_Dry_P Parameter: Plant Line Value: WS
  misc_feature: MA Experiment 20001557 PARAMETER Experiment Name: At_Drought_Soil_Dry_P Parameter: Post Timepoint (hr) Value: 3
  misc_feature: MA Experiment 20001557 PARAMETER Experiment Name: At_Drought_Soil_Dry_P Parameter: Post-Treatment Value: Re-Water vs. No Drought
  misc_feature: MA Experiment 20001557 PARAMETER Experiment Name: At_Drought_Soil_Dry_P Parameter: Timepoint (day) Value: 13
  misc_feature: MA Experiment 20001557 PARAMETER Experiment Name: At_Drought_Soil_Dry_P Parameter: Treatment Value: Drought vs. No Drought
  misc_feature: MA Experiment ID: 20001558 Result: Down-regulated in Transcription
  misc_feature: MA Experiment 20001558 PARAMETER Experiment Name: At_Drought_Soil_Dry_P Parameter: Age (day) Value: 27
  misc_feature: MA Experiment 20001558 PARAMETER Experiment Name: At_Drought_Soil_Dry_P Parameter: Organism Value: A. thaliana
  misc_feature: MA Experiment 20001558 PARAMETER Experiment Name: At_Drought_Soil_Dry_P Parameter: Plant Line Value: WS
  misc_feature: MA Experiment 20001558 PARAMETER Experiment Name: At_Drought_Soil_Dry_P Parameter: Post Timepoint (hr) Value: 6
  misc_feature: MA Experiment 20001558 PARAMETER Experiment Name: At_Drought_Soil_Dry_P Parameter: Post-Treatment Value: Re-Water vs. No Drought
  misc_feature: MA Experiment 20001558 PARAMETER Experiment Name: At_Drought_Soil_Dry_P Parameter: Timepoint (day) Value: 13
  misc_feature: MA Experiment 20001558 PARAMETER Experiment Name: At_Drought_Soil_Dry_P Parameter: Treatment Value: Drought vs. No Drought
  misc_feature: MA Experiment ID: 20001560 Result: Down-regulated in Transcription
  misc_feature: MA Experiment 20001560 PARAMETER Experiment Name: At_Drought_Soil_Dry_P Parameter: Age (day) Value: 28
  misc_feature: MA Experiment 20001560 PARAMETER Experiment Name: At_Drought_Soil_Dry_P Parameter: Organism Value: A. thaliana
  misc_feature: MA Experiment 20001560 PARAMETER Experiment Name: At_Drought_Soil_Dry_P Parameter: Plant Line Value: WS
  misc_feature: MA Experiment 20001560 PARAMETER Experiment Name: At_Drought_Soil_Dry_P Parameter: Post Timepoint (hr) Value: None
  misc_feature: MA Experiment 20001560 PARAMETER Experiment Name: At_Drought_Soil_Dry_P Parameter: Post-Treatment Value: None
  misc_feature: MA Experiment 20001560 PARAMETER Experiment Name: At_Drought_Soil_Dry_P Parameter: Timepoint (day) Value: 14
  misc_feature: MA Experiment 20001560 PARAMETER Experiment Name: At_Drought_Soil_Dry_P Parameter: Treatment Value: Drought vs. No Drought
  misc_feature: MA Experiment ID: 20001906 Result: Down-regulated in Transcription
  misc_feature: MA Experiment 20001906 PARAMETER Experiment Name: At_Drought_Reproduction_P Parameter: Age (day) Value: 35
  misc_feature: MA Experiment 20001906 PARAMETER Experiment Name: At_Drought_Reproduction_P Parameter: Organism Value: A. thaliana
  misc_feature: MA Experiment 20001906 PARAMETER Experiment Name: At_Drought_Reproduction_P Parameter: Plant Line Value: WS
  misc_feature: MA Experiment 20001906 PARAMETER Experiment Name: At_Drought_Reproduction_P Parameter: Timepoint (day) Value: 5
  misc_feature: MA Experiment 20001906 PARAMETER Experiment Name: At_Drought_Reproduction_P Parameter: Tissue Value: Siliques
  misc_feature: MA Experiment 20001906 PARAMETER Experiment Name: At_Drought_Reproduction_P Parameter: Treatment Value: Drought vs. No Drought
  misc_feature: MA Experiment ID: 20001908 Result: Down-regulated in Transcription
  misc_feature: MA Experiment 20001908 PARAMETER Experiment Name: At_Drought_Reproduction_P Parameter: Age (day) Value: 40
  misc_feature: MA Experiment 20001908 PARAMETER Experiment Name: At_Drought_Reproduction_P Parameter: Organism Value: A. thaliana
  misc_feature: MA Experiment 20001908 PARAMETER Experiment Name: At_Drought_Reproduction_P Parameter: Plant Line Value: WS
  misc_feature: MA Experiment 20001908 PARAMETER Experiment Name: At_Drought_Reproduction_P Parameter: Timepoint (day) Value: 10
  misc_feature: MA Experiment 20001908 PARAMETER Experiment Name: At_Drought_Reproduction_P Parameter: Tissue Value: Siliques
  misc_feature: MA Experiment 20001908 PARAMETER Experiment Name: At_Drought_Reproduction_P Parameter: Treatment Value: Drought vs. No Drought
aaagaaattaaaagtgttcttgttgctgtagaacacaaacagaacaaacaaaaaatcaattgaagagtctctcagtcgttaggggaagcaaatagagaaatggctagctttactgcctccgcttccaccgtctccgccgctcgtccggctctccttctcaagcctaccgtcgccatctctgctcctgttcttggtttgcctccaatgggtaagaagaagggaggagtgagatgttcaatggagacaaagcaaggaaacgtctcagtcatgggggctggagtttcagctgcagcaacagctgctttgacggcggtgatgagcaatcccgcgatggctttggttgatgagaggatgtcaacagaaggaacaggattaccctttggtctaagcaacaacctcttgggttggattctgtttggagtctttggtttgatctggactttcttcttcgtctacacttcatctctcgaggaggatgaagaatctggtctttcactctgaaggaagaatcaatctttcgtcttctcatttccattttcatgtgagaacatgaatcaaaagtgttcacccttctagtttcttgtaattgttaagtaaagactaaaaactattttcatgtgtgtttactttcccccattctctttatcttgtcataacattgataaggaggagattatgtgattattaaatatcatgcatgacatgttc

SEQ ID NO: 20530 - protein, 133 aa, Arabidopsis thaliana
  peptide (1)..(133): Ceres Seq. ID no. 12600644
  misc_feature (1)..(133): Homolog of NCBI NO: 32307612 NR Description: photosystem II protein PsbW [Bigelowiella natans]
  misc_feature (28)..(133): Homolog of NCBI NO: 20139842 NR Description: Photosystem II reaction center W protein,
  misc_feature (68)..(133): Homolog of NCBI NO: 12584904 NR Description: PSII subunit PsbW [Physcomitrella patens]
  misc_feature (29)..(118): Homolog of NCBI NO: 12584902 NR Description: PSII subunit PsbW [Physcomitrella patens]
  misc_feature (1)..(118): Homolog of NCBI NO: 12584906 NR Description: PSII subunit PsbW [Physcomitrella patens]
  misc_feature (41)..(133): Homolog of NCBI NO: 16930765 NR Description: photosystem II reaction center [Retama raetam]
  misc_feature (1)..(133): Homolog of NCBI NO: 2493694 NR Description: Photosystem II reaction center W protein,
  misc_feature (1)..(112): Homolog of NCBI NO: 16226722 NR Description: At2g30570/T6B20.8 [Arabidopsis thaliana]
  misc_feature (1)..(133): Homolog of NCBI NO: 2129672 NR Description: photosystem II protein psbW - Arabidopsis
  misc_feature (1)..(133): Homolog of NCBI NO: 15224531 NR Description: photosystem II reaction center 6.1KD protein
MASFTASASTVSAARPALLLKPTVAISAPVLGLPPMGKKKGGVRCSMETKQGNVSVMGAGVSAAATAALTAVMSNPAMALVDERMSTEGTGLPFGLSNNLLGWILFGVFGLIWTFFFVYTSSLEEDEESGLSL

SEQ ID NO: 20531 - protein, 98 aa, Arabidopsis thaliana
  peptide (1)..(98): Ceres Seq. ID no. 12600645
  misc_feature (1)..(98): Homolog of NCBI NO: 32307612 NR Description: photosystem II protein PsbW [Bigelowiella natans]
  misc_feature (1)..(98): Homolog of NCBI NO: 20139842 NR Description: Photosystem II reaction center W protein,
  misc_feature (33)..(98): Homolog of NCBI NO: 12584904 NR Description: PSII subunit PsbW [Physcomitrella patens]
  misc_feature (1)..(83): Homolog of NCBI NO: 12584902 NR Description: PSII subunit PsbW [Physcomitrella patens]
  misc_feature (1)..(83): Homolog of NCBI NO: 12584906 NR Description: PSII subunit PsbW [Physcomitrella patens]
  misc_feature (6)..(98): Homolog of NCBI NO: 16930765 NR Description: photosystem II reaction center [Retama raetam]
  misc_feature (1)..(98): Homolog of NCBI NO: 2493694 NR Description: Photosystem II reaction center W protein,
  misc_feature (1)..(77): Homolog of NCBI NO: 16226722 NR Description: At2g30570/T6B20.8 [Arabidopsis thaliana]
  misc_feature (1)..(98): Homolog of NCBI NO: 2129672 NR Description: photosystem II protein psbW - Arabidopsis
  misc_feature (1)..(98): Homolog of NCBI NO: 15224531 NR Description: photosystem II reaction center 6.1KD protein
MGKKKGGVRCSMETKQGNVSVMGAGVSAAATAALTAVMSNPAMALVDERMSTEGTGLPFGLSNNLLGWILFGVFGLIWTFFFVYTSSLEEDEESGLSL

SEQ ID NO: 20532 - protein, 87 aa, Arabidopsis thaliana
  peptide (1)..(87): Ceres Seq. ID no. 12600646
  misc_feature (1)..(87): Homolog of NCBI NO: 32307612 NR Description: photosystem II protein PsbW [Bigelowiella natans]
  misc_feature (1)..(87): Homolog of NCBI NO: 20139842 NR Description: Photosystem II reaction center W protein,
  misc_feature (22)..(87): Homolog of NCBI NO: 12584904 NR Description: PSII subunit PsbW [Physcomitrella patens]
  misc_feature (1)..(72): Homolog of NCBI NO: 12584902 NR Description: PSII subunit PsbW [Physcomitrella patens]
  misc_feature (1)..(72): Homolog of NCBI NO: 12584906 NR Description: PSII subunit PsbW [Physcomitrella patens]
  misc_feature (1)..(87): Homolog of NCBI NO: 16930765 NR Description: photosystem II reaction center [Retama raetam]
  misc_feature (1)..(87): Homolog of NCBI NO: 2493694 NR Description: Photosystem II reaction center W protein,
  misc_feature (1)..(66): Homolog of NCBI NO: 16226722 NR Description: At2g30570/T6B20.8 [Arabidopsis thaliana]
  misc_feature (1)..(87): Homolog of NCBI NO: 2129672 NR Description: photosystem II protein psbW - Arabidopsis
  misc_feature (1)..(87): Homolog of NCBI NO: 15224531 NR Description: photosystem II reaction center 6.1KD protein
METKQGNVSVMGAGVSAAATAALTAVMSNPAMALVDERMSTEGTGLPFGLSNNLLGWILFGVFGLIWTFFFVYTSSLEEDEESGLSL

SEQ ID NO: 20533 - DNA, 546 bp, Arabidopsis thaliana
  misc_feature (1)..(546): Ceres Seq. ID no. 12329459
  misc_feature: MA Experiment ID: 108573 Result: Down-regulated in Transcription
  misc_feature: MA Experiment 108573 PARAMETER Experiment Name: At_Drought_cDNA_P Parameter: Timepoint (hr) Value: 6
  misc_feature: MA Experiment 108573 PARAMETER Experiment Name: At_Drought_cDNA_P Parameter: Tissue Value: Aerial
  misc_feature: MA Experiment 108573 PARAMETER Experiment Name: At_Drought_cDNA_P Parameter: Treatment Value: Drought vs. No Drought
  misc_feature: MA Experiment ID: 108577 Result: Down-regulated in Transcription
  misc_feature: MA Experiment 108577 PARAMETER Experiment Name: At_42deg_Heat_cDNA_P Parameter: Temperature (deg C) Value: 42 vs. 22
  misc_feature: MA Experiment 108577 PARAMETER Experiment Name: At_42deg_Heat_cDNA_P Parameter: Timepoint (hr) Value: 6
  misc_feature: MA Experiment 108577 PARAMETER Experiment Name: At_42deg_Heat_cDNA_P Parameter: Tissue Value: Aerial
  misc_feature: MA Experiment ID: 20000093 Result: Down-regulated in Transcription
  misc_feature: MA Experiment 20000093 PARAMETER Experiment Name: At_42deg_Heat_cDNA_P Parameter: Temperature (deg C) Value: 42 vs. 22
  misc_feature: MA Experiment 20000093 PARAMETER Experiment Name: At_42deg_Heat_cDNA_P Parameter: Timepoint (hr) Value: 0.5
  misc_feature: MA Experiment 20000093 PARAMETER Experiment Name: At_42deg_Heat_cDNA_P Parameter: Tissue Value: Aerial
  misc_feature: MA Experiment ID: 20000111 Result: Down-regulated in Transcription
  misc_feature: MA Experiment 20000111 PARAMETER Experiment Name: At_42deg_Heat_cDNA_P Parameter: Temperature (deg C) Value: 42 vs. 22
  misc_feature: MA Experiment 20000111 PARAMETER Experiment Name: At_42deg_Heat_cDNA_P Parameter: Timepoint (hr) Value: 6
  misc_feature: MA Experiment 20000111 PARAMETER Experiment Name: At_42deg_Heat_cDNA_P Parameter: Tissue Value: Aerial
  misc_feature: MA Experiment ID: 20000112 Result: Down-regulated in Transcription
  misc_feature: MA Experiment 20000112 PARAMETER Experiment Name: At_42deg_Heat_cDNA_P Parameter: Temperature (deg C) Value: 42 vs. 22
  misc_feature: MA Experiment 20000112 PARAMETER Experiment Name: At_42deg_Heat_cDNA_P Parameter: Timepoint (hr) Value: 2
  misc_feature: MA Experiment 20000112 PARAMETER Experiment Name: At_42deg_Heat_cDNA_P Parameter: Tissue Value: Aerial
  misc_feature: MA Experiment ID: 20000113 Result: Down-regulated in Transcription
  misc_feature: MA Experiment 20000113 PARAMETER Experiment Name: At_42deg_Heat_cDNA_P Parameter: Temperature (deg C) Value: 42 vs. 22
  misc_feature: MA Experiment 20000113 PARAMETER Experiment Name: At_42deg_Heat_cDNA_P Parameter: Timepoint (hr) Value: 8
  misc_feature: MA Experiment 20000113 PARAMETER Experiment Name: At_42deg_Heat_cDNA_P Parameter: Tissue Value: Aerial
  misc_feature: MA Experiment ID: 20000144 Result: Down-regulated in Transcription
  misc_feature: MA Experiment 20000144 PARAMETER Experiment Name: At_42deg_Heat_cDNA_P Parameter: Temperature (deg C) Value: 42 vs. 22
  misc_feature: MA Experiment 20000144 PARAMETER Experiment Name: At_42deg_Heat_cDNA_P Parameter: Timepoint (hr) Value: 1
  misc_feature: MA Experiment 20000144 PARAMETER Experiment Name: At_42deg_Heat_cDNA_P Parameter: Tissue Value: Aerial
  misc_feature: MA Experiment ID: 20000495 Result: Down-regulated in Transcription
  misc_feature: MA Experiment 20000495 PARAMETER Experiment Name: At_Guard_Cells_P Parameter: Harvest Date Value: 8/2/2002
  misc_feature: MA Experiment 20000495 PARAMETER Experiment Name: At_Guard_Cells_P Parameter: Organism Value: A. thaliana
  misc_feature: MA Experiment 20000495 PARAMETER Experiment Name: At_Guard_Cells_P Parameter: Tissue Value: Guard Cells vs. Leaves
  misc_feature: MA Experiment ID: 20001451 Result: Down-regulated in Transcription
  misc_feature: MA Experiment 20001451 PARAMETER Experiment Name: At_Far-red-induction_P Parameter: Age (day) Value: 7
  misc_feature: MA Experiment 20001451 PARAMETER Experiment Name: At_Far-red-induction_P Parameter: Light Value: Far-red vs. White
  misc_feature: MA Experiment 20001451 PARAMETER Experiment Name: At_Far-red-induction_P Parameter: Organism Value: A. thaliana
  misc_feature: MA Experiment 20001451 PARAMETER Experiment Name: At_Far-red-induction_P Parameter: Plant Line Value: Columbia
  misc_feature: MA Experiment 20001451 PARAMETER Experiment Name: At_Far-red-induction_P Parameter: Timepoint (hr) Value: 24
  misc_feature: MA Experiment 20001451 PARAMETER Experiment Name: At_Far-red-induction_P Parameter: Tissue Value: Whole Plant
aacatactttttacaatcacatttttgaagaactttcattccataaatctacagatctttgtgtatcaagtaaagagatgtcaggaagaggaaagggaggaaaaggattgggaaagggaggagcctattcgtcgtcttgctcgtagaggtggtgtcaagcgtatcagtggtctcatctacgaagagaccagaggtgtcctcaagatcttcctcgagaatgttatccgtgacgccgttacctacactgagcacgccaggaggaagacggtgaccgccatggatgttgtctacgctttgaagaggcaaggtcgtactctctacggtttcggaggttaatccgatttgggggattagggtttatgcaagtttggggatttcttcttgtttctgagatccgtgttaaatggtttgaattagtcaaaagtaaattcaggagttagtttttgtttctcgtttttcgttgttgttagccaatgtgatgtagtagttaattatcttttgcaagctttgtgctaagaaaatctaatgagaatgatccatttgctt

SEQ ID NO: 20534 - protein, 111 aa, Arabidopsis thaliana
  peptide (1)..(111): Ceres Seq. ID no. 12329460
  misc_feature (43)..(105): Pfam Name: Core histone H2A/H2B/H3/H4 Pfam Description: Core histone H2A/H2B/H3/H4
  misc_feature (43)..(111): Homolog of NCBI NO: 122094 NR Description: Histone H4.2
  misc_feature (43)..(111): Homolog of NCBI NO: 122092 NR Description: Histone H4.1
  misc_feature (43)..(111): Homolog of NCBI NO: 23508257 NR Description: histone H4, putative [Plasmodium falciparum 3D7]
  misc_feature (43)..(111): Homolog of NCBI NO: 84451 NR Description: histone H4 - Caenorhabditis elegans
  misc_feature (43)..(110): Homolog of NCBI NO: 462244 NR Description: Histone H4
  misc_feature (43)..(111): Homolog of NCBI NO: 1883001 NR Description: histone H4 [Apis mellifera]
  misc_feature (43)..(111): Homolog of NCBI NO: 1883026 NR Description: histone H4 [Diprion pini]
  misc_feature (43)..(111): Homolog of NCBI NO: 11121217 NR Description: histone H4 [Mortierella alpina]
  misc_feature (43)..(111): Homolog of NCBI NO: 12845285 NR Description: unnamed protein product [Mus musculus]
  misc_feature (43)..(111): Homolog of NCBI NO: 462242 NR Description: Histone H4
NILFTITFLKNFHSINLQIFVYQVKRCQEEEREEKDWEREEPIRRLARRGGVKRISGLIYEETRGVLKIFLENVIRDAVTYTEHARRKTVTAMDVVYALKRQGRTLYGFGG

SEQ ID NO: 20535 - DNA, 595 bp, Arabidopsis thaliana
  misc_feature (1)..(595): Ceres Seq. ID no. 12321778
  misc_feature: MA Experiment ID: 108434 Result: Down-regulated in Transcription
  misc_feature: MA Experiment 108434 PARAMETER Experiment Name: At_Root_Tips_cDNA_P Parameter: Tissue Value: Root Tips
  misc_feature: MA Experiment ID: 108435 Result: Up-regulated in Transcription
  misc_feature: MA Experiment 108435 PARAMETER Experiment Name: At_stm_Mutants_cDNA_P Parameter: Plant Line Value: wt Landsburg vs stm
  misc_feature: MA Experiment 108435 PARAMETER Experiment Name: At_stm_Mutants_cDNA_P Parameter: Tissue Value: Shoot Apical Meristem Region
  misc_feature: MA Experiment ID: 108463 Result: Up-regulated in Transcription
  misc_feature: MA Experiment 108463 PARAMETER Experiment Name: At_Germinating_Seeds_cDNA_P Parameter: Age (day) Value: 3 vs. 0
  misc_feature: MA Experiment 108463 PARAMETER Experiment Name: At_Germinating_Seeds_cDNA_P Parameter: Tissue Value: Germinating Seeds
  misc_feature: MA Experiment ID: 108473 Result: Up-regulated in Transcription
  misc_feature: MA Experiment 108473 PARAMETER Experiment Name: At_Drought_Flowers_cDNA_P Parameter: Timepoint (hr) Value: 7 d
  misc_feature: MA Experiment 108473 PARAMETER Experiment Name: At_Drought_Flowers_cDNA_P Parameter: Tissue Value: Flower
  misc_feature: MA Experiment 108473 PARAMETER Experiment Name: At_Drought_Flowers_cDNA_P Parameter: Treatment Value: Drought vs. No Drought
  misc_feature: MA Experiment ID: 108501 Result: Up-regulated in Transcription
  misc_feature: MA Experiment 108501 PARAMETER Experiment Name: At_ap2_floral_buds_cDNA_P Parameter: Plant Line Value: ap2 (Ler.)
  misc_feature: MA Experiment 108501 PARAMETER Experiment Name: At_ap2_floral_buds_cDNA_P Parameter: Tissue Value: Closed Flower
  misc_feature: MA Experiment ID: 108561 Result: Up-regulated in Transcription
  misc_feature: MA Experiment 108561 PARAMETER Experiment Name: At_100uM_ABA_cDNA_P Parameter: Timepoint (hr) Value: 6
  misc_feature: MA Experiment 108561 PARAMETER Experiment Name: At_100uM_ABA_cDNA_P Parameter: Tissue Value: Aerial
  misc_feature: MA Experiment 108561 PARAMETER Experiment Name: At_100uM_ABA_cDNA_P Parameter: Treatment Value: 100uM ABA vs. No Treatment
  misc_feature: MA Experiment ID: 108572 Result: Up-regulated in Transcription
  misc_feature: MA Experiment 108572 PARAMETER Experiment Name: At_Drought_cDNA_P Parameter: Timepoint (hr) Value: 1
  misc_feature: MA Experiment 108572 PARAMETER Experiment Name: At_Drought_cDNA_P Parameter: Tissue Value: Aerial
  misc_feature: MA Experiment 108572 PARAMETER Experiment Name: At_Drought_cDNA_P Parameter: Treatment Value: Drought vs. No Drought
  misc_feature: MA Experiment ID: 108585 Result: Up-regulated in Transcription
  misc_feature: MA Experiment 108585 PARAMETER Experiment Name: At_5mM_NaNP_cDNA_P Parameter: Timepoint (hr) Value: 6
  misc_feature: MA Experiment 108585 PARAMETER Experiment Name: At_5mM_NaNP_cDNA_P Parameter: Tissue Value: Aerial
  misc_feature: MA Experiment 108585 PARAMETER Experiment Name: At_5mM_NaNP_cDNA_P Parameter: Treatment Value: null
  misc_feature: MA Experiment ID: 108595 Result: Up-regulated in Transcription
  misc_feature: MA Experiment 108595 PARAMETER Experiment Name: At_Ler-pi_Ovule_cDNA_P Parameter: Plant Line Value: null
  misc_feature: MA Experiment ID: 108668 Result: Up-regulated in Transcription
  misc_feature: MA Experiment 108668 PARAMETER Experiment Name: At_2mM_SA_cDNA_P Parameter: Plant Line Value: WS
  misc_feature: MA Experiment 108668 PARAMETER Experiment Name: At_2mM_SA_cDNA_P Parameter: Timepoint (hr) Value: 6
  misc_feature: MA Experiment 108668 PARAMETER Experiment Name: At_2mM_SA_cDNA_P Parameter: Treatment Value: 2mM SA vs. No Treatment
  misc_feature: MA Experiment ID: 20000087 Result: Up-regulated in Transcription
  misc_feature: MA Experiment 20000087 PARAMETER Experiment Name: At_100uM_ABA_Mutants_cDNA_P Parameter: Plant Line Value: WS
  misc_feature: MA Experiment 20000087 PARAMETER Experiment Name: At_100uM_ABA_Mutants_cDNA_P Parameter: Timepoint (hr) Value: 6
  misc_feature: MA Experiment 20000087 PARAMETER Experiment Name: At_100uM_ABA_Mutants_cDNA_P Parameter: Tissue Value: Aerial
  misc_feature: MA Experiment 20000087 PARAMETER Experiment Name: At_100uM_ABA_Mutants_cDNA_P Parameter: Treatment Value: 100uM ABA vs. No Treatment
  misc_feature: MA Experiment ID: 20000093 Result: Down-regulated in Transcription
  misc_feature: MA Experiment 20000093 PARAMETER Experiment Name: At_42deg_Heat_cDNA_P Parameter: Temperature (deg C) Value: 42 vs. 22
  misc_feature: MA Experiment 20000093 PARAMETER Experiment Name: At_42deg_Heat_cDNA_P Parameter: Timepoint (hr) Value: 0.5
  misc_feature: MA Experiment 20000093 PARAMETER Experiment Name: At_42deg_Heat_cDNA_P Parameter: Tissue Value: Aerial
  misc_feature: MA Experiment ID: 20000185 Result: Up-regulated in Transcription
  misc_feature: MA Experiment 20000185 PARAMETER Experiment Name: At_Roots__P Parameter: Age (day) Value: 7 vs. 21
  misc_feature: MA Experiment 20000185 PARAMETER Experiment Name: At_Roots__P Parameter: Organism Value: A. thaliana
  misc_feature: MA Experiment 20000185 PARAMETER Experiment Name: At_Roots__P Parameter: Tissue Value: Roots vs. Whole Plant
  misc_feature: MA Experiment ID: 20000264 Result: Up-regulated in Transcription
  misc_feature: MA Experiment 20000264 PARAMETER Experiment Name: At_Open_Flower_P Parameter: Age (day) Value: 21
  misc_feature: MA Experiment 20000264 PARAMETER Experiment Name: At_Open_Flower_P Parameter: Plant Line Value: WS
  misc_feature: MA Experiment 20000264 PARAMETER Experiment Name: At_Open_Flower_P Parameter: Tissue Value: Open Flower vs. Whole Plant
  misc_feature: MA Experiment ID: 20000436 Result: Up-regulated in Transcription
  misc_feature: MA Experiment 20000436 PARAMETER Experiment Name: At_Drought_P Parameter: Age (day) Value: 7
  misc_feature: MA Experiment 20000436 PARAMETER Experiment Name: At_Drought_P Parameter: Organism Value: A. thaliana
  misc_feature: MA Experiment 20000436 PARAMETER Experiment Name: At_Drought_P Parameter: Plant Line Value: WS
  misc_feature: MA Experiment 20000436 PARAMETER Experiment Name: At_Drought_P Parameter: Timepoint (hr) Value: 12
  misc_feature: MA Experiment 20000436 PARAMETER Experiment Name: At_Drought_P Parameter: Tissue Value: Whole Plant
  misc_feature: MA Experiment 20000436 PARAMETER Experiment Name: At_Drought_P Parameter: Treatment Value: Drought vs. No Drought
  misc_feature: MA Experiment ID: 20000439 Result: Up-regulated in Transcription
  misc_feature: MA Experiment 20000439 PARAMETER Experiment Name: At_Roots__P Parameter: Age (day) Value: 14 vs. 21
  misc_feature: MA Experiment 20000439 PARAMETER Experiment Name: At_Roots__P Parameter: Organism Value: A. thaliana
  misc_feature: MA Experiment 20000439 PARAMETER Experiment Name: At_Roots__P Parameter: Tissue Value: Roots vs. Whole Plant
  misc_feature: MA Experiment ID: 20000453 Result: Up-regulated in Transcription
  misc_feature: MA Experiment 20000453 PARAMETER Experiment Name: At_100uM_ABA_P Parameter: Age (day) Value: 15
  misc_feature: MA Experiment 20000453 PARAMETER Experiment Name: At_100uM_ABA_P Parameter: Organism Value: A. thaliana
  misc_feature: MA Experiment 20000453 PARAMETER Experiment Name: At_100uM_ABA_P Parameter: Plant Line Value: WS
  misc_feature: MA Experiment 20000453 PARAMETER Experiment Name: At_100uM_ABA_P Parameter: Timepoint (hr) Value: 24
  misc_feature: MA Experiment 20000453 PARAMETER Experiment Name: At_100uM_ABA_P Parameter: Tissue Value: Aerial
  misc_feature: MA Experiment 20000453 PARAMETER Experiment Name: At_100uM_ABA_P Parameter: Treatment Value: 100uM ABA vs. No Treatment
  misc_feature: MA Experiment ID: 20000495 Result: Up-regulated in Transcription
  misc_feature: MA Experiment 20000495 PARAMETER Experiment Name: At_Guard_Cells_P Parameter: Harvest Date Value: 8/2/2002
  misc_feature: MA Experiment 20000495 PARAMETER Experiment Name: At_Guard_Cells_P Parameter: Organism Value: A. thaliana
  misc_feature: MA Experiment 20000495 PARAMETER Experiment Name: At_Guard_Cells_P Parameter: Tissue Value: Guard Cells vs. Leaves
  misc_feature: MA Experiment ID: 20001554 Result: Up-regulated in Transcription
  misc_feature: MA Experiment 20001554 PARAMETER Experiment Name: At_Drought_Soil_Dry_P Parameter: Age (day) Value: 21
  misc_feature: MA Experiment 20001554 PARAMETER Experiment Name: At_Drought_Soil_Dry_P Parameter: Organism Value: A. thaliana
  misc_feature: MA Experiment 20001554 PARAMETER Experiment Name: At_Drought_Soil_Dry_P Parameter: Plant Line Value: WS
  misc_feature: MA Experiment 20001554 PARAMETER Experiment Name: At_Drought_Soil_Dry_P Parameter: Post Timepoint (hr) Value: None
  misc_feature: MA Experiment 20001554 PARAMETER Experiment Name: At_Drought_Soil_Dry_P Parameter: Post-Treatment Value: None
  misc_feature: MA Experiment 20001554 PARAMETER Experiment Name: At_Drought_Soil_Dry_P Parameter: Timepoint (day) Value: 7
  misc_feature: MA Experiment 20001554 PARAMETER Experiment Name: At_Drought_Soil_Dry_P Parameter: Treatment Value: Drought vs. No Drought
  misc_feature: MA Experiment ID: 20001555 Result: Up-regulated in Transcription
  misc_feature: MA Experiment 20001555 PARAMETER Experiment Name: At_Drought_Soil_Dry_P Parameter: Age (day) Value: 24
  misc_feature: MA Experiment 20001555 PARAMETER Experiment Name: At_Drought_Soil_Dry_P Parameter: Organism Value: A. thaliana
  misc_feature: MA Experiment 20001555 PARAMETER Experiment Name: At_Drought_Soil_Dry_P Parameter: Plant Line Value: WS
  misc_feature: MA Experiment 20001555 PARAMETER Experiment Name: At_Drought_Soil_Dry_P Parameter: Post Timepoint (hr) Value: None
  misc_feature: MA Experiment 20001555 PARAMETER Experiment Name: At_Drought_Soil_Dry_P Parameter: Post-Treatment Value: None
  misc_feature: MA Experiment 20001555 PARAMETER Experiment Name: At_Drought_Soil_Dry_P Parameter: Timepoint (day) Value: 10
  misc_feature: MA Experiment 20001555 PARAMETER Experiment Name: At_Drought_Soil_Dry_P Parameter: Treatment Value: Drought vs. No Drought
  misc_feature: MA Experiment ID: 20001560 Result: Up-regulated in Transcription
  misc_feature: MA Experiment 20001560 PARAMETER Experiment Name: At_Drought_Soil_Dry_P Parameter: Age (day) Value: 28
  misc_feature: MA Experiment 20001560 PARAMETER Experiment Name: At_Drought_Soil_Dry_P Parameter: Organism Value: A. thaliana
  misc_feature: MA Experiment 20001560 PARAMETER Experiment Name: At_Drought_Soil_Dry_P Parameter: Plant Line Value: WS
  misc_feature: MA Experiment 20001560 PARAMETER Experiment Name: At_Drought_Soil_Dry_P Parameter: Post Timepoint (hr) Value: None
  misc_feature: MA Experiment 20001560 PARAMETER Experiment Name: At_Drought_Soil_Dry_P Parameter: Post-Treatment Value: None
  misc_feature: MA Experiment 20001560 PARAMETER Experiment Name: At_Drought_Soil_Dry_P Parameter: Timepoint (day) Value: 14
  misc_feature: MA Experiment 20001560 PARAMETER Experiment Name: At_Drought_Soil_Dry_P Parameter: Treatment Value: Drought vs. No Drought
  misc_feature: MA Experiment ID: 20001904 Result: Up-regulated in Transcription
  misc_feature: MA Experiment 20001904 PARAMETER Experiment Name: At_Drought_Reproduction_P Parameter: Age (day) Value: 37
  misc_feature: MA Experiment 20001904 PARAMETER Experiment Name: At_Drought_Reproduction_P Parameter: Organism Value: A. thaliana
  misc_feature: MA Experiment 20001904 PARAMETER Experiment Name: At_Drought_Reproduction_P Parameter: Plant Line Value: WS
  misc_feature: MA Experiment 20001904 PARAMETER Experiment Name: At_Drought_Reproduction_P Parameter: Timepoint (day) Value: 7
  misc_feature: MA Experiment 20001904 PARAMETER Experiment Name: At_Drought_Reproduction_P Parameter: Tissue Value: Rosettes
  misc_feature: MA Experiment 20001904 PARAMETER Experiment Name: At_Drought_Reproduction_P Parameter: Treatment Value: Drought vs. No Drought
  misc_feature: MA Experiment ID: 20001905 Result: Up-regulated in Transcription
  misc_feature: MA Experiment 20001905 PARAMETER Experiment Name: At_Drought_Reproduction_P Parameter: Age (day) Value: 40
  misc_feature: MA Experiment 20001905 PARAMETER Experiment Name: At_Drought_Reproduction_P Parameter: Organism Value: A. thaliana
  misc_feature: MA Experiment 20001905 PARAMETER Experiment Name: At_Drought_Reproduction_P Parameter: Plant Line Value: WS
  misc_feature: MA Experiment 20001905 PARAMETER Experiment Name: At_Drought_Reproduction_P Parameter: Timepoint (day) Value: 10
  misc_feature: MA Experiment 20001905 PARAMETER Experiment Name: At_Drought_Reproduction_P Parameter: Tissue Value: Rosettes
  misc_feature: MA Experiment 20001905 PARAMETER Experiment Name: At_Drought_Reproduction_P Parameter: Treatment Value: Drought vs. No Drought
  misc_feature: MA Experiment ID: 20001910 Result: Up-regulated in Transcription
  misc_feature: MA Experiment 20001910 PARAMETER Experiment Name: At_Drought_Reproduction_P Parameter: Age (day) Value: 37
  misc_feature: MA Experiment 20001910 PARAMETER Experiment Name: At_Drought_Reproduction_P Parameter: Organism Value: A. thaliana
  misc_feature: MA Experiment 20001910 PARAMETER Experiment Name: At_Drought_Reproduction_P Parameter: Plant Line Value: WS
  misc_feature: MA Experiment 20001910 PARAMETER Experiment Name: At_Drought_Reproduction_P Parameter: Timepoint (day) Value: 7
  misc_feature: MA Experiment 20001910 PARAMETER Experiment Name: At_Drought_Reproduction_P Parameter: Tissue Value: Flowers
  misc_feature: MA Experiment 20001910 PARAMETER Experiment Name: At_Drought_Reproduction_P Parameter: Treatment Value: Drought vs. No Drought
  misc_feature: MA Experiment ID: 20001911 Result: Up-regulated in Transcription
  misc_feature: MA Experiment 20001911 PARAMETER Experiment Name: At_Drought_Reproduction_P Parameter: Age (day) Value: 40
  misc_feature: MA Experiment 20001911 PARAMETER Experiment Name: At_Drought_Reproduction_P Parameter: Organism Value: A. thaliana
  misc_feature: MA Experiment 20001911 PARAMETER Experiment Name: At_Drought_Reproduction_P Parameter: Plant Line Value: WS
  misc_feature: MA Experiment 20001911 PARAMETER Experiment Name: At_Drought_Reproduction_P Parameter: Timepoint (day) Value: 10
  misc_feature: MA Experiment 20001911 PARAMETER Experiment Name: At_Drought_Reproduction_P Parameter: Tissue Value: Flowers
  misc_feature: MA Experiment 20001911 PARAMETER Experiment Name: At_Drought_Reproduction_P Parameter: Treatment Value: Drought vs. No Drought
accaaaaacacatttctataaactcagaaacaaacaaaagatcaagaagaaacatggtgatgattaagaccacaatggtttccctttttgctctagcggcggttctcctaatgattctagccccggcggcagaagccgtgacgtgctcgccaatgcagctaagcccatgtgcaacggcgataacgtcgtcttctccaccatcggctttgtgctgtgcaaagctgaaggagcagaggccatgcttatgtggttacatgagaaaccctagcctccgtcgcttcgtcagcactcccaacgctcgtaaagtctctaaaagttgcaaactccccatcccaaggtgttaaaaagtcagaaaagtgtttgctgtttatgatcatcctatatatgtttgaatcctacttttggtgtgtgtttaaggatgtttatttatgaccactataagtagtagagttaaataagtaagtggtactcttggtgatgctttgtatgcatcttatttaaatttttgctatcttattctggttgttgttgatatatatatatatacatgatggtgtaataactgagatgatataatatatgaaaattatatttc

SEQ ID NO: 20536 - protein, 113 aa, Arabidopsis thaliana
  peptide (1)..(113): Ceres Seq. ID no. 12321779
  misc_feature (48)..(113): Pfam Name: Protease inhibitor/seed storage/LTP family Pfam Description: Protease inhibitor/seed storage/LTP family
  misc_feature (21)..(113): Homolog of NCBI NO: 3183088 NR Description: Probable nonspecific lipid-transfer protein AKCS9
  misc_feature (46)..(113): Homolog of NCBI NO: 14423789 NR Description: NONSPECIFIC LIPID-TRANSFER PROTEIN 2 (LTP 2)
  misc_feature (27)..(113): Homolog of NCBI NO: 498036 NR Description: lipid transfer protein
  misc_feature (21)..(113): Homolog of NCBI NO: 24745959 NR Description: putative lipid transfer protein [Solanum
  misc_feature (18)..(113): Homolog of NCBI NO: 7489428 NR Description: probable lipid transfer protein - barley
  misc_feature (20)..(113): Homolog of NCBI NO: 12597812 NR Description: lipid transfer protein, putative [Arabidopsis
  misc_feature (20)..(113): Homolog of NCBI NO: 543650 NR Description: P48h-10 protein precursor - Zinnia elegans (cv.
  misc_feature (20)..(113): Homolog of NCBI NO: 543565 NR Description: hypothetical 10.0K protein - Zinnia elegans
  misc_feature (20)..(113): Homolog of NCBI NO: 18402345 NR Description: lipid transfer protein, putative
  misc_feature (18)..(113): Homolog of NCBI NO: 15229614 NR Description: lipid transfer protein, putative
QKHISINSETNKRSRRNMVMIKTTMVSLFALAAVLLMILAPAAEAVTCSPMQLSPCATAITSSSPPSALCCAKLKEQRPCLCGYMRNPSLRRFVSTPNARKVSKSCKLPIPRC

SEQ ID NO: 20537 - protein, 96 aa, Arabidopsis thaliana
  peptide (1)..(96): Ceres Seq. ID no. 12321780
  misc_feature (31)..(96): Pfam Name: Protease inhibitor/seed storage/LTP family Pfam Description: Protease inhibitor/seed storage/LTP family
  misc_feature (4)..(96): Homolog of NCBI NO: 3183088 NR Description: Probable nonspecific lipid-transfer protein AKCS9
  misc_feature (29)..(96): Homolog of NCBI NO: 14423789 NR Description: NONSPECIFIC LIPID-TRANSFER PROTEIN 2 (LTP 2)
  misc_feature (10)..(96): Homolog of NCBI NO: 498036 NR Description: lipid transfer protein
  misc_feature (4)..(96): Homolog of NCBI NO: 24745959 NR Description: putative lipid transfer protein [Solanum
  misc_feature (1)..(96): Homolog of NCBI NO: 7489428 NR Description: probable lipid transfer protein - barley
  misc_feature (3)..(96): Homolog of NCBI NO: 12597812 NR Description: lipid transfer protein, putative [Arabidopsis
  misc_feature (3)..(96): Homolog of NCBI NO: 543650 NR Description: P48h-10 protein precursor - Zinnia elegans (cv.
  misc_feature (3)..(96): Homolog of NCBI NO: 543565 NR Description: hypothetical 10.0K protein - Zinnia elegans
  misc_feature (3)..(96): Homolog of NCBI NO: 18402345 NR Description: lipid transfer protein, putative
  misc_feature (1)..(96): Homolog of NCBI NO: 15229614 NR Description: lipid transfer protein, putative
MVMIKTTMVSLFALAAVLLMILAPAAEAVTCSPMQLSPCATAITSSSPPSALCCAKLKEQRPCLCGYMRNPSLRRFVSTPNARKVSKSCKLPIPRC

SEQ ID NO: 20538 - protein, 94 aa, Arabidopsis thaliana
  peptide (1)..(94): Ceres Seq. ID no. 12321781
  misc_feature (29)..(94): Pfam Name: Protease inhibitor/seed storage/LTP family Pfam Description: Protease inhibitor/seed storage/LTP family
  misc_feature (2)..(94): Homolog of NCBI NO: 3183088 NR Description: Probable nonspecific lipid-transfer protein AKCS9
  misc_feature (27)..(94): Homolog of NCBI NO: 14423789 NR Description: NONSPECIFIC LIPID-TRANSFER PROTEIN 2 (LTP 2)
  misc_feature (8)..(94): Homolog of NCBI NO: 498036 NR Description: lipid transfer protein
  misc_feature (2)..(94): Homolog of NCBI NO: 24745959 NR Description: putative lipid transfer protein [Solanum
  misc_feature (1)..(94): Homolog of NCBI NO: 7489428 NR Description: probable lipid transfer protein - barley
  misc_feature (1)..(94): Homolog of NCBI NO: 12597812 NR Description: lipid transfer protein, putative [Arabidopsis
  misc_feature (1)..(94): Homolog of NCBI NO: 543650 NR Description: P48h-10 protein precursor - Zinnia elegans (cv.
  misc_feature (1)..(94): Homolog of NCBI NO: 543565 NR Description: hypothetical 10.0K protein - Zinnia elegans
  misc_feature (1)..(94): Homolog of NCBI NO: 18402345 NR Description: lipid transfer protein, putative
  misc_feature (1)..(94): Homolog of NCBI NO: 15229614 NR Description: lipid transfer protein, putative
MIKTTMVSLFALAAVLLMILAPAAEAVTCSPMQLSPCATAITSSSPPSALCCAKLKEQRPCLCGYMRNPSLRRFVSTPNARKVSKSCKLPIPRC

SEQ ID NO: 20539 - DNA, 459 bp, Arabidopsis thaliana
  misc_feature (1)..(459): Ceres Seq. ID no. 12423159
  misc_feature: MA Experiment ID: 108501 Result: Down-regulated in Transcription
  misc_feature: MA Experiment 108501 PARAMETER Experiment Name: At_ap2_floral_buds_cDNA_P Parameter: Plant Line Value: ap2 (Ler.)
  misc_feature: MA Experiment 108501 PARAMETER Experiment Name: At_ap2_floral_buds_cDNA_P Parameter: Tissue Value: Closed Flower
  misc_feature: MA Experiment ID: 20000171 Result: Up-regulated in Transcription
  misc_feature: MA Experiment 20000171 PARAMETER Experiment Name: At_42deg_Heat_P Parameter: Age (day) Value: 14
  misc_feature: MA Experiment 20000171 PARAMETER Experiment Name: At_42deg_Heat_P Parameter: Organism Value: A. thaliana
  misc_feature: MA Experiment 20000171 PARAMETER Experiment Name: At_42deg_Heat_P Parameter: Plant Line Value: WS
  misc_feature: MA Experiment 20000171 PARAMETER Experiment Name: At_42deg_Heat_P Parameter: Temperature (deg C) Value: 42 vs. 22
  misc_feature: MA Experiment 20000171 PARAMETER Experiment Name: At_42deg_Heat_P Parameter: Timepoint (hr) Value: 1
  misc_feature: MA Experiment 20000171 PARAMETER Experiment Name: At_42deg_Heat_P Parameter: Tissue Value: Aerial
  misc_feature: MA Experiment ID: 20001906 Result: Up-regulated in Transcription
  misc_feature: MA Experiment 20001906 PARAMETER Experiment Name: At_Drought_Reproduction_P Parameter: Age (day) Value: 35
  misc_feature: MA Experiment 20001906 PARAMETER Experiment Name: At_Drought_Reproduction_P Parameter: Organism Value: A. thaliana
  misc_feature: MA Experiment 20001906 PARAMETER Experiment Name: At_Drought_Reproduction_P Parameter: Plant Line Value: WS
  misc_feature: MA Experiment 20001906 PARAMETER Experiment Name: At_Drought_Reproduction_P Parameter: Timepoint (day) Value: 5
  misc_feature: MA Experiment 20001906 PARAMETER Experiment Name: At_Drought_Reproduction_P Parameter: Tissue Value: Siliques
  misc_feature: MA Experiment 20001906 PARAMETER Experiment Name: At_Drought_Reproduction_P Parameter: Treatment Value: Drought vs. No Drought
  misc_feature: MA Experiment ID: 20001908 Result: Up-regulated in Transcription
  misc_feature: MA Experiment 20001908 PARAMETER Experiment Name: At_Drought_Reproduction_P Parameter: Age (day) Value: 40
  misc_feature: MA Experiment 20001908 PARAMETER Experiment Name: At_Drought_Reproduction_P Parameter: Organism Value: A. thaliana
  misc_feature: MA Experiment 20001908 PARAMETER Experiment Name: At_Drought_Reproduction_P Parameter: Plant Line Value: WS
  misc_feature: MA Experiment 20001908 PARAMETER Experiment Name: At_Drought_Reproduction_P Parameter: Timepoint (day) Value: 10
  misc_feature: MA Experiment 20001908 PARAMETER Experiment Name: At_Drought_Reproduction_P Parameter: Tissue Value: Siliques
  misc_feature: MA Experiment 20001908 PARAMETER Experiment Name: At_Drought_Reproduction_P Parameter: Treatment Value: Drought vs. No Drought
aagatttacatacgaaaggatcgtcgaaatgtttgtgattggagtggtgatggtgctattggcggttcttccagccgttctgccgccgcttccgccgccgccgatgatattgatgggaattccggtggtgctgatgctaatgcttatttacttagccatttattatccacctcatcaagctcattttctctcttcatcttcctttgacactacttctaggcatgtaatgtgatggtagtgagacaatgagtcgatgatccagatgactcaactcacatatgtgaatgcgtcgtcgtttgatgataattgtgaatccatgcagtttctatatgattaaaatttagaccctttttatgttttttcttttcttttcgttttagggtgattcgagttggatcgtctggtaagagtcattgtaaaatttgaagtgtaatttctaattttctaatcagttgaacc

SEQ ID NO: 20540 - protein, 76 aa, Arabidopsis thaliana
  peptide (1)..(76): Ceres Seq. ID no. 12423160
  misc_feature (10)..(52): Homolog of NCBI NO: 20161874 NR Description: B1139B11.15 [Oryza sativa (japonica
  misc_feature (2)..(68): Homolog of NCBI NO: 30689607 NR Description: expressed protein [Arabidopsis thaliana]
  misc_feature (2)..(68): Homolog of NCBI NO: 7486480 NR Description: hypothetical protein At2g44080 [imported] -
RFTYERIVEMFVIGVVMVLLAVLPAVLPPLPPPPMILMGIPVVLMLMLIYLAIYYPPHQAHFLSSSSFDTTSRHVM

SEQ ID NO: 20541 - protein, 68 aa, Arabidopsis thaliana
  peptide (1)..(68): Ceres Seq. ID no. 12423161
KIYIRKDRRNVCDWSGDGAIGGSSSRSAAASAAADDIDGNSGGADANAYLLSHLLSTSSSSFSLFIFL

SEQ ID NO: 20542 - protein, 67 aa, Arabidopsis thaliana
  peptide (1)..(67): Ceres Seq. ID no. 12423162
  misc_feature (1)..(43): Homolog of NCBI NO: 20161874 NR Description: B1139B11.15 [Oryza sativa (japonica
  misc_feature (1)..(59): Homolog of NCBI NO: 30689607 NR Description: expressed protein [Arabidopsis thaliana]
  misc_feature (1)..(59): Homolog of NCBI NO: 7486480 NR Description: hypothetical protein At2g44080 [imported] -
MFVIGVVMVLLAVLPAVLPPLPPPPMILMGIPVVLMLMLIYLAIYYPPHQAHFLSSSSFDTTSRHVM

SEQ ID NO: 20543 - DNA, 629 bp, Arabidopsis thaliana
  misc_feature (1)..(629): Ceres Seq. ID no. 12370021
  misc_feature: MA Experiment ID: 20000286 Result: Down-regulated in Transcription
  misc_feature: MA Experiment 20000286 PARAMETER Experiment Name: At_Open_Flower_P Parameter: Age (day) Value: 21
  misc_feature: MA Experiment 20000286 PARAMETER Experiment Name: At_Open_Flower_P Parameter: Plant Line Value: WS
  misc_feature: MA Experiment 20000286 PARAMETER Experiment Name: At_Open_Flower_P Parameter: Tissue Value: Half Open vs. Whole Plant
  misc_feature: MA Experiment ID: 20000439 Result: Down-regulated in Transcription
  misc_feature: MA Experiment 20000439 PARAMETER Experiment Name: At_Roots__P Parameter: Age (day) Value: 14 vs. 21
  misc_feature: MA Experiment 20000439 PARAMETER Experiment Name: At_Roots__P Parameter: Organism Value: A. thaliana
  misc_feature: MA Experiment 20000439 PARAMETER Experiment Name: At_Roots__P Parameter: Tissue Value: Roots vs. Whole Plant
  misc_feature: MA Experiment ID: 20000794 Result: Down-regulated in Transcription
  misc_feature: MA Experiment 20000794 PARAMETER Experiment Name: At_Petals_P Parameter: Age (day) Value: 23-25 days
  misc_feature: MA Experiment 20000794 PARAMETER Experiment Name: At_Petals_P Parameter: Plant Line Value: WS
  misc_feature: MA Experiment 20000794 PARAMETER Experiment Name: At_Petals_P Parameter: Tissue Value: Petals vs. Whole plant
  misc_feature: MA Experiment ID: 20001560 Result: Up-regulated in Transcription
  misc_feature: MA Experiment 20001560 PARAMETER Experiment Name: At_Drought_Soil_Dry_P Parameter: Age (day) Value: 28
  misc_feature: MA Experiment 20001560 PARAMETER Experiment Name: At_Drought_Soil_Dry_P Parameter: Organism Value: A. thaliana
  misc_feature: MA Experiment 20001560 PARAMETER Experiment Name: At_Drought_Soil_Dry_P Parameter: Plant Line Value: WS
  misc_feature: MA Experiment 20001560 PARAMETER Experiment Name: At_Drought_Soil_Dry_P Parameter: Post Timepoint (hr) Value: None
  misc_feature: MA Experiment 20001560 PARAMETER Experiment Name: At_Drought_Soil_Dry_P Parameter: Post-Treatment Value: None
  misc_feature: MA Experiment 20001560 PARAMETER Experiment Name: At_Drought_Soil_Dry_P Parameter: Timepoint (day) Value: 14
  misc_feature: MA Experiment 20001560 PARAMETER Experiment Name: At_Drought_Soil_Dry_P Parameter: Treatment Value: Drought vs. No Drought
gaacctccgatttgactgcaccgtcggagctcgacgctgagctaagcttaaccaagagctgtcgtatattacactagcagtgaagatcgaatcttaaaaccatggcttctccgaccaattcacagaaaacagtttcggatgacgaggaagttgattactccatcaaaccggagttctatgattcagatattgatgataaagatgagctttggatggataagaagagagatggtcgtacttctgatgctcttcttagctgtccagcttgtttcaccactgtctgcttagagtgtcagaggcacgagcagtatgtgacacagtacagagcagtctttgtggtcaattgcaaagtaggtacagacacagttttgcaacagaatacaatgcccttaaaggttggtaaaagaaggagagattccgagatgcaagaaactggttctgaagatagcgaaaaagttaacccggtcttttgctcagcttgttccacagagatcggagtagttgacagtgaagagatctaccatttctttaatgtcattccaagcgagccttaaaacaacctggttttatgagttatttgtaacgagttctaaacaggtgattaggattaaagtttcgattgtttgcgt

SEQ ID NO: 20544 - protein, 150 aa, Arabidopsis thaliana
  peptide (1)..(150): Ceres Seq. ID no. 12370022
  misc_feature (25)..(148): Homolog of NCBI NO: 12849783 NR Description: unnamed protein product [Mus musculus]
  misc_feature (45)..(147): Homolog of NCBI NO: 23479898 NR Description: putative protein-related [Plasmodium yoelii
  misc_feature (46)..(141): Homolog of NCBI NO: 34784044 NR Description: Unknown (protein for MGC:65820) [Danio rerio]
  misc_feature (7)..(147): Homolog of NCBI NO: 23593325 NR Description: hypothetical protein [Plasmodium falciparum 3D7]
  misc_feature (26)..(148): Homolog of NCBI NO: 27663944 NR Description: similar to RIKEN cDNA 1810011O16
  misc_feature (26)..(148): Homolog of NCBI NO: 13384860 NR Description: RIKEN cDNA 1810011O16 [Mus musculus]
  misc_feature (26)..(148): Homolog of NCBI NO: 12654805 NR Description: Similar to uncharacterized bone marrow protein
  misc_feature (26)..(148): Homolog of NCBI NO: 7020780 NR Description: unnamed protein product [Homo sapiens]
  misc_feature (1)..(150): Homolog of NCBI NO: 15241595 NR Description: putative protein
  misc_feature (1)..(130): Homolog of NCBI NO: 17553498 NR Description: Putative nuclear protein of eukaryotic origin
MASPTNSQKTVSDDEEVDYSIKPEFYDSDIDDKDELWMDKKRDGRTSDALLSCPACFTTVCLECQRHEQYVTQYRAVFVVNCKVGTDTVLQQNTMPLKVGKRRRDSEMQETGSEDSEKVNPVFCSACSTEIGVVDSEEIYHFFNVIPSEP

SEQ ID NO: 20545 - protein, 113 aa, Arabidopsis thaliana
  peptide (1)..(113): Ceres Seq. ID no. 12370023
  misc_feature (1)..(93): Homolog of NCBI NO: 17553498 NR Description: Putative nuclear protein of eukaryotic origin
  misc_feature (1)..(111): Homolog of NCBI NO: 12849783 NR Description: unnamed protein product [Mus musculus]
  misc_feature (8)..(110): Homolog of NCBI NO: 23479898 NR Description: putative protein-related [Plasmodium yoelii
  misc_feature (9)..(104): Homolog of NCBI NO: 34784044 NR Description: Unknown (protein for MGC:65820) [Danio rerio]
  misc_feature (1)..(110): Homolog of NCBI NO: 23593325 NR Description: hypothetical protein [Plasmodium falciparum 3D7]
  misc_feature (1)..(111): Homolog of NCBI NO: 27663944 NR Description: similar to RIKEN cDNA 1810011O16
  misc_feature (1)..(111): Homolog of NCBI NO: 13384860 NR Description: RIKEN cDNA 1810011O16 [Mus musculus]
  misc_feature (1)..(111): Homolog of NCBI NO: 12654805 NR Description: Similar to uncharacterized bone marrow protein
  misc_feature (1)..(111): Homolog of NCBI NO: 7020780 NR Description: unnamed protein product [Homo sapiens]
  misc_feature (1)..(113): Homolog of NCBI NO: 15241595 NR Description: putative protein
MDKKRDGRTSDALLSCPACFTTVCLECQRHEQYVTQYRAVFVVNCKVGTDTVLQQNTMPLKVGKRRRDSEMQETGSEDSEKVNPVFCSACSTEIGVVDSEEIYHFFNVIPSEP

SEQ ID NO: 20546 - DNA, 570 bp, Arabidopsis thaliana
  misc_feature (1)..(570): Ceres Seq. ID no. 12336087
  misc_feature: MA Experiment ID: 108434 Result: Down-regulated in Transcription
  misc_feature: MA Experiment 108434 PARAMETER Experiment Name: At_Root_Tips_cDNA_P Parameter: Tissue Value: Root Tips
  misc_feature: MA Experiment ID: 108461 Result: Down-regulated in Transcription
  misc_feature: MA Experiment 108461 PARAMETER Experiment Name: At_Germinating_Seeds_cDNA_P Parameter: Age (day) Value: 1 vs. 0
  misc_feature: MA Experiment 108461 PARAMETER Experiment Name: At_Germinating_Seeds_cDNA_P Parameter: Tissue Value: Germinating Seeds
  misc_feature: MA Experiment ID: 108488 Result: Down-regulated in Transcription
  misc_feature: MA Experiment ID: 108561 Result: Up-regulated in Transcription
  misc_feature: MA Experiment 108561 PARAMETER Experiment Name: At_100uM_ABA_cDNA_P Parameter: Timepoint (hr) Value: 6
  misc_feature: MA Experiment 108561 PARAMETER Experiment Name: At_100uM_ABA_cDNA_P Parameter: Tissue Value: Aerial
  misc_feature: MA Experiment 108561 PARAMETER Experiment Name: At_100uM_ABA_cDNA_P Parameter: Treatment Value: 100uM ABA vs. No Treatment
  misc_feature: MA Experiment ID: 108573 Result: Up-regulated in Transcription
  misc_feature: MA Experiment 108573 PARAMETER Experiment Name: At_Drought_cDNA_P Parameter: Timepoint (hr) Value: 6
  misc_feature: MA Experiment 108573 PARAMETER Experiment Name: At_Drought_cDNA_P Parameter: Tissue Value: Aerial
  misc_feature: MA Experiment 108573 PARAMETER Experiment Name: At_Drought_cDNA_P Parameter: Treatment Value: Drought vs. No Drought
  misc_feature: MA Experiment ID: 108595 Result: Up-regulated in Transcription
  misc_feature: MA Experiment 108595 PARAMETER Experiment Name: At_Ler-pi_Ovule_cDNA_P Parameter: Plant Line Value: null
  misc_feature: MA Experiment ID: 108605 Result: Up-regulated in Transcription
  misc_feature: MA Experiment 108605 PARAMETER Experiment Name: At_100uM_ABA_cDNA_P Parameter: Timepoint (hr) Value: 6
  misc_feature: MA Experiment 108605 PARAMETER Experiment Name: At_100uM_ABA_cDNA_P Parameter: Tissue Value: Aerial
  misc_feature: MA Experiment 108605 PARAMETER Experiment Name: At_100uM_ABA_cDNA_P Parameter: Treatment Value: 100uM ABA vs. No Treatment
  misc_feature: MA Experiment ID: 108607 Result: Up-regulated in Transcription
  misc_feature: MA Experiment 108607 PARAMETER Experiment Name: At_100uM_ABA_cDNA_P Parameter: Timepoint (hr) Value: 4
  misc_feature: MA Experiment 108607 PARAMETER Experiment Name: At_100uM_ABA_cDNA_P Parameter: Tissue Value: Aerial
  misc_feature: MA Experiment 108607 PARAMETER Experiment Name: At_100uM_ABA_cDNA_P Parameter: Treatment Value: 100uM ABA vs. No Treatment
  misc_feature: MA Experiment ID: 108609 Result: Up-regulated in Transcription
  misc_feature: MA Experiment 108609 PARAMETER Experiment Name: At_100uM_ABA_cDNA_P Parameter: Timepoint (hr) Value: 24
  misc_feature: MA Experiment 108609 PARAMETER Experiment Name: At_100uM_ABA_cDNA_P Parameter: Tissue Value: Aerial
  misc_feature: MA Experiment 108609 PARAMETER Experiment Name: At_100uM_ABA_cDNA_P Parameter: Treatment Value: 100uM ABA vs. No Treatment
  misc_feature: MA Experiment ID: 20000169 Result: Up-regulated in Transcription
  misc_feature: MA Experiment 20000169 PARAMETER Experiment Name: At_100uM_ABA_P Parameter: Age (day) Value: 14
  misc_feature: MA Experiment 20000169 PARAMETER Experiment Name: At_100uM_ABA_P Parameter: Organism Value: A. thaliana
  misc_feature: MA Experiment 20000169 PARAMETER Experiment Name: At_100uM_ABA_P Parameter: Plant Line Value: WS
  misc_feature: MA Experiment 20000169 PARAMETER Experiment Name: At_100uM_ABA_P Parameter: Timepoint (hr) Value: 6
  misc_feature: MA Experiment 20000169 PARAMETER Experiment Name: At_100uM_ABA_P Parameter: Tissue Value: Aerial
  misc_feature: MA Experiment 20000169 PARAMETER Experiment Name: At_100uM_ABA_P Parameter: Treatment Value: 100uM ABA vs. No Treatment
  misc_feature: MA Experiment ID: 20000173 Result: Up-regulated in Transcription
  misc_feature: MA Experiment 20000173 PARAMETER Experiment Name: At_42deg_Heat_P Parameter: Age (day) Value: 14
  misc_feature: MA Experiment 20000173 PARAMETER Experiment Name: At_42deg_Heat_P Parameter: Organism Value: A. thaliana
  misc_feature: MA Experiment 20000173 PARAMETER Experiment Name: At_42deg_Heat_P Parameter: Plant Line Value: WS
  misc_feature: MA Experiment 20000173 PARAMETER Experiment Name: At_42deg_Heat_P Parameter: Temperature (deg C) Value: 42 vs. 22
  misc_feature: MA Experiment 20000173 PARAMETER Experiment Name: At_42deg_Heat_P Parameter: Timepoint (hr) Value: 6
  misc_feature: MA Experiment 20000173 PARAMETER Experiment Name: At_42deg_Heat_P Parameter: Tissue Value: Aerial
  misc_feature: MA Experiment ID: 20000179 Result: Down-regulated in Transcription
  misc_feature: MA Experiment 20000179 PARAMETER Experiment Name: At_Germinating_Seeds_P Parameter: Age (hr) Value: 6 vs. 0
  misc_feature: MA Experiment 20000179 PARAMETER Experiment Name: At_Germinating_Seeds_P Parameter: Tissue Value: Germinating Seeds
  misc_feature: MA Experiment ID: 20000180 Result: Down-regulated in Transcription
  misc_feature: MA Experiment 20000180 PARAMETER Experiment Name: At_Germinating_Seeds_P Parameter: Age (hr) Value: 24 vs. 0
  misc_feature: MA Experiment 20000180 PARAMETER Experiment Name: At_Germinating_Seeds_P Parameter: Tissue Value: Germinating Seeds
  misc_feature: MA Experiment ID: 20000227 Result: Down-regulated in Transcription
  misc_feature: MA Experiment 20000227 PARAMETER Experiment Name: At_Root-Tips-vs-Tops_P Parameter: Tissue Value: Root Tips vs. Root Tops
  misc_feature: MA Experiment ID: 20000265 Result: Down-regulated in Transcription
  misc_feature: MA Experiment 20000265 PARAMETER Experiment Name: At_Open_Flower_P Parameter: Age (day) Value: 21
  misc_feature: MA Experiment 20000265 PARAMETER Experiment Name: At_Open_Flower_P Parameter: Plant Line Value: WS
  misc_feature: MA Experiment 20000265 PARAMETER Experiment Name: At_Open_Flower_P Parameter: Tissue Value: Closed Flower vs. Whole Plant
  misc_feature: MA Experiment ID: 20000436 Result: Up-regulated in Transcription
  misc_feature: MA Experiment 20000436 PARAMETER Experiment Name: At_Drought_P Parameter: Age (day) Value: 7
  misc_feature: MA Experiment 20000436 PARAMETER Experiment Name: At_Drought_P Parameter: Organism Value: A. thaliana
  misc_feature: MA Experiment 20000436 PARAMETER Experiment Name: At_Drought_P Parameter: Plant Line Value: WS
  misc_feature: MA Experiment 20000436 PARAMETER Experiment Name: At_Drought_P Parameter: Timepoint (hr) Value: 12
  misc_feature: MA Experiment 20000436 PARAMETER Experiment Name: At_Drought_P Parameter: Tissue Value: Whole Plant
  misc_feature: MA Experiment 20000436 PARAMETER Experiment Name: At_Drought_P Parameter: Treatment Value: Drought vs. No Drought
  misc_feature: MA Experiment ID: 20000453 Result: Up-regulated in Transcription
  misc_feature: MA Experiment 20000453 PARAMETER Experiment Name: At_100uM_ABA_P Parameter: Age (day) Value: 15
  misc_feature: MA Experiment 20000453 PARAMETER Experiment Name: At_100uM_ABA_P Parameter: Organism Value: A. thaliana
  misc_feature: MA Experiment 20000453 PARAMETER Experiment Name: At_100uM_ABA_P Parameter: Plant Line Value: WS
  misc_feature: MA Experiment 20000453 PARAMETER Experiment Name: At_100uM_ABA_P Parameter: Timepoint (hr) Value: 24
  misc_feature: MA Experiment 20000453 PARAMETER Experiment Name: At_100uM_ABA_P Parameter: Tissue Value: Aerial
  misc_feature: MA Experiment 20000453 PARAMETER Experiment Name: At_100uM_ABA_P Parameter: Treatment Value: 100uM ABA vs. No Treatment
  misc_feature: MA Experiment ID: 20001451 Result: Up-regulated in Transcription
  misc_feature: MA Experiment 20001451 PARAMETER Experiment Name: At_Far-red-induction_P Parameter: Age (day) Value: 7
  misc_feature: MA Experiment 20001451 PARAMETER Experiment Name: At_Far-red-induction_P Parameter: Light Value: Far-red vs. White
  misc_feature: MA Experiment 20001451 PARAMETER Experiment Name: At_Far-red-induction_P Parameter: Organism Value: A. thaliana
  misc_feature: MA Experiment 20001451 PARAMETER Experiment Name: At_Far-red-induction_P Parameter: Plant Line Value: Columbia
  misc_feature: MA Experiment 20001451 PARAMETER Experiment Name: At_Far-red-induction_P Parameter: Timepoint (hr) Value: 24
  misc_feature: MA Experiment 20001451 PARAMETER Experiment Name: At_Far-red-induction_P Parameter: Tissue Value: Whole Plant
  misc_feature: MA Experiment ID: 20001554 Result: Up-regulated in Transcription
  misc_feature: MA Experiment 20001554 PARAMETER Experiment Name: At_Drought_Soil_Dry_P Parameter: Age (day) Value: 21
  misc_feature: MA Experiment 20001554 PARAMETER Experiment Name: At_Drought_Soil_Dry_P Parameter: Organism Value: A. thaliana
  misc_feature: MA Experiment 20001554 PARAMETER Experiment Name: At_Drought_Soil_Dry_P Parameter: Plant Line Value: WS
  misc_feature: MA Experiment 20001554 PARAMETER Experiment Name: At_Drought_Soil_Dry_P Parameter: Post Timepoint (hr) Value: None
  misc_feature: MA Experiment 20001554 PARAMETER Experiment Name: At_Drought_Soil_Dry_P Parameter: Post-Treatment Value: None
  misc_feature: MA Experiment 20001554 PARAMETER Experiment Name: At_Drought_Soil_Dry_P Parameter: Timepoint (day) Value: 7
  misc_feature: MA Experiment 20001554 PARAMETER Experiment Name: At_Drought_Soil_Dry_P Parameter: Treatment Value: Drought vs. No Drought
  misc_feature: MA Experiment ID: 20001904 Result: Up-regulated in Transcription
  misc_feature: MA Experiment 20001904 PARAMETER Experiment Name: At_Drought_Reproduction_P Parameter: Age (day) Value: 37
  misc_feature: MA Experiment 20001904 PARAMETER Experiment Name: At_Drought_Reproduction_P Parameter: Organism Value: A. thaliana
  misc_feature: MA Experiment 20001904 PARAMETER Experiment Name: At_Drought_Reproduction_P Parameter: Plant Line Value: WS
  misc_feature: MA Experiment 20001904 PARAMETER Experiment Name: At_Drought_Reproduction_P Parameter: Timepoint (day) Value: 7
  misc_feature: MA Experiment 20001904 PARAMETER Experiment Name: At_Drought_Reproduction_P Parameter: Tissue Value: Rosettes
  misc_feature: MA Experiment 20001904 PARAMETER Experiment Name: At_Drought_Reproduction_P Parameter: Treatment Value: Drought vs. No Drought
  misc_feature: MA Experiment ID: 20001905 Result: Up-regulated in Transcription
  misc_feature: MA Experiment 20001905 PARAMETER Experiment Name: At_Drought_Reproduction_P Parameter: Age (day) Value: 40
  misc_feature: MA Experiment 20001905 PARAMETER Experiment Name: At_Drought_Reproduction_P Parameter: Organism Value: A. thaliana
  misc_feature: MA Experiment 20001905 PARAMETER Experiment Name: At_Drought_Reproduction_P Parameter: Plant Line Value: WS
  misc_feature: MA Experiment 20001905 PARAMETER Experiment Name: At_Drought_Reproduction_P Parameter: Timepoint (day) Value: 10
  misc_feature: MA Experiment 20001905 PARAMETER Experiment Name: At_Drought_Reproduction_P Parameter: Tissue Value: Rosettes
  misc_feature: MA Experiment 20001905 PARAMETER Experiment Name: At_Drought_Reproduction_P Parameter: Treatment Value: Drought vs. No Drought
aagaagaccttctctcatcatcattattataggaagttaggaactatggcttatgaagagagaagatcatcgatcctggattcattctcgctatcgccactaccatacccagttcttttgatcctagccgttgcttcagtgttcttgttgagttcatggtacttcagcttggaagaagcagccgaatcagcggaagagcagataaattttgcgcttctcttgattcctctgtttcttatagtcttggtccggtggttatcttccatggagaaccctgatgcgcttctcgggatgttttcaagcagtcgtcggacaacttacgtgagtcccggagccggaggtgacggtggaagctcgccgtggggagtggcggcgttgatagttttgttgcttgtattgcttcagtatcaatcaagtttcttggagatgtggtctggttaatgatattgataggtttttttgattttcacgtgttttgttttgtcgtctagtagcacgatgatgtaaaaatttggtcattacttacgaattacgaggtttaaaatctcgtgacggtactacatgttatcc

SEQ ID NO: 20547 - protein, 146 aa, Arabidopsis thaliana
  peptide (1)..(146): Ceres Seq. ID no. 12336088
  misc_feature (33)..(143): Homolog of NCBI NO: 25408197 NR Description: hypothetical protein At2g31940 [imported] -
  misc_feature (33)..(144): Homolog of NCBI NO: 18402822 NR Description: hypothetical protein; protein id: At2g31940.1
  misc_feature (23)..(144): Homolog of NCBI NO: 18420057 NR Description: Expressed protein
  misc_feature (16)..(146): Homolog of NCBI NO: 18399613 NR Description: expressed protein
KKTFSHHHYYRKLGTMAYEERRSSILDSFSLSPLPYPVLLILAVASVFLLSSWYFSLEEAAESAEEQINFALLLIPLFLIVLVRWLSSMENPDALLGMFSSSRRTTYVSPGAGGDGGSSPWGVAALIVLLLVLLQYQSSFLEMWSG

SEQ ID NO: 20548 - protein, 131 aa, Arabidopsis thaliana
  peptide (1)..(131): Ceres Seq. ID no. 12336089
  misc_feature (18)..(128): Homolog of NCBI NO: 25408197 NR Description: hypothetical protein At2g31940 [imported] -
  misc_feature (18)..(129): Homolog of NCBI NO: 18402822 NR Description: hypothetical protein; protein id: At2g31940.1
  misc_feature (8)..(129): Homolog of NCBI NO: 18420057 NR Description: Expressed protein
  misc_feature (1)..(131): Homolog of NCBI NO: 18399613 NR Description: expressed protein
MAYEERRSSILDSFSLSPLPYPVLLILAVASVFLLSSWYFSLEEAAESAEEQINFALLLIPLFLIVLVRWLSSMENPDALLGMFSSSRRTTYVSPGAGGDGGSSPWGVAALIVLLLVLLQYQSSFLEMWSG

SEQ ID NO: 20549 - DNA, 560 bp, Arabidopsis thaliana
  misc_feature (1)..(560): Ceres Seq. ID no. 12322366
  misc_feature: MA Experiment ID: 108464 Result: Up-regulated in Transcription
  misc_feature: MA Experiment 108464 PARAMETER Experiment Name: At_Germinating_Seeds_cDNA_P Parameter: Age (day) Value: 4 vs. 0
  misc_feature: MA Experiment 108464 PARAMETER Experiment Name: At_Germinating_Seeds_cDNA_P Parameter: Tissue Value: Germinating Seeds
  misc_feature: MA Experiment ID: 108501 Result: Down-regulated in Transcription
  misc_feature: MA Experiment 108501 PARAMETER Experiment Name: At_ap2_floral_buds_cDNA_P Parameter: Plant Line Value: ap2 (Ler.)
  misc_feature: MA Experiment 108501 PARAMETER Experiment Name: At_ap2_floral_buds_cDNA_P Parameter: Tissue Value: Closed Flower
  misc_feature: MA Experiment ID: 108576 Result: Up-regulated in Transcription
  misc_feature: MA Experiment 108576 PARAMETER Experiment Name: At_42deg_Heat_cDNA_P Parameter: Temperature (deg C) Value: 42 vs. 22
  misc_feature: MA Experiment 108576 PARAMETER Experiment Name: At_42deg_Heat_cDNA_P Parameter: Timepoint (hr) Value: 1
  misc_feature: MA Experiment 108576 PARAMETER Experiment Name: At_42deg_Heat_cDNA_P Parameter: Tissue Value: Aerial
  misc_feature: MA Experiment ID: 108577 Result: Up-regulated in Transcription
  misc_feature: MA Experiment 108577 PARAMETER Experiment Name: At_42deg_Heat_cDNA_P Parameter: Temperature (deg C) Value: 42 vs. 22
  misc_feature: MA Experiment 108577 PARAMETER Experiment Name: At_42deg_Heat_cDNA_P Parameter: Timepoint (hr) Value: 6
  misc_feature: MA Experiment 108577 PARAMETER Experiment Name: At_42deg_Heat_cDNA_P Parameter: Tissue Value: Aerial
  misc_feature: MA Experiment ID: 108595 Result: Up-regulated in Transcription
  misc_feature: MA Experiment 108595 PARAMETER Experiment Name: At_Ler-pi_Ovule_cDNA_P Parameter: Plant Line Value: null
  misc_feature: MA Experiment ID: 20000093 Result: Up-regulated in Transcription
  misc_feature: MA Experiment 20000093 PARAMETER Experiment Name: At_42deg_Heat_cDNA_P Parameter: Temperature (deg C) Value: 42 vs. 22
  misc_feature: MA Experiment 20000093 PARAMETER Experiment Name: At_42deg_Heat_cDNA_P Parameter: Timepoint (hr) Value: 0.5
  misc_feature: MA Experiment 20000093 PARAMETER Experiment Name: At_42deg_Heat_cDNA_P Parameter: Tissue Value: Aerial
  misc_feature: MA Experiment ID: 20000111 Result: Up-regulated in Transcription
  misc_feature: MA Experiment 20000111 PARAMETER Experiment Name: At_42deg_Heat_cDNA_P Parameter: Temperature (deg C) Value: 42 vs. 22
  misc_feature: MA Experiment 20000111 PARAMETER Experiment Name: At_42deg_Heat_cDNA_P Parameter: Timepoint (hr) Value: 6
  misc_feature: MA Experiment 20000111 PARAMETER Experiment Name: At_42deg_Heat_cDNA_P Parameter: Tissue Value: Aerial
  misc_feature: MA Experiment ID: 20000113 Result: Up-regulated in Transcription
  misc_feature: MA Experiment 20000113 PARAMETER Experiment Name: At_42deg_Heat_cDNA_P Parameter: Temperature (deg C) Value: 42 vs. 22
  misc_feature: MA Experiment 20000113 PARAMETER Experiment Name: At_42deg_Heat_cDNA_P Parameter: Timepoint (hr) Value: 8
  misc_feature: MA Experiment 20000113 PARAMETER Experiment Name: At_42deg_Heat_cDNA_P Parameter: Tissue Value: Aerial
  misc_feature: MA Experiment ID: 20000184 Result: Up-regulated in Transcription
  misc_feature: MA Experiment 20000184 PARAMETER Experiment Name: At_Shoots__P Parameter: Age (day) Value: 7
  misc_feature: MA Experiment 20000184 PARAMETER Experiment Name: At_Shoots__P Parameter: Tissue Value: Shoots vs. Whole Plant
aacaaccaaaaacattcatttgtcattttgtctcctcttttgttttctctgatcactagtatggctgtattcagagtcttgcttgcttctcttctcatatctcttcttgtcctcgacttcgtccatgccgatatggtgacgtcgaatgacgcccctaaaatcgattgcaacagcaggtgccaagagcggtgcagtctttcgagtaggccaaatctttgtcacagagcgtgcgggacttgctgcgctaggtgcaactgcgtggcaccgggcacatccggaaactacgacaaatgtccgtgctatggtagcctaaccacccacggaggacgcagaaagtgtccttaaaaactctgtcgctgttttatttgatttcgtttataatactttacttttatgagagtaattgtggttattttcttgggaattattaaaaagcaaaagaaagagaatgttatacgtcatgtgcaactcttcgatctttgttttagtgtttatccaatttgtacttgttggtttggttcctggttaacattaggtctgaaaaggtattgtttttcatc

SEQ ID NO: 20550 - protein, 114 aa, Arabidopsis thaliana
  peptide (1)..(114): Ceres Seq. ID no. 12322367
  misc_feature (23)..(112): Pfam Name: Gibberellin regulated protein Pfam Description: Gibberellin regulated protein
  misc_feature (21)..(114): Homolog of NCBI NO: 3094012 NR Description: cold-regulated LTCOR12 [Lavatera thuringiaca]
  misc_feature (21)..(114): Homolog of NCBI NO: 14625945 NR Description: snakin2 [Solanum tuberosum]
  misc_feature (21)..(114): Homolog of NCBI NO: 2253442 NR Description: LTCOR11 [Lavatera thuringiaca]
  misc_feature (21)..(114): Homolog of NCBI NO: 22530936 NR Description: expressed protein [Arabidopsis thaliana]
  misc_feature (21)..(114): Homolog of NCBI NO: 21618022 NR Description: GAST1-like protein [Arabidopsis thaliana]
  misc_feature (21)..(114): Homolog of NCBI NO: 18410924 NR Description: expressed protein
  misc_feature (21)..(114): Homolog of NCBI NO: 887939 NR Description: GAST1 protein homolog
  misc_feature (21)..(46): Homolog of NCBI NO: 25313155 NR Description: protein F10A5.6 [imported] - Arabidopsis thaliana
  misc_feature (51)..(114): Homolog of NCBI NO: 25313155 NR Description: protein F10A5.6 [imported] - Arabidopsis thaliana
  misc_feature (21)..(112): Homolog of NCBI NO: 15224170 NR Description: similar to gibberellin-regulated proteins
NNQKHSFVILSPLLFSLITSMAVFRVLLASLLISLLVLDFVHADMVTSNDAPKIDCNSRCQERCSLSSRPNLCHRACGTCCARCNCVAPGTSGNYDKCPCYGSLTTHGGRRKCP

SEQ ID NO: 20551 - protein, 94 aa, Arabidopsis thaliana
  peptide (1)..(94): Ceres Seq. ID no. 12322368
  misc_feature (3)..(92): Pfam Name: Gibberellin regulated protein Pfam Description: Gibberellin regulated protein
  misc_feature (1)..(94): Homolog of NCBI NO: 3094012 NR Description: cold-regulated LTCOR12 [Lavatera thuringiaca]
  misc_feature (1)..(94): Homolog of NCBI NO: 14625945 NR Description: snakin2 [Solanum tuberosum]
  misc_feature (1)..(94): Homolog of NCBI NO: 2253442 NR Description: LTCOR11 [Lavatera thuringiaca]
  misc_feature (1)..(94): Homolog of NCBI NO: 22530936 NR Description: expressed protein [Arabidopsis thaliana]
  misc_feature (1)..(94): Homolog of NCBI NO: 21618022 NR Description: GAST1-like protein [Arabidopsis thaliana]
  misc_feature (1)..(94): Homolog of NCBI NO: 18410924 NR Description: expressed protein
  misc_feature (1)..(94): Homolog of NCBI NO: 887939 NR Description: GAST1 protein homolog
  misc_feature (1)..(26): Homolog of NCBI NO: 25313155 NR Description: protein F10A5.6 [imported] - Arabidopsis thaliana
  misc_feature (31)..(94): Homolog of NCBI NO: 25313155 NR Description: protein F10A5.6 [imported] - Arabidopsis thaliana
  misc_feature (1)..(92): Homolog of NCBI NO: 15224170 NR Description: similar to gibberellin-regulated proteins
MAVFRVLLASLLISLLVLDFVHADMVTSNDAPKIDCNSRCQERCSLSSRPNLCHRACGTCCARCNCVAPGTSGNYDKCPCYGSLTTHGGRRKCP

SEQ ID NO: 20552 - protein, 70 aa, Arabidopsis thaliana
  peptide (1)..(70): Ceres Seq. ID no. 12322369
  misc_feature (1)..(68): Pfam Name: Gibberellin regulated protein Pfam Description: Gibberellin regulated protein
  misc_feature (1)..(70): Homolog of NCBI NO: 14625943 NR Description: snakin2 [Solanum tuberosum]
  misc_feature (1)..(70): Homolog of NCBI NO: 3094012 NR Description: cold-regulated LTCOR12 [Lavatera thuringiaca]
  misc_feature (1)..(70): Homolog of NCBI NO: 14625945 NR Description: snakin2 [Solanum tuberosum]
  misc_feature (1)..(70): Homolog of NCBI NO: 2253442 NR Description: LTCOR11 [Lavatera thuringiaca]
  misc_feature (1)..(70): Homolog of NCBI NO: 22530936 NR Description: expressed protein [Arabidopsis thaliana]
  misc_feature (1)..(70): Homolog of NCBI NO: 21618022 NR Description: GAST1-like protein [Arabidopsis thaliana]
  misc_feature (1)..(70): Homolog of NCBI NO: 18410924 NR Description: expressed protein
  misc_feature (1)..(70): Homolog of NCBI NO: 887939 NR Description: GAST1 protein homolog
  misc_feature (7)..(70): Homolog of NCBI NO: 25313155 NR Description: protein F10A5.6 [imported] - Arabidopsis thaliana
  misc_feature (1)..(68): Homolog of NCBI NO: 15224170 NR Description: similar to gibberellin-regulated proteins
MVTSNDAPKIDCNSRCQERCSLSSRPNLCHRACGTCCARCNCVAPGTSGNYDKCPCYGSLTTHGGRRKCP

SEQ ID NO: 20553 - DNA, 1577 bp, Arabidopsis thaliana
  misc_feature (1)..(1577): Ceres Seq. ID no. 13494050
  misc_feature: MA Experiment ID: 108595 Result: Down-regulated in Transcription
  misc_feature: MA Experiment 108595 PARAMETER Experiment Name: At_Ler-pi_Ovule_cDNA_P Parameter: Plant Line Value: null
  misc_feature: MA Experiment ID: 20000087 Result: Down-regulated in Transcription
  misc_feature: MA Experiment 20000087 PARAMETER Experiment Name: At_100uM_ABA_Mutants_cDNA_P Parameter: Plant Line Value: WS
  misc_feature: MA Experiment 20000087 PARAMETER Experiment Name: At_100uM_ABA_Mutants_cDNA_P Parameter: Timepoint (hr) Value: 6
  misc_feature: MA Experiment 20000087 PARAMETER Experiment Name: At_100uM_ABA_Mutants_cDNA_P Parameter: Tissue Value: Aerial
  misc_feature: MA Experiment 20000087 PARAMETER Experiment Name: At_100uM_ABA_Mutants_cDNA_P Parameter: Treatment Value: 100uM ABA vs. No Treatment
  misc_feature: MA Experiment ID: 20000185 Result: Down-regulated in Transcription
  misc_feature: MA Experiment 20000185 PARAMETER Experiment Name: At_Roots__P Parameter: Age (day) Value: 7 vs. 21
  misc_feature: MA Experiment 20000185 PARAMETER Experiment Name: At_Roots__P Parameter: Organism Value: A. thaliana
  misc_feature: MA Experiment 20000185 PARAMETER Experiment Name: At_Roots__P Parameter: Tissue Value: Roots vs. Whole Plant
  misc_feature: MA Experiment ID: 20001905 Result: Down-regulated in Transcription
  misc_feature: MA Experiment 20001905 PARAMETER Experiment Name: At_Drought_Reproduction_P Parameter: Age (day) Value: 40
  misc_feature: MA Experiment 20001905 PARAMETER Experiment Name: At_Drought_Reproduction_P Parameter: Organism Value: A. thaliana
  misc_feature: MA Experiment 20001905 PARAMETER Experiment Name: At_Drought_Reproduction_P Parameter: Plant Line Value: WS
  misc_feature: MA Experiment 20001905 PARAMETER Experiment Name: At_Drought_Reproduction_P Parameter: Timepoint (day) Value: 10
  misc_feature: MA Experiment 20001905 PARAMETER Experiment Name: At_Drought_Reproduction_P Parameter: Tissue Value: Rosettes
  misc_feature: MA Experiment 20001905 PARAMETER Experiment Name: At_Drought_Reproduction_P Parameter: Treatment Value: Drought vs. No Drought
aaaagctccgttattcaagattattccgataatgcagtcactctccaccccacacaccatctctcttcttctccccagaacctctccgtctcgtctttctccctctcttcactcccttgctttccccactcgattacggtctctttcctattcttctcaaacgtcgatcctccccgatgccggcgatgatttcattgtcggtgactgtctcgtctacgaggacggcgtcttcgaagacccttaccttgataaggaggtcactcaggttgcgaagcaggagcgcaagaagaatcggcgtggcggggctaagagattagatgaatccgagattgagcccgagaacctcgtgccagaggaatggagggatattcaggcggaggtgaatctgacgaagaaggacaagcgcaaaatagcgcaggagatggagttcggggttcgggtggagaagaagaggcaagggctaattccgctgaggaaagttgacttgaatgactttctcacgtacaaggaagccaagttggctcaattgaggcctgtcattctcgataaaccgggaaatttctccgacgacagtggagcgtcaagcgatggagagaccgctgtatcatctcccagcgagcgagtggctcctaagaaccctagatgggcagtttacggaaagggattcgaccacgttgccaagttcttcaatagcgacaagtacgatcccagcgacaagaaatccgacggccctcgaaagctgctttcaaaagaagagaagtttatgctcaatagccggaatcctgacctagccgttgccacatcaaaaaaatggcttcctcttcacacactggcagcatgtggagagttttatctggttgattccttgctaaagcacaatcttgatatcaatgcaaccgatgtgggcggcttgacagtacttcaccgagcaatcattggtaagaagcaggctattactaactacctgctgagggaatcggcaaatccatttgttcttgatgacgaaggtgcgaccttgatgcactatgctgtgcaaacagcatcagctcccacaataaaacttctcctactgtataacgctgatataaacgctcaggacagggacgggtggactccactgcacgttgcagtacaggccagaagaagcgacattgtaaagcttcttttgataaaaggggcggacatagaagtgaagaacaaggatgggttaactccgcttgggctttgcctctaccttggaagagagataaggacgtatgaggtgatgaagctgttgaaagagtttccacttagcagacacaagaagagattggtaacaacagatgaagatattgaatagtcctttcaatttcagcttgaagtacactcacttatgagaacctgagaaaaggagatggaggtaaaggtgatgattagggcattggaacctcggagtcggagtgggtccactgtctcacttccttaaatttggtttgctgttagtcttatccatcgattttggatatttatcacaacttgatccattcttaaagaaaatatctgaaaataaataaaaagtaatacatatatatatatat

SEQ ID NO: 20554 - protein, 445 aa, Arabidopsis thaliana
  peptide (1)..(445): Ceres Seq. ID no. 13494051
  misc_feature (273)..(415): Homolog of NCBI NO: 28274854 NR Description: ankyrin repeat protein E4_8 [synthetic construct]
  misc_feature (271)..(416): Homolog of NCBI NO: 39654744 NR Description: Chain A, X-Ray Structure Of Human Gankyrin
  misc_feature (271)..(416): Homolog of NCBI NO: 4506217 NR Description: proteasome 26S non-ATPase subunit 10 isoform 1
  misc_feature (273)..(415): Homolog of NCBI NO: 28274852 NR Description: ankyrin repeat protein E4_2 [synthetic construct]
  misc_feature (271)..(406): Homolog of NCBI NO: 25990817 NR Description: gankyrin oncoprotein [Mesocricetus auratus]
  misc_feature (225)..(429): Homolog of NCBI NO: 15242597 NR Description: ankyrin repeat protein EMB506 [Arabidopsis
  misc_feature (17)..(432): Homolog of NCBI NO: 22758264 NR Description: Putative ankyrin-repeat protein
  misc_feature (1)..(407): Homolog of NCBI NO: 322461 NR Description: ankyrin-repeat protein - Arabidopsis thaliana
  misc_feature (11)..(445): Homolog of NCBI NO: 26450056 NR Description: unknown protein [Arabidopsis thaliana]
  misc_feature (11)..(445): Homolog of NCBI NO: 30698188 NR Description: expressed protein [Arabidopsis thaliana]
KAPLFKIIPIMQSLSTPHTISLLLPRTSPSRLSPSLHSLAFPTRLRSLSYSSQTSILPDAGDDFIVGDCLVYEDGVFEDPYLDKEVTQVAKQERKKNRRGGAKRLDESEIEPENLVPEEWRDIQAEVNLTKKDKRKIAQEMEFGVRVEKKRQGLIPLRKVDLNDFLTYKEAKLAQLRPVILDKPGNFSDDSGASSDGETAVSSPSERVAPKNPRWAVYGKGFDHVAKFFNSDKYDPSDKKSDGPRKLLSKEEKFMLNSRNPDLAVATSKKWLPLHTLAACGEFYLVDSLLKHNLDINATDVGGLTVLHRAIIGKKQAITNYLLRESANPFVLDDEGATLMHYAVQTASAPTIKLLLLYNADINAQDRDGWTPLHVAVQARRSDIVKLLLIKGADIEVKNKDGLTPLGLCLYLGREIRTYEVMKLLKEFPLSRHKKRLVTTDEDIE

SEQ ID NO: 20555 - protein, 435 aa, Arabidopsis thaliana
  peptide (1)..(435): Ceres Seq. ID no. 13494052
  misc_feature (263)..(405): Homolog of NCBI NO: 28274854 NR Description: ankyrin repeat protein E4_8 [synthetic construct]
  misc_feature (261)..(406): Homolog of NCBI NO: 39654744 NR Description: Chain A, X-Ray Structure Of Human Gankyrin
  misc_feature (261)..(406): Homolog of NCBI NO: 4506217 NR Description: proteasome 26S non-ATPase subunit 10 isoform 1
  misc_feature (263)..(405): Homolog of NCBI NO: 28274852 NR Description: ankyrin repeat protein E4_2 [synthetic construct]
  misc_feature (261)..(396): Homolog of NCBI NO: 25990817 NR Description: gankyrin oncoprotein [Mesocricetus auratus]
  misc_feature (215)..(419): Homolog of NCBI NO: 15242597 NR Description: ankyrin repeat protein EMB506 [Arabidopsis
  misc_feature (7)..(422): Homolog of NCBI NO: 22758264 NR Description: Putative ankyrin-repeat protein
  misc_feature (1)..(397): Homolog of NCBI NO: 322461 NR Description: ankyrin-repeat protein - Arabidopsis thaliana
  misc_feature (1)..(435): Homolog of NCBI NO: 26450056 NR Description: unknown protein [Arabidopsis thaliana]
  misc_feature (1)..(435): Homolog of NCBI NO: 30698188 NR Description: expressed protein [Arabidopsis thaliana]
MQSLSTPHTISLLLPRTSPSRLSPSLHSLAFPTRLRSLSYSSQTSILPDAGDDFIVGDCLVYEDGVFEDPYLDKEVTQVAKQERKKNRRGGAKRLDESEIEPENLVPEEWRDIQAEVNLTKKDKRKIAQEMEFGVRVEKKRQGLIPLRKVDLNDFLTYKEAKLAQLRPVILDKPGNFSDDSGASSDGETAVSSPSERVAPKNPRWAVYGKGFDHVAKFFNSDKYDPSDKKSDGPRKLLSKEEKFMLNSRNPDLAVATSKKWLPLHTLAACGEFYLVDSLLKHNLDINATDVGGLTVLHRAIIGKKQAITNYLLRESANPFVLDDEGATLMHYAVQTASAPTIKLLLLYNADINAQDRDGWTPLHVAVQARRSDIVKLLLIKGADIEVKNKDGLTPLGLCLYLGREIRTYEVMKLLKEFPLSRHKKRLVTTDEDIE

SEQ ID NO: 20556 - protein, 305 aa, Arabidopsis thaliana
  peptide (1)..(305): Ceres Seq. ID no. 13494053
  misc_feature (133)..(275): Homolog of NCBI NO: 28274854 NR Description: ankyrin repeat protein E4_8 [synthetic construct]
  misc_feature (131)..(276): Homolog of NCBI NO: 39654744 NR Description: Chain A, X-Ray Structure Of Human Gankyrin
  misc_feature (131)..(276): Homolog of NCBI NO: 4506217 NR Description: proteasome 26S non-ATPase subunit 10 isoform 1
  misc_feature (133)..(275): Homolog of NCBI NO: 28274852 NR Description: ankyrin repeat protein E4_2 [synthetic construct]
  misc_feature (131)..(266): Homolog of NCBI NO: 25990817 NR Description: gankyrin oncoprotein [Mesocricetus auratus]
  misc_feature (85)..(289): Homolog of NCBI NO: 15242597 NR Description: ankyrin repeat protein EMB506 [Arabidopsis
  misc_feature (1)..(292): Homolog of NCBI NO: 22758264 NR Description: Putative ankyrin-repeat protein
  misc_feature (1)..(267): Homolog of NCBI NO: 322461 NR Description: ankyrin-repeat protein - Arabidopsis thaliana
  misc_feature (1)..(305): Homolog of NCBI NO: 26450056 NR Description: unknown protein [Arabidopsis thaliana]
  misc_feature (1)..(305): Homolog of NCBI NO: 30698188 NR Description: expressed protein [Arabidopsis thaliana]
MEFGVRVEKKRQGLIPLRKVDLNDFLTYKEAKLAQLRPVILDKPGNFSDDSGASSDGETAVSSPSERVAPKNPRWAVYGKGFDHVAKFFNSDKYDPSDKKSDGPRKLLSKEEKFMLNSRNPDLAVATSKKWLPLHTLAACGEFYLVDSLLKHNLDINATDVGGLTVLHRAIIGKKQAITNYLLRESANPFVLDDEGATLMHYAVQTASAPTIKLLLLYNADINAQDRDGWTPLHVAVQARRSDIVKLLLIKGADIEVKNKDGLTPLGLCLYLGREIRTYEVMKLLKEFPLSRHKKRLVTTDEDIE

SEQ ID NO: 20557 - DNA, 1187 bp, Arabidopsis thaliana
  misc_feature (1)..(1187): Ceres Seq. ID no. 12422485
  misc_feature: MA Experiment ID: 108434 Result: Up-regulated in Transcription
  misc_feature: MA Experiment 108434 PARAMETER Experiment Name: At_Root_Tips_cDNA_P Parameter: Tissue Value: Root Tips
  misc_feature: MA Experiment ID: 108573 Result: Down-regulated in Transcription
  misc_feature: MA Experiment 108573 PARAMETER Experiment Name: At_Drought_cDNA_P Parameter: Timepoint (hr) Value: 6
  misc_feature: MA Experiment 108573 PARAMETER Experiment Name: At_Drought_cDNA_P Parameter: Tissue Value: Aerial
  misc_feature: MA Experiment 108573 PARAMETER Experiment Name: At_Drought_cDNA_P Parameter: Treatment Value: Drought vs. No Drought
  misc_feature: MA Experiment ID: 108577 Result: Down-regulated in Transcription
  misc_feature: MA Experiment 108577 PARAMETER Experiment Name: At_42deg_Heat_cDNA_P Parameter: Temperature (deg C) Value: 42 vs. 22
  misc_feature: MA Experiment 108577 PARAMETER Experiment Name: At_42deg_Heat_cDNA_P Parameter: Timepoint (hr) Value: 6
  misc_feature: MA Experiment 108577 PARAMETER Experiment Name: At_42deg_Heat_cDNA_P Parameter: Tissue Value: Aerial
agtggagaagaagactcgagtcatctgcagaaaagattcccgatcggattggatcatataagattttagggatttggaaaaaatcttgagctatggaggcgaatgcggcggtggacggaacggggaatccgatccctacgtcggcggttttaacagcttcggcgaagcatataggaatcaggtgtatgccggaaaacatggcgttcctgaaatgtaagaagaatgatcctaacccagagaaatgcctcgagaagggacgtgacgtcactcgctgtgttcttggcctgtacgtttcttctacttcattctcgtttcaatttctctacaagttcttaatttagctgatcttagtcatataacaatttttgggctctttctgttaaaacttgatgaagattgaggataatgtcacattgtagaattaggggtttgatcatatagtttaagaaatgaagaatctttagactttttttgatgtggattacagtgtatttttttaagaccatgaacatacactaagctaagttcatcgagttatgaacatttctagaacttgagtaatctttgtatattatggatcatgatcaaatatttggcctatttgaaagtaattcatggcacacttgtgtttgtaggagcctttatttccgtagattgaaaactgaacccaaaagccctatacaactagccatttgtttagtatctaggaagcagttgtttgactcttgtgtagttagtgatatagtgatggatatcttgagagttcactaactttgcggaggatgatgcattgtccataacaatctgaagttgagtagtttgcagttggtgacttagattgttcttaaaactggtgaaatgattgatattgcaggctgaaggatcttcaccagagatgcccaaaggagatggatgcttacgttggatgcatgtattactacaccaacgagtttgagttgtgtcggaaagagcaagaagcttttgagaaagtgtgtccgttgaaatgagaaagtcaagtttttatctgtctcctaataagcaaatgttcattttgactctggagcgttactctaatcactcttccatcgctgcctgcttcttttccttttctggtaatggaagacctttaaaccatgtaatattgtcgtgtttcctttgtccagttctcccgagggaaacgattttgg

SEQ ID NO: 20558 - protein, 82 aa, Arabidopsis thaliana
  peptide (1)..(82): Ceres Seq. ID no. 12422486
  misc_feature (4)..(65): Homolog of NCBI NO: 15239564 NR Description: NADH:ubiquinone oxidoreductase - like protein
  misc_feature (1)..(65): Homolog of NCBI NO: 18397530 NR Description: expressed protein
MEANAAVDGTGNPIPTSAVLTASAKHIGIRCMPENMAFLKCKKNDPNPEKCLEKGRDVTRCVLGLYVSSTSFSFQFLYKFLI

SEQ ID NO: 20559 - protein, 65 aa, Arabidopsis thaliana
  peptide (1)..(65): Ceres Seq. ID no. 12422487
MDHDQIFGLFESNSWHTCVCRSLYFRRLKTEPKSPIQLAICLVSRKQLFDSCVVSDIVMDILRVH

SEQ ID NO: 20560 - protein, 61 aa, Arabidopsis thaliana
  peptide (1)..(61): Ceres Seq. ID no. 12422488
MRKSSFYLSPNKQMFILTLERYSNHSSIAACFFSFSGNGRPLNHVILSCFLCPVLPRETIL

SEQ ID NO: 20561 - DNA, 1529 bp, Arabidopsis thaliana
  misc_feature (1)..(1529): Ceres Seq. ID no. 13646595
gataagatgacccgtctttactccaagctcgttcggagctaaccctcacctcctcagctttagccctaattttctgtccttcttcatcctcttccgccataatctttctcaccagagatgccacttcttcccttccgatgactctctccgacggtaactccgatgtacgaacggccacaccgatctcctcagtcaataacgtggcattcatccactgctccgcataaagaggccaagcgatgatcggaactcctttagtcaaactttccaaagccgaactccaaccgcagtgagacaagaacccaccgaacgatctatggctcaagatctcaacttgtggtgcccattgcgtaaccacaatccccacaccacgcgtgcggtccaagaaaccttcaggtagactggcacttacctgttcatcatcgctggagatcgccccgagatatgaagcgggcctacgtagaacccaaacgaacctttgaccacttaactctaaacccaaagcgagttccactgtttgctcaaacgtcaacgttccaccgctccctaaacacacaaacaccactgacctttcccgttgctcgtctagccactcgaatatactattgggtttgtctacatgctggttagtcctaacaattggcccaataggataaaccggtactttcatgacccggctcaattcttcgtcctctctaagcgcagcgagagtgtttccttgtaactcctcccaagtatttaccaaaacaccatcgctcataggtacatctaagccagctcgtacacactctttatattgctggcccgaccggtctaacatcgtttccatcagctccttcggtccgaccggtttacaacccggtatcttcaaaggctccttaatatcaacatactcaccttccactaccgtatctaacaccggcaagtacaccatgactgccaagaaccacgcatgagttggaacgtaaacgtatttagccgtcatgcctacgtcatcggctacggacatcagttccgtacccaaaaagtcaacaatcatgaccgttggttttcgtttcattaatttcacggcatctcgtaccgcgggcttcatggctcgcatcttcaccaccatcttagtgaaaattgtagcatctggctccacgaggttgtctacatccaccgagggaatttccgtaatttgacagattgttctagccgcggctgcatgtatggcttcggtttctgtcggtgaaggagccggaggtgaccgcgagaatggtgacgtggatgtttaggacggaggagagacggttgccgagctccaggatagggatgaggtgacccaagccagggctagccactagaagcgcgtgaggctggtccatgatcgatggtcgaccacttaattttctttttagttgctagtttctgtgtagcaaaatcattgtggattggatttcggtataggccatttaacaagtgatatttattatcaaaaaaaaaaaaaaaaaaaacagagagaactagtctcgagggggggcccggta

SEQ ID NO: 20562 - protein, 95 aa, Arabidopsis thaliana
  peptide (1)..(95): Ceres Seq. ID no. 13646596
  misc_feature (1)..(28): Homolog of NCBI NO: 34394654 NR Description: unknown protein [Oryza sativa (japonica
  misc_feature (1)..(40): Homolog of NCBI NO: 34394681 NR Description: unknown protein [Oryza sativa (japonica
MTRLNSSSSLSAARVFPCNSSQVFTKTPSLIGTSKPARTHSLYCWPDRSNIVSISSFGPTGLQPGIFKGSLISTYSPSTTVSNTGKYTMTAKNHA

SEQ ID NO: 20563 - protein, 66 aa, Arabidopsis thaliana
  peptide (1)..(66): Ceres Seq. ID no. 13646597
MPTSSATDISSVPKKSTIMTVGFRFINFTASRTAGFMARIFTTILVKIVASGSTRLSTSTEGISVI

SEQ ID NO: 20564 - protein, 61 aa, Arabidopsis thaliana
  peptide (1)..(61): Ceres Seq. ID no. 13646598
MKRAYVEPKRTFDHLTLNPKRVPLFAQTSTFHRSLNTQTPLTFPVARLATRIYYWVCLHAG

SEQ ID NO: 20565 - DNA, 1597 bp, Arabidopsis thaliana
  misc_feature (1)..(1597): Ceres Seq. ID no. 13646499
  misc_feature: MA Experiment ID: 20000179 Result: Down-regulated in Transcription
  misc_feature: MA Experiment 20000179 PARAMETER Experiment Name: At_Germinating_Seeds_P Parameter: Age (hr) Value: 6 vs. 0
  misc_feature: MA Experiment 20000179 PARAMETER Experiment Name: At_Germinating_Seeds_P Parameter: Tissue Value: Germinating Seeds
  misc_feature: MA Experiment ID: 20001247 Result: Down-regulated in Transcription
  misc_feature: MA Experiment 20001247 PARAMETER Experiment Name: At_Far-red-induction_P Parameter: Age (day) Value: 7
  misc_feature: MA Experiment 20001247 PARAMETER Experiment Name: At_Far-red-induction_P Parameter: Light Value: Far-red vs. White
  misc_feature: MA Experiment 20001247 PARAMETER Experiment Name: At_Far-red-induction_P Parameter: Organism Value: A. thaliana
  misc_feature: MA Experiment 20001247 PARAMETER Experiment Name: At_Far-red-induction_P Parameter: Plant Line Value: Columbia
  misc_feature: MA Experiment 20001247 PARAMETER Experiment Name: At_Far-red-induction_P Parameter: Timepoint (hr) Value: 1
  misc_feature: MA Experiment 20001247 PARAMETER Experiment Name: At_Far-red-induction_P Parameter: Tissue Value: Whole Plant
ggtagttggaattttccagtttttggtttgtttctgtatctgtggtttaaaaaagtggagaagaagctttttagtgcttttctatggcgaggattctccgaaacgtttattcacttagaagctctctgttttcgtcagagttacttagaagaagtgtggttggaacatcgtttcagctccgaggctttgctgccaaagctaaaaagaaatccaagtcagatggaaatggatcatctgaagaaggtatgtcgaaaaaggagattgctcttcagcaagcacttgatcagattaccagttcatttggcaaagggtccataatgtatctcggtcgtgctgtttctcctagaaatgtcccggttttctctaccggatcttttgcccttgatgtagctttgggagttggtggccttcctaaggggcgtgttgtggagatatatggtcctgaagcatcgggaaagacaacacttgctcttcatgttattgcagaagcacaaaaacaaggaggaacctgtgtctttgtagatgctgagcatgctcttgattcgtcacttgctaaggcaatcggtgtaaatacagaaaatctgcttctatcacagcctgattgtggcgaacaggcccttagtcttgtggatactttaatccgaagtggttcagttgatgttattgtagttgacagtgtggctgctcttgtacctaaaggagaacttgagggcgagatgggtgatgcacatatggctatgcaagccagattgatgagccaagctttgcgtaaattgagccattctttatcgttatcgcaaacacttctgatctttataaatcaggtgagatcaaaactatctacgtttggaggatttggaggtccaacagaagttacttgtggtggaaatgctttgaagttttatgcttctatgcgtttgaatatcaagcgaattggacttatcaagaaaggcgaagagacaacgggaagtcaagtctccgtgaagatagtgaagaacaaactcgctccgccgtttagaactgctcagtttgagcttgaattcggcaaaggaatctgcaagatcacggagataatcgacctgagcataaagcacaagttcatcgcgaaaaacggaacattctacaatctcaacggtaaaaactaccatggaaaagaggctttaaagagattccttaaacagaacgaatctgatcaagaagagctcatgaagaagctccaagacaagctcatcgccgatgaagctgcagataaggaaactgaatctgaatctgaggaagaagattccctgagagttgtggtttcacctgacaacacagatgatgaatcaccagctcttgttgttggagctgctgcagtggttgttgaggcagcatgattagcgacctccggtttagtataatattcttcctttggcctagagttttccggtttaacgcggtttggattcggtttccttctcctcatgtaatttatgtgctagttaaatcacatttacatataaccgttgttgtgggtgagaaaattttgtagtttttatggggaaatttaatgttaacgaaaagccagaatattttaatgttattgatcaattttact

SEQ ID NO: 20566 - protein, 430 aa, Arabidopsis thaliana
  peptide (1)..(430): Ceres Seq. ID no. 13646500
  misc_feature (60)..(384): Pfam Name: recA bacterial DNA recombination protein Pfam Description: recA bacterial DNA recombination protein
  misc_feature (58)..(374): Homolog of NCBI NO: 23016621 NR Description: hypothetical protein [Magnetospirillum
  misc_feature (52)..(389): Homolog of NCBI NO: 23502079 NR Description: recA protein [Brucella suis 1330]
  misc_feature (52)..(389): Homolog of NCBI NO: 17987070 NR Description: RECA PROTEIN [Brucella melitensis]
  misc_feature (53)..(398): Homolog of NCBI NO: 22961065 NR Description: hypothetical protein [Rhodopseudomonas palustris]
  misc_feature (61)..(398): Homolog of NCBI NO: 3219848 NR Description: RecA protein (Recombinase A)
  misc_feature (54)..(381): Homolog of NCBI NO: 585797 NR Description: RecA protein (Recombinase A)
  misc_feature (55)..(399): Homolog of NCBI NO: 29654363 NR Description: recA protein [Coxiella burnetii RSA 493]
  misc_feature (58)..(386): Homolog of NCBI NO: 22966246 NR Description: hypothetical protein [Rhodospirillum rubrum]
  misc_feature (79)..(422): Homolog of NCBI NO: 34907710 NR Description: putative RecA protein [Oryza sativa (japonica
  misc_feature (55)..(430): Homolog of NCBI NO: 15224783 NR Description: recA protein -related [Arabidopsis thaliana]
MARILRNVYSLRSSLFSSELLRRSVVGTSFQLRGFAAKAKKKSKSDGNGSSEEGMSKKEIALQQALDQITSSFGKGSIMYLGRAVSPRNVPVFSTGSFALDVALGVGGLPKGRVVEIYGPEASGKTTLALHVIAEAQKQGGTCVFVDAEHALDSSLAKAIGVNTENLLLSQPDCGEQALSLVDTLIRSGSVDVIVVDSVAALVPKGELEGEMGDAHMAMQARLMSQALRKLSHSLSLSQTLLIFINQVRSKLSTFGGFGGPTEVTCGGNALKFYASMRLNIKRIGLIKKGEETTGSQVSVKIVKNKLAPPFRTAQFELEFGKGICKITEIIDLSIKHKFIAKNGTFYNLNGKNYHGKEALKRFLKQNESDQEELMKKLQDKLIADEAADKETESESEEEDSLRVVVSPDNTDDESPALVVGAAAVVVEAA

SEQ ID NO: 20567 - protein, 376 aa, Arabidopsis thaliana
  peptide (1)..(376): Ceres Seq. ID no. 13646501
  misc_feature (6)..(330): Pfam Name: recA bacterial DNA recombination protein Pfam Description: recA bacterial DNA recombination protein
  misc_feature (1)..(376): Homolog of NCBI NO: 15224783 NR Description: recA protein -related [Arabidopsis thaliana]
  misc_feature (4)..(320): Homolog of NCBI NO: 23016621 NR Description: hypothetical protein [Magnetospirillum
  misc_feature (1)..(335): Homolog of NCBI NO: 23502079 NR Description: recA protein [Brucella suis 1330]
  misc_feature (1)..(335): Homolog of NCBI NO: 17987070 NR Description: RECA PROTEIN [Brucella melitensis]
  misc_feature (1)..(344): Homolog of NCBI NO: 22961065 NR Description: hypothetical protein [Rhodopseudomonas palustris]
  misc_feature (7)..(344): Homolog of NCBI NO: 3219848 NR Description: RecA protein (Recombinase A)
  misc_feature (1)..(327): Homolog of NCBI NO: 585797 NR Description: RecA protein (Recombinase A)
  misc_feature (1)..(345): Homolog of NCBI NO: 29654363 NR Description: recA protein [Coxiella burnetii RSA 493]
  misc_feature (4)..(332): Homolog of NCBI NO: 22966246 NR Description: hypothetical protein [Rhodospirillum rubrum]
  misc_feature (25)..(368): Homolog of NCBI NO: 34907710 NR Description: putative RecA protein [Oryza sativa (japonica
MSKKEIALQQALDQITSSFGKGSIMYLGRAVSPRNVPVFSTGSFALDVALGVGGLPKGRVVEIYGPEASGKTTLALHVIAEAQKQGGTCVFVDAEHALDSSLAKAIGVNTENLLLSQPDCGEQALSLVDTLIRSGSVDVIVVDSVAALVPKGELEGEMGDAHMAMQARLMSQALRKLSHSLSLSQTLLIFINQVRSKLSTFGGFGGPTEVTCGGNALKFYASMRLNIKRIGLIKKGEETTGSQVSVKIVKNKLAPPFRTAQFELEFGKGICKITEIIDLSIKHKFIAKNGTFYNLNGKNYHGKEALKRFLKQNESDQEELMKKLQDKLIADEAADKETESESEEEDSLRVVVSPDNTDDESPALVVGAAAVVVEAA

SEQ ID NO: 20568 - protein, 352 aa, Arabidopsis thaliana
  peptide (1)..(352): Ceres Seq. ID no. 13646502
  misc_feature (1)..(306): Pfam Name: recA bacterial DNA recombination protein Pfam Description: recA bacterial DNA recombination protein
  misc_feature (1)..(296): Homolog of NCBI NO: 23016621 NR Description: hypothetical protein [Magnetospirillum
  misc_feature (1)..(311): Homolog of NCBI NO: 23502079 NR Description: recA protein [Brucella suis 1330]
  misc_feature (1)..(311): Homolog of NCBI NO: 17987070 NR Description: RECA PROTEIN [Brucella melitensis]
  misc_feature (1)..(320): Homolog of NCBI NO: 22961065 NR Description: hypothetical protein [Rhodopseudomonas palustris]
  misc_feature (1)..(320): Homolog of NCBI NO: 3219848 NR Description: RecA protein (Recombinase A)
  misc_feature (1)..(303): Homolog of NCBI NO: 585797 NR Description: RecA protein (Recombinase A)
  misc_feature (1)..(321): Homolog of NCBI NO: 29654363 NR Description: recA protein [Coxiella burnetii RSA 493]
  misc_feature (1)..(308): Homolog of NCBI NO: 22966246 NR Description: hypothetical protein [Rhodospirillum rubrum]
  misc_feature (1)..(344): Homolog of NCBI NO: 34907710 NR Description: putative RecA protein [Oryza sativa (japonica
  misc_feature (1)..(352): Homolog of NCBI NO: 15224783 NR Description: recA protein -related [Arabidopsis thaliana]
MYLGRAVSPRNVPVFSTGSFALDVALGVGGLPKGRVVEIYGPEASGKTTLALHVIAEAQKQGGTCVFVDAEHALDSSLAKAIGVNTENLLLSQPDCGEQALSLVDTLIRSGSVDVIVVDSVAALVPKGELEGEMGDAHMAMQARLMSQALRKLSHSLSLSQTLLIFINQVRSKLSTFGGFGGPTEVTCGGNALKFYASMRLNIKRIGLIKKGEETTGSQVSVKIVKNKLAPPFRTAQFELEFGKGICKITEIIDLSIKHKFIAKNGTFYNLNGKNYHGKEALKRFLKQNESDQEELMKKLQDKLIADEAADKETESESEEEDSLRVVVSPDNTDDESPALVVGAAAVVVEAA

SEQ ID NO: 20569 - DNA, 1391 bp, Arabidopsis thaliana
  misc_feature (1)..(1391): Ceres Seq. ID no. 14302793
acgattttgcctttgagttcatgtagtttacttaacttttgacgcaacgctacttcggaaagatctaaggatgaaattgttcataaaataagatcatctccctccgcttttctcttgaagtctctagtgtcttgcgtttttgaaatggcgatggtgaaaaactcctatatattattcgctcgtttatgcgtagagctttttcaagagcttccccctcttccatcagatgaatctcacggcgaaattacaactgtagagagacagtttttgcgtaattgtcaaatggagcttgaaaacttgtccctcaaaacagagctaccacttgtttatgttgatgaatcaaaatattggagattcatcaaaactgttagggttttggctgaggtttttaacaatatgaagactactcgaacaacacggaaaagtatcattcaggtgcttatgaatcccatcttaccatctgagagaagcaccgatacaatgaatttatttctgtccaccattgaaaaactagctgacttgcagttttctgatgaagatttcaatcagctttttcttcatttacagttggagaataagtacaatgacaaagtcgaagtgaagcttaggaaagaagcagaagatgcacttgctagaaaaattaaggaagtagtagatttgacggaacggttacttcaagtcgaagccttggagcaaaaacataaagcaaagttgcagcttaggacagaaactgaaaccgcggtagccatagaacgtgattatatgcgttggaaggctgaaattttcgagagcgaattcaacaatcaattggtactcaggagagaatcagaaattgcacttgataaagaaaggaaagagctggagggtattaaaaatctgcttgaaacttgtttcacaggacaaaagaacctgaaatcgcaggtgataacatggaaagacaagtacgaccaagagtcaagtattaggaaagaaaaagaggttgctctttctactaagaaactagaactcgagattttcaaacagctagccggatcgtacaaacaagatgcagatgcgatgcgacaagagagagacaatgctctcaaaacagtacaagagatagtggacgagcaacaacctccaccatcatttatctgccctatcacacaggatgtcatgaaaaatccacacatggctgctgatggattcacatacgaattagaagctattcaaaaatggattaacacaggtcacaggacgtcgccgatgactaatctcaaactttcacatttcagctttttccctaaccgagctctccgctctgcaattgaggagttgggacgttgattcttcttgtttttcaaaccggtttactcaagttgatattgggccgataatggacccatgaaacg

SEQ ID NO: 20570 - protein, 393 aa, Arabidopsis thaliana
  peptide (1)..(393): Ceres Seq. ID no. 14302794
  misc_feature (1)..(180): Pfam Name: MIF4G domain Pfam Description: MIF4G domain
  misc_feature (23)..(390): Homolog of NCBI NO: 25517986 NR Description: T1N6.4 protein - Arabidopsis thaliana
  misc_feature (117)..(390): Homolog of NCBI NO: 15223450 NR Description: hypothetical protein [Arabidopsis thaliana]
  misc_feature (210)..(393): Homolog of NCBI NO: 25404085 NR Description: hypothetical protein T6h22.17 [imported] -
  misc_feature (141)..(335): Homolog of NCBI NO: 15222827 NR Description: hypothetical protein [Arabidopsis thaliana]
  misc_feature (3)..(318): Homolog of NCBI NO: 15222827 NR Description: hypothetical protein [Arabidopsis thaliana]
  misc_feature (217)..(393): Homolog of NCBI NO: 8778318 NR Description: F14J16.34 [Arabidopsis thaliana]
  misc_feature (3)..(335): Homolog of NCBI NO: 25404087 NR Description: hypothetical protein T6h22.16 [imported] -
  misc_feature (14)..(393): Homolog of NCBI NO: 15222825 NR Description: middle domain of eukaryotic initiation factor 4G
  misc_feature (3)..(315): Homolog of NCBI NO: 15222825 NR Description: middle domain of eukaryotic initiation factor 4G
  misc_feature (1)..(315): Homolog of NCBI NO: 25404085 NR Description: hypothetical protein T6h22.17 [imported] -
MAMVKNSYILFARLCVELFQELPPLPSDESHGEITTVERQFLRNCQMELENLSLKTELPLVYVDESKYWRFIKTVRVLAEVFNNMKTTRTTRKSIIQVLMNPILPSERSTDTMNLFLSTIEKLADLQFSDEDFNQLFLHLQLENKYNDKVEVKLRKEAEDALARKIKEVVDLTERLLQVEALEQKHKAKLQLRTETETAVAIERDYMRWKAEIFESEFNNQLVLRRESEIALDKERKELEGIKNLLETCFTGQKNLKSQVITWKDKYDQESSIRKEKEVALSTKKLELEIFKQLAGSYKQDADAMRQERDNALKTVQEIVDEQQPPPSFICPITQDVMKNPHMAADGFTYELEAIQKWINTGHRTSPMTNLKLSHFSFFPNRALRSAIEELGR

SEQ ID NO: 20571 - protein, 391 aa, Arabidopsis thaliana
  peptide (1)..(391): Ceres Seq. ID no. 14302795
  misc_feature (1)..(178): Pfam Name: MIF4G domain Pfam Description: MIF4G domain
  misc_feature (21)..(388): Homolog of NCBI NO: 25517986 NR Description: T1N6.4 protein - Arabidopsis thaliana
  misc_feature (115)..(388): Homolog of NCBI NO: 15223450 NR Description: hypothetical protein [Arabidopsis thaliana]
  misc_feature (208)..(391): Homolog of NCBI NO: 25404085 NR Description: hypothetical protein T6h22.17 [imported] -
  misc_feature (139)..(333): Homolog of NCBI NO: 15222827 NR Description: hypothetical protein [Arabidopsis thaliana]
  misc_feature (1)..(316): Homolog of NCBI NO: 15222827 NR Description: hypothetical protein [Arabidopsis thaliana]
  misc_feature (215)..(391): Homolog of NCBI NO: 8778318 NR Description: F14J16.34 [Arabidopsis thaliana]
  misc_feature (1)..(333): Homolog of NCBI NO: 25404087 NR Description: hypothetical protein T6h22.16 [imported] -
  misc_feature (12)..(391): Homolog of NCBI NO: 15222825 NR Description: middle domain of eukaryotic initiation factor 4G
  misc_feature (1)..(313): Homolog of NCBI NO: 15222825 NR Description: middle domain of eukaryotic initiation factor 4G
  misc_feature (1)..(313): Homolog of NCBI NO: 25404085 NR Description: hypothetical protein T6h22.17 [imported] -
MVKNSYILFARLCVELFQELPPLPSDESHGEITTVERQFLRNCQMELENLSLKTELPLVYVDESKYWRFIKTVRVLAEVFNNMKTTRTTRKSIIQVLMNPILPSERSTDTMNLFLSTIEKLADLQFSDEDFNQLFLHLQLENKYNDKVEVKLRKEAEDALARKIKEVVDLTERLLQVEALEQKHKAKLQLRTETETAVAIERDYMRWKAEIFESEFNNQLVLRRESEIALDKERKELEGIKNLLETCFTGQKNLKSQVITWKDKYDQESSIRKEKEVALSTKKLELEIFKQLAGSYKQDADAMRQERDNALKTVQEIVDEQQPPPSFICPITQDVMKNPHMAADGFTYELEAIQKWINTGHRTSPMTNLKLSHFSFFPNRALRSAIEELGR

SEQ ID NO: 20572 - protein, 347 aa, Arabidopsis thaliana
  peptide (1)..(347): Ceres Seq. ID no. 14302796
  misc_feature (1)..(134): Pfam Name: MIF4G domain Pfam Description: MIF4G domain
  misc_feature (1)..(344): Homolog of NCBI NO: 25517986 NR Description: T1N6.4 protein - Arabidopsis thaliana
  misc_feature (71)..(344): Homolog of NCBI NO: 15223450 NR Description: hypothetical protein [Arabidopsis thaliana]
  misc_feature (164)..(347): Homolog of NCBI NO: 25404085 NR Description: hypothetical protein T6h22.17 [imported] -
  misc_feature (95)..(289): Homolog of NCBI NO: 15222827 NR Description: hypothetical protein [Arabidopsis thaliana]
  misc_feature (1)..(272): Homolog of NCBI NO: 15222827 NR Description: hypothetical protein [Arabidopsis thaliana]
  misc_feature (171)..(347): Homolog of NCBI NO: 8778318 NR Description: F14J16.34 [Arabidopsis thaliana]
  misc_feature (1)..(289): Homolog of NCBI NO: 25404087 NR Description: hypothetical protein T6h22.16 [imported] -
  misc_feature (1)..(347): Homolog of NCBI NO: 15222825 NR Description: middle domain of eukaryotic initiation factor 4G
  misc_feature (1)..(269): Homolog of NCBI NO: 15222825 NR Description: middle domain of eukaryotic initiation factor 4G
  misc_feature (1)..(269): Homolog of NCBI NO: 25404085 NR Description: hypothetical protein T6h22.17 [imported] -
MELENLSLKTELPLVYVDESKYWRFIKTVRVLAEVFNNMKTTRTTRKSIIQVLMNPILPSERSTDTMNLFLSTIEKLADLQFSDEDFNQLFLHLQLENKYNDKVEVKLRKEAEDALARKIKEVVDLTERLLQVEALEQKHKAKLQLRTETETAVAIERDYMRWKAEIFESEFNNQLVLRRESEIALDKERKELEGIKNLLETCFTGQKNLKSQVITWKDKYDQESSIRKEKEVALSTKKLELEIFKQLAGSYKQDADAMRQERDNALKTVQEIVDEQQPPPSFICPITQDVMKNPHMAADGFTYELEAIQKWINTGHRTSPMTNLKLSHFSFFPNRALRSAIEELGR

SEQ ID NO: 20573 - DNA, 3060 bp, Arabidopsis thaliana
  misc_feature (1)..(3060): Ceres Seq. ID no. 13593379
  misc_feature: MA Experiment ID: 20000173 Result: Down-regulated in Transcription
  misc_feature: MA Experiment 20000173 PARAMETER Experiment Name: At_42deg_Heat_P Parameter: Age (day) Value: 14
  misc_feature: MA Experiment 20000173 PARAMETER Experiment Name: At_42deg_Heat_P Parameter: Organism Value: A. thaliana
  misc_feature: MA Experiment 20000173 PARAMETER Experiment Name: At_42deg_Heat_P Parameter: Plant Line Value: WS
  misc_feature: MA Experiment 20000173 PARAMETER Experiment Name: At_42deg_Heat_P Parameter: Temperature (deg C) Value: 42 vs. 22
  misc_feature: MA Experiment 20000173 PARAMETER Experiment Name: At_42deg_Heat_P Parameter: Timepoint (hr) Value: 6
  misc_feature: MA Experiment 20000173 PARAMETER Experiment Name: At_42deg_Heat_P Parameter: Tissue Value: Aerial
  misc_feature: MA Experiment ID: 20000180 Result: Up-regulated in Transcription
  misc_feature: MA Experiment 20000180 PARAMETER Experiment Name: At_Germinating_Seeds_P Parameter: Age (hr) Value: 24 vs. 0
  misc_feature: MA Experiment 20000180 PARAMETER Experiment Name: At_Germinating_Seeds_P Parameter: Tissue Value: Germinating Seeds
  misc_feature: MA Experiment ID: 20001451 Result: Down-regulated in Transcription
  misc_feature: MA Experiment 20001451 PARAMETER Experiment Name: At_Far-red-induction_P Parameter: Age (day) Value: 7
  misc_feature: MA Experiment 20001451 PARAMETER Experiment Name: At_Far-red-induction_P Parameter: Light Value: Far-red vs. White
  misc_feature: MA Experiment 20001451 PARAMETER Experiment Name: At_Far-red-induction_P Parameter: Organism Value: A. thaliana
  misc_feature: MA Experiment 20001451 PARAMETER Experiment Name: At_Far-red-induction_P Parameter: Plant Line Value: Columbia
  misc_feature: MA Experiment 20001451 PARAMETER Experiment Name: At_Far-red-induction_P Parameter: Timepoint (hr) Value: 24
  misc_feature: MA Experiment 20001451 PARAMETER Experiment Name: At_Far-red-induction_P Parameter: Tissue Value: Whole Plant
gagagagagagagctcactagtccccccccccccccccccacttcaatggcagagtcaattcgaactttttcgcttcaatggcggatactgtcactgatcatcgctttacttgtgtactttccgattgtgtcgggaaattactttaaaccgttcaatgtgagctacgaccaccgggctttaatcatcgccggcaagaggcgcatgcttgtctcagctggaattcactaccctcgagccactcctgagatgtggtctgatctcatcgcaaagagtaaagaaggtggagctgatgtgattcaaacttatgtgttttggaatgggcacgagcctgtaaagggtcagtataactttgaaggaagatatgaccttgtcaaatttgtgaagcttattggttcaagtggtctttatctccatctacgcataggtccttatgtttgtgctgagtggaactttggggggttcccagtgtggctgcgggatattcctggcattgagtttcgaacagataatgaaccttttaagaaagagatgcaaaagtttgtaacaaagattgtggatttgatgcgagaagcaaagctcttctgttggcaaggaggtcccataatcatgctgcagatcgagaatgaatatggggatgttgaaaaatcttacgggcagaagggaaaggattacgtcaaatgggcagctagcatggctctagggcttggtgctggagttccgtgggttatgtgcaaacaaacggacgctccagagaatattattgatgcatgcaatggatactattgtgatggttttaaaccaaattcgcggacgaagccaatactttggacagaggattgggatggatggtacacgaagtggggtggaagtttgcctcaccgacctgctgaagatcttgcatttgcagttgcacgattttatcagcgtggaggaagctttcaaaattattatatgtattttggtggaacaaactttggtcgaacttctggtggtcctttctatatcacaagctatgattatgatgctcctcttgatgaatatggtctgaggagcgagccaaaatgggggcatctaaaggatcttcatgctgccataaaactttgtgaacctgcccttgtcgcggcagatgcacctcagtatagaaaactgggatcaaatcaggaggcacatatttatcatggcgatggtgagactggaggaaaggtgtgcgctgcatttctcgcaaacattgatgagcataaatctgcacatgtgaagtttaatggccagtcatatactttaccaccttggtcagtgagtgtattgccagactgtcgacatgtggccttcaacactgccaaggtaggagcacaaacttctgttaaaacagtgaagtctgcaaggccatctttaggtagtatgtctatactgcaaaaagtcgtgaggcaagataatgtttcttatatctcaaaatcatggatggctctgaaagaacctattggcatatggggtgaaaacaatttcactttccaaggattattggagcatttgaatgttacaaaagaccggtctgattacctgtggcataagacaagaataagcgtatctgaagatgatatctcgttctggaagataaatggagctaacccaacagtgtcaattgatagcatgagggatgtgttgcgtgtgtttgttaacaaacaactctcaggcagtattgttggtcactgggtgaaggcagtgcagcctgtacgatttatacagggaaacaatgatttacttctgttgactcaaacagttggtttacagaattatggtgctttcttggagaaggatggagccggttttagaggcaaagctaagcttactggattcaagaatggagatttagacctgtcaaaatcgtcatggacgtatcaggtgggattgaagggcgaggctgataaaatatatactgttgaacacaatgaaaaagctgagtggagtactttggagaccgacgcttcaccttcgatctttatgtggtacaagacatactttgaccccccagccggaacagatcctgttgttcttgatctggaaagtatgggaaaggggcaagcttgggtcaatggacaccatattggaaggtattggaatatcatttcccaaaaggatggatgtgacagaacctgtgattatcgtggagcctacaattcagataagtgcacaacaaattgtggaaagcctacacaaaccaggtaccatataccgcgttcgtggttaaagccgtccagtaatctacttgtgctctttgaagagactgggggaaacccatttaagatatcggttaagacagttactgctgggattctgtgcggtcaagtcttggaatcgcattacccacctctgcggaaatggtccacaccagattacataaacggaacgactttgataaacagtgtggcaccagaagtgcatctgcattgtgaagatggscatgtcatatcctccatagaatttgctagctatgggactccaagaggtagctgcgacgggttttctatcgggaaatgtcatgcatccaactcattatcaatcgtctctgaggcttgtaaaggacgcaacagctgcttcatcgaggtgtcaaatactgcttttatcagtgacccatgtagcggaactctaaagactttaacggttatggcacgatgttccccgtctcaaaacatgagtgacctcagtttttagacaccgggaagcggctcagaacgatgaacagctgtttctctaaaaaacaagagaccattgatattgattaaagaagaacatgtcccatcacaagctttctgtgacctttatatttcaaagtctgaactctgaacaattgtgtttgctcttgttcattggtgtatccaaactctacttggaaccaattaacagactcaaaaccatctctaaggtttctgcttgtacagtatgttgtttgaaatttgaatataagaaaatagtcgaagttgatgttaaaaaaaaaaaaaaaaaaaaaaaaaaaaaaaaaaagaaaaaaaaaaaaaaaaaaaactcgagggggggcccggtac

SEQ ID NO: 20574 - protein, 902 aa, Arabidopsis thaliana
  peptide (1)..(902): Ceres Seq. ID no. 15221218
  misc_feature (814)..(891): Pfam Name: Galactose binding lectin domain Pfam Description: Galactose binding lectin domain
  misc_feature (53)..(453): Homolog of NCBI NO: 20514290 NR Description: beta-galactosidase [Oryza sativa (japonica
  misc_feature (403)..(892): Homolog of NCBI NO: 20514290 NR Description: beta-galactosidase [Oryza sativa (japonica
  misc_feature (52)..(486): Homolog of NCBI NO: 20260596 NR Description: galactosidase, putative [Arabidopsis thaliana]
  misc_feature (403)..(892): Homolog of NCBI NO: 20260596 NR Description: galactosidase, putative [Arabidopsis thaliana]
  misc_feature (52)..(486): Homolog of NCBI NO: 15231354 NR Description: glycosyl hydrolase family 35 (beta-galactosidase)
  misc_feature (403)..(892): Homolog of NCBI NO: 15231354 NR Description: glycosyl hydrolase family 35 (beta-galactosidase)
  misc_feature (482)..(892): Homolog of NCBI NO: 25326167 NR Description: probable beta-galactosidase [imported] -
  misc_feature (33)..(466): Homolog of NCBI NO: 25326167 NR Description: probable beta-galactosidase [imported] -
  misc_feature (462)..(891): Homolog of NCBI NO: 14970841 NR Description: beta-galactosidase [Fragaria x ananassa]
  misc_feature (33)..(528): Homolog of NCBI NO: 14970841 NR Description: beta-galactosidase [Fragaria x ananassa]
  misc_feature (819)..(819): Xaa is any aa, unknown or other
RERELTSPPPPPPTSMAESIRTFSLQWRILSLIIALLVYFPIVSGNYFKPFNVSYDHRALIIAGKRRMLVSAGIHYPRATPEMWSDLIAKSKEGGADVIQTYVFWNGHEPVKGQYNFEGRYDLVKFVKLIGSSGLYLHLRIGPYVCAEWNFGGFPVWLRDIPGIEFRTDNEPFKKEMQKFVTKIVDLMREAKLFCWQGGPIIMLQIENEYGDVEKSYGQKGKDYVKWAASMALGLGAGVPWVMCKQTDAPENIIDACNGYYCDGFKPNSRTKPILWTEDWDGWYTKWGGSLPHRPAEDLAFAVARFYQRGGSFQNYYMYFGGTNFGRTSGGPFYITSYDYDAPLDEYGLRSEPKWGHLKDLHAAIKLCEPALVAADAPQYRKLGSNQEAHIYHGDGETGGKVCAAFLANIDEHKSAHVKFNGQSYTLPPWSVSVLPDCRHVAFNTAKVGAQTSVKTVKSARPSLGSMSILQKVVRQDNVSYISKSWMALKEPIGIWGENNFTFQGLLEHLNVTKDRSDYLWHKTRISVSEDDISFWKINGANPTVSIDSMRDVLRVFVNKQLSGSIVGHWVKAVQPVRFIQGNNDLLLLTQTVGLQNYGAFLEKDGAGFRGKAKLTGFKNGDLDLSKSSWTYQVGLKGEADKIYTVEHNEKAEWSTLETDASPSIFMWYKTYFDPPAGTDPVVLDLESMGKGQAWVNGHHIGRYWNIISQKDGCDRTCDYRGAYNSDKCTTNCGKPTQTRYHIPRSWLKPSSNLLVLFEETGGNPFKISVKTVTAGILCGQVLESHYPPLRKWSTPDYINGTTLINSVAPEVHLHCEDXHVISSIEFASYGTPRGSCDGFSIGKCHASNSLSIVSEACKGRNSCFIEVSNTAFISDPCSGTLKTLTVMARCSPSQNMSDLSF

SEQ ID NO: 20575 - protein, 887 aa, Arabidopsis thaliana
  peptide (1)..(887): Ceres Seq. ID no. 15221219
  misc_feature (799)..(876): Pfam Name: Galactose binding lectin domain Pfam Description: Galactose binding lectin domain
  misc_feature (38)..(438): Homolog of NCBI NO: 20514290 NR Description: beta-galactosidase [Oryza sativa (japonica
  misc_feature (388)..(877): Homolog of NCBI NO: 20514290 NR Description: beta-galactosidase [Oryza sativa (japonica
  misc_feature (37)..(471): Homolog of NCBI NO: 20260596 NR Description: galactosidase, putative [Arabidopsis thaliana]
  misc_feature (388)..(877): Homolog of NCBI NO: 20260596 NR Description: galactosidase, putative [Arabidopsis thaliana]
  misc_feature (37)..(471): Homolog of NCBI NO: 15231354 NR Description: glycosyl hydrolase family 35 (beta-galactosidase)
  misc_feature (388)..(877): Homolog of NCBI NO: 15231354 NR Description: glycosyl hydrolase family 35 (beta-galactosidase)
  misc_feature (467)..(877): Homolog of NCBI NO: 25326167 NR Description: probable beta-galactosidase [imported] -
  misc_feature (18)..(451): Homolog of NCBI NO: 25326167 NR Description: probable beta-galactosidase [imported] -
  misc_feature (447)..(876): Homolog of NCBI NO: 14970841 NR Description: beta-galactosidase [Fragaria x ananassa]
  misc_feature (18)..(513): Homolog of NCBI NO: 14970841 NR Description: beta-galactosidase [Fragaria x ananassa]
  misc_feature (804)..(804): Xaa is any aa, unknown or other
MAESIRTFSLQWRILSLIIALLVYFPIVSGNYFKPFNVSYDHRALIIAGKRRMLVSAGIHYPRATPEMWSDLIAKSKEGGADVIQTYVFWNGHEPVKGQYNFEGRYDLVKFVKLIGSSGLYLHLRIGPYVCAEWNFGGFPVWLRDIPGIEFRTDNEPFKKEMQKFVTKIVDLMREAKLFCWQGGPIIMLQIENEYGDVEKSYGQKGKDYVKWAASMALGLGAGVPWVMCKQTDAPENIIDACNGYYCDGFKPNSRTKPILWTEDWDGWYTKWGGSLPHRPAEDLAFAVARFYQRGGSFQNYYMYFGGTNFGRTSGGPFYITSYDYDAPLDEYGLRSEPKWGHLKDLHAAIKLCEPALVAADAPQYRKLGSNQEAHIYHGDGETGGKVCAAFLANIDEHKSAHVKFNGQSYTLPPWSVSVLPDCRHVAFNTAKVGAQTSVKTVKSARPSLGSMSILQKVVRQDNVSYISKSWMALKEPIGIWGENNFTFQGLLEHLNVTKDRSDYLWHKTRISVSEDDISFWKINGANPTVSIDSMRDVLRVFVNKQLSGSIVGHWVKAVQPVRFIQGNNDLLLLTQTVGLQNYGAFLEKDGAGFRGKAKLTGFKNGDLDLSKSSWTYQVGLKGEADKIYTVEHNEKAEWSTLETDASPSIFMWYKTYFDPPAGTDPVVLDLESMGKGQAWVNGHHIGRYWNIISQKDGCDRTCDYRGAYNSDKCTTNCGKPTQTRYHIPRSWLKPSSNLLVLFEETGGNPFKISVKTVTAGILCGQVLESHYPPLRKWSTPDYINGTTLINSVAPEVHLHCEDXHVISSIEFASYGTPRGSCDGFSIGKCHASNSLSIVSEACKGRNSCFIEVSNTAFISDPCSGTLKTLTVMARCSPSQNMSDLSF

SEQ ID NO: 20576 - protein, 835 aa, Arabidopsis thaliana
  peptide (1)..(835): Ceres Seq. ID no. 15221220
  misc_feature (747)..(824): Pfam Name: Galactose binding lectin domain Pfam Description: Galactose binding lectin domain
  misc_feature (1)..(386): Homolog of NCBI NO: 20514290 NR Description: beta-galactosidase [Oryza sativa (japonica
  misc_feature (336)..(825): Homolog of NCBI NO: 20514290 NR Description: beta-galactosidase [Oryza sativa (japonica
  misc_feature (1)..(419): Homolog of NCBI NO: 20260596 NR Description: galactosidase, putative [Arabidopsis thaliana]
  misc_feature (336)..(825): Homolog of NCBI NO: 20260596 NR Description: galactosidase, putative [Arabidopsis thaliana]
  misc_feature (1)..(419): Homolog of NCBI NO: 15231354 NR Description: glycosyl hydrolase family 35 (beta-galactosidase)
  misc_feature (336)..(825): Homolog of NCBI NO: 15231354 NR Description: glycosyl hydrolase family 35 (beta-galactosidase)
  misc_feature (415)..(825): Homolog of NCBI NO: 25326167 NR Description: probable beta-galactosidase [imported] -
  misc_feature (1)..(399): Homolog of NCBI NO: 25326167 NR Description: probable beta-galactosidase [imported] -
  misc_feature (395)..(824): Homolog of NCBI NO: 14970841 NR Description: beta-galactosidase [Fragaria x ananassa]
  misc_feature (1)..(461): Homolog of NCBI NO: 14970841 NR Description: beta-galactosidase [Fragaria x ananassa]
  misc_feature (752)..(752): Xaa is any aa, unknown or other
MLVSAGIHYPRATPEMWSDLIAKSKEGGADVIQTYVFWNGHEPVKGQYNFEGRYDLVKFVKLIGSSGLYLHLRIGPYVCAEWNFGGFPVWLRDIPGIEFRTDNEPFKKEMQKFVTKIVDLMREAKLFCWQGGPIIMLQIENEYGDVEKSYGQKGKDYVKWAASMALGLGAGVPWVMCKQTDAPENIIDACNGYYCDGFKPNSRTKPILWTEDWDGWYTKWGGSLPHRPAEDLAFAVARFYQRGGSFQNYYMYFGGTNFGRTSGGPFYITSYDYDAPLDEYGLRSEPKWGHLKDLHAAIKLCEPALVAADAPQYRKLGSNQEAHIYHGDGETGGKVCAAFLANIDEHKSAHVKFNGQSYTLPPWSVSVLPDCRHVAFNTAKVGAQTSVKTVKSARPSLGSMSILQKVVRQDNVSYISKSWMALKEPIGIWGENNFTFQGLLEHLNVTKDRSDYLWHKTRISVSEDDISFWKINGANPTVSIDSMRDVLRVFVNKQLSGSIVGHWVKAVQPVRFIQGNNDLLLLTQTVGLQNYGAFLEKDGAGFRGKAKLTGFKNGDLDLSKSSWTYQVGLKGEADKIYTVEHNEKAEWSTLETDASPSIFMWYKTYFDPPAGTDPVVLDLESMGKGQAWVNGHHIGRYWNIISQKDGCDRTCDYRGAYNSDKCTTNCGKPTQTRYHIPRSWLKPSSNLLVLFEETGGNPFKISVKTVTAGILCGQVLESHYPPLRKWSTPDYINGTTLINSVAPEVHLHCEDXHVISSIEFASYGTPRGSCDGFSIGKCHASNSLSIVSEACKGRNSCFIEVSNTAFISDPCSGTLKTLTVMARCSPSQNMSDLSF

SEQ ID NO: 20577 - DNA, 684 bp, Arabidopsis thaliana
  misc_feature (1)..(684): Ceres Seq. ID no. 13646615
ttgttcgagatgatccgagtacataaagcccgtcctgagcgacatgaccctcctcttcagcgtcaattgcgcaagttgtcccggtattgatcgactcagccattctcgacaagatgaagttcaccaacagcatcacacattccgctcttggactggtaaccattctaccaggcctcgctgttgcccagaactctggaaagttcaacgtcctcacttacaacgttgccggtctgccggcattcctcaacaacaacgaagttccaggagataaggcgacaaactcgcgactcattggagctgcgttgggcagagagggtcacgatattgttcatgtccaagaggacttcaactatcatgcctacatctacgagaccgacactcatcctgtcaggactcccacttctggaggagttcccttcggtgatggcctgaacacgctggccaactacgactatacgaccttcacccgcacgaagtggaacaagtgctctctcaactcaggtgactgcctgacgcccaagggcttcaccttcatgcgcatgcctaccatcggcttcgagcttcacctgtacaacctacacgcggacgctgggtaggttcatcgacaagcgtgtactggttcttcgactaatgaccatcttagctcgaacagcgacgatgtcgcagcgcgatctgcaggtatcg

SEQ ID NO: 20578 - protein, 160 aa, Arabidopsis thaliana
  peptide (1)..(160): Ceres Seq. ID no. 13646616
  misc_feature (31)..(160): Pfam Name: Endonuclease/Exonuclease/phosphatase family Pfam Description: Endonuclease/Exonuclease/phosphatase family
  misc_feature (9)..(160): Homolog of NCBI NO: 15840306 NR Description: hypothetical protein [Mycobacterium tuberculosis
  misc_feature (9)..(160): Homolog of NCBI NO: 15608028 NR Description: hypothetical protein Rv0888 [Mycobacterium
  misc_feature (1)..(160): Homolog of NCBI NO: 21244850 NR Description: conserved hypothetical protein
  misc_feature (11)..(160): Homolog of NCBI NO: 29833749 NR Description: hypothetical protein [Streptomyces avermitilis
  misc_feature (1)..(160): Homolog of NCBI NO: 32419931 NR Description: hypothetical protein [Neurospora crassa]
  misc_feature (10)..(160): Homolog of NCBI NO: 40747335 NR Description: hypothetical protein AN0392.2 [Aspergillus
MKFTNSITHSALGLVTILPGLAVAQNSGKFNVLTYNVAGLPAFLNNNEVPGDKATNSRLIGAALGREGHDIVHVQEDFNYHAYIYETDTHPVRTPTSGGVPFGDGLNTLANYDYTTFTRTKWNKCSLNSGDCLTPKGFTFMRMPTIGFELHLYNLHADAG

SEQ ID NO: 20579 - DNA, 2280 bp, Arabidopsis thaliana
  misc_feature (1)..(2280): Ceres Seq. ID no. 13646415
  misc_feature: MA Experiment ID: 20001450 Result: Up-regulated in Transcription
  misc_feature: MA Experiment 20001450 PARAMETER Experiment Name: At_Far-red-induction_P Parameter: Age (day) Value: 7
  misc_feature: MA Experiment 20001450 PARAMETER Experiment Name: At_Far-red-induction_P Parameter: Light Value: Far-red vs. White
  misc_feature: MA Experiment 20001450 PARAMETER Experiment Name: At_Far-red-induction_P Parameter: Organism Value: A. thaliana
  misc_feature: MA Experiment 20001450 PARAMETER Experiment Name: At_Far-red-induction_P Parameter: Plant Line Value: Columbia
  misc_feature: MA Experiment 20001450 PARAMETER Experiment Name: At_Far-red-induction_P Parameter: Timepoint (hr) Value: 8
  misc_feature: MA Experiment 20001450 PARAMETER Experiment Name: At_Far-red-induction_P Parameter: Tissue Value: Whole Plant
ccccgaatccgattcttagtcaattttttgaattcgtcaatcatattcttcttcttcttcttcctctgattcccccagaaaaaccctagcttcctccctcatttccccccaaatctcacgacttatttatgctcgggggagactaatcaaaggtcaaaatccattagggagggaatcgaatctcgatcgatctcaatttcttctgagaaaagaaaaaatgtcatcggagattgaggtggtggaagaaatccaatcgaatcccaaggagaatggggaatcgagttctaaagggattgaagaagagagcttgaagaacgatgtctatactgctgccgcttatggtgatttggagaagcttcatagattggttgagtgtgagggttcctctgtttccgagcctgatgctcttggctactatgctcttcagtggtctgccttgaacaaccgcgtcgccgttgcccagtaccttatcgagcatggtggagatgtaaacgcgacggatcatactggacagactgcattgcattggagtgctgttcgtggtgcgatacaagttgcagaactgttactacaagagggtgcaagagtagatgcaacggatatgtatggctatcaggcaacacatgttgccgcacagtatggccagactgcttttctttgtcacgttgtctcaaagtggaatgctgatcctgacgtgcctgataatgatggaagaagccccttgcattgggctgcatataaaggttttgcagattccattcgcctacttttatttctagatgcatatagaggacgacaagacaaagaaggttgcactcctctgcattgggctgccatccgaggtaatttggaggcttgcactgtcttggtgcaggctggaaagaaagaggatttgatgattactgacaagactgggctaacccctgcgcaacttgctgctgaaaagaatcacagacaagtttcctttttccttggtaatgctagaagcctgcttgaaaagcgttgcgacggaagcagtccccttggaagattgtcaaagttgggactcgctccagttctttggatcatgatcctgctgcttctgctcgtatatacaaattcggttgttttggcatccaatctgccaaagttaacgactgggattggtgcgcttgcatggctgggattcattcttgcaactgcaggattatttttgttttaccgctgtagcaggaaggatccaggttacatcagaatgaatatccatgatccgcaaaccatgaaagatgatgaaccacttttaaaaatagagctaaacaatcctgctttgcttgctgggaattggacacagctctgtgcaacatgcaagattatcagacctcttcgagctaagcactgttccacctgtgatcgttgtgtagagcaatttgatcaccattgtccatgggtatcaaattgtgttggaaaaaaaaacaagtgggaattttttctttttcttcttcttgaaghtctagcgatgctgataactggtggcgtcactcttgcaagaatcttgagtgacccttcagctccatcatcttttggagcatggatgagtcatgtcgctagtaatcatgtgggtgctttatcctttctgctagtggaattctgcctcttcttttctgtcgccgtcttaacagtcatacaagcgtctcagatatcaaggaacataaccacaaatgaaatggccaacgccctgcggtacagctacctaagaggtccaggtggtcggtttaggaatccttatgatctcgggtgcagaagaaactgctcggatttcttagtaaaaggttataacgaagatattgagtgtcatgaagaagacgcaacacagagaccagagggtattagcatgatgcagatgcagcggaatccaaatcttcaaaatggcaatggccatgttgctatcgatgttaacccgacacataattcacagtcagcacatgttcattctgccaactgcagccatagccataatagtaagtcaaagagtgacaatgttcctttgggtttgggacttggtcttagtcgcaacccaacccgacctgttgtatcgccataatatggcccgtgtcccaaatgtgcatttgtgttgtaagaaacacgtgttttctctcctcgagtcattgattacatcattatccgtttcatgtgaagatagtaatactcccttgttttcaattttctatgcaaaaattaaatgtcatgtttcttatcaaaaaaaaaaaaaaaaaaaactcgagggggggcccggtacccaat

SEQ ID NO: 20580 - protein, 620 aa, Arabidopsis thaliana
  peptide (1)..(620): Ceres Seq. ID no. 15219051
  misc_feature (373)..(421): Pfam Name: DHHC zinc finger domain Pfam Description: DHHC zinc finger domain
  misc_feature (9)..(529): Homolog of NCBI NO: 31237878 NR Description: ENSANGP00000021360 [Anopheles gambiae]
  misc_feature (33)..(529): Homolog of NCBI NO: 24583835 NR Description: CG6618-PA [Drosophila melanogaster]
  misc_feature (305)..(598): Homolog of NCBI NO: 40644806 NR Description: hypothetical protein KIAA0946 [Triticum aestivum]
  misc_feature (34)..(239): Homolog of NCBI NO: 21357959 NR Description: CG6017-PA [Drosophila melanogaster]
  misc_feature (58)..(421): Homolog of NCBI NO: 24583837 NR Description: CG6618-PB [Drosophila melanogaster]
  misc_feature (34)..(528): Homolog of NCBI NO: 31240727 NR Description: ENSANGP00000008882 [Anopheles gambiae]
  misc_feature (283)..(528): Homolog of NCBI NO: 21357959 NR Description: CG6017-PA [Drosophila melanogaster]
  misc_feature (58)..(421): Homolog of NCBI NO: 6002770 NR Description: patsas protein [Drosophila melanogaster]
  misc_feature (1)..(287): Homolog of NCBI NO: 15241327 NR Description: ankyrin repeat-containing protein [Arabidopsis
  misc_feature (84)..(620): Homolog of NCBI NO: 15241327 NR Description: ankyrin repeat-containing protein [Arabidopsis
  misc_feature (424)..(424): Xaa is any aa, unknown or other
MSSEIEVVEEIQSNPKENGESSSKGIEEESLKNDVYTAAAYGDLEKLHRLVECEGSSVSEPDALGYYALQWSALNNRVAVAQYLIEHGGDVNATDHTGQTALHWSAVRGAIQVAELLLQEGARVDATDMYGYQATHVAAQYGQTAFLCHVVSKWNADPDVPDNDGRSPLHWAAYKGFADSIRLLLFLDAYRGRQDKEGCTPLHWAAIRGNLEACTVLVQAGKKEDLMITDKTGLTPAQLAAEKNHRQVSFFLGNARSLLEKRCDGSSPLGRLSKLGLAPVLWIMILLLLLVYTNSVVLASNLPKLTTGIGALAWLGFILATAGLFLFYRCSRKDPGYIRMNIHDPQTMKDDEPLLKIELNNPALLAGNWTQLCATCKIIRPLRAKHCSTCDRCVEQFDHHCPWVSNCVGKKNKWEFFLFLLLEXLAMLITGGVTLARILSDPSAPSSFGAWMSHVASNHVGALSFLLVEFCLFFSVAVLTVIQASQISRNITTNEMANALRYSYLRGPGGRFRNPYDLGCRRNCSDFLVKGYNEDIECHEEDATQRPEGISMMQMQRNPNLQNGNGHVAIDVNPTHNSQSAHVHSANCSHSHNSKSKSDNVPLGLGLGLSRNPTRPVVSP

SEQ ID NO: 20581 - protein, 492 aa, Arabidopsis thaliana
  peptide (1)..(492): Ceres Seq. ID no. 15219052
  misc_feature (245)..(293): Pfam Name: DHHC zinc finger domain Pfam Description: DHHC zinc finger domain
  misc_feature (1)..(293): Homolog of NCBI NO: 6002770 NR Description: patsas protein [Drosophila melanogaster]
  misc_feature (1)..(111): Homolog of NCBI NO: 21357959 NR Description: CG6017-PA [Drosophila melanogaster]
  misc_feature (155)..(400): Homolog of NCBI NO: 21357959 NR Description: CG6017-PA [Drosophila melanogaster]
  misc_feature (1)..(293): Homolog of NCBI NO: 24583837 NR Description: CG6618-PB [Drosophila melanogaster]
  misc_feature (1)..(400): Homolog of NCBI NO: 31240727 NR Description: ENSANGP00000008882 [Anopheles gambiae]
  misc_feature (1)..(401): Homolog of NCBI NO: 31237878 NR Description: ENSANGP00000021360 [Anopheles gambiae]
  misc_feature (1)..(401): Homolog of NCBI NO: 24583835 NR Description: CG6618-PA [Drosophila melanogaster]
  misc_feature (177)..(470): Homolog of NCBI NO: 40644806 NR Description: hypothetical protein KIAA0946 [Triticum aestivum]
  misc_feature (1)..(159): Homolog of NCBI NO: 15241327 NR Description: ankyrin repeat-containing protein [Arabidopsis
  misc_feature (1)..(492): Homolog of NCBI NO: 15241327 NR Description: ankyrin repeat-containing protein [Arabidopsis
  misc_feature (296)..(296): Xaa is any aa, unknown or other
MYGYQATHVAAQYGQTAFLCHVVSKWNADPDVPDNDGRSPLHWAAYKGFADSIRLLLFLDAYRGRQDKEGCTPLHWAAIRGNLEACTVLVQAGKKEDLMITDKTGLTPAQLAAEKNHRQVSFFLGNARSLLEKRCDGSSPLGRLSKLGLAPVLWIMILLLLLVYTNSVVLASNLPKLTTGIGALAWLGFILATAGLFLFYRCSRKDPGYIRMNIHDPQTMKDDEPLLKIELNNPALLAGNWTQLCATCKIIRPLRAKHCSTCDRCVEQFDHHCPWVSNCVGKKNKWEFFLFLLLEXLAMLITGGVTLARILSDPSAPSSFGAWMSHVASNHVGALSFLLVEFCLFFSVAVLTVIQASQISRNITTNEMANALRYSYLRGPGGRFRNPYDLGCRRNCSDFLVKGYNEDIECHEEDATQRPEGISMMQMQRNPNLQNGNGHVAIDVNPTHNSQSAHVHSANCSHSHNSKSKSDNVPLGLGLGLSRNPTRPVVSP

SEQ ID NO: 20582 - protein, 394 aa, Arabidopsis thaliana
  peptide (1)..(394): Ceres Seq. ID no. 15219053
  misc_feature (147)..(195): Pfam Name: DHHC zinc finger domain Pfam Description: DHHC zinc finger domain
  misc_feature (1)..(195): Homolog of NCBI NO: 6002770 NR Description: patsas protein [Drosophila melanogaster]
  misc_feature (1)..(13): Homolog of NCBI NO: 21357959 NR Description: CG6017-PA [Drosophila melanogaster]
  misc_feature (57)..(302): Homolog of NCBI NO: 21357959 NR Description: CG6017-PA [Drosophila melanogaster]
  misc_feature (1)..(195): Homolog of NCBI NO: 24583837 NR Description: CG6618-PB [Drosophila melanogaster]
  misc_feature (1)..(302): Homolog of NCBI NO: 31240727 NR Description: ENSANGP00000008882 [Anopheles gambiae]
  misc_feature (1)..(303): Homolog of NCBI NO: 31237878 NR Description: ENSANGP00000021360 [Anopheles gambiae]
  misc_feature (1)..(303): Homolog of NCBI NO: 24583835 NR Description: CG6618-PA [Drosophila melanogaster]
  misc_feature (79)..(372): Homolog of NCBI NO: 40644806 NR Description: hypothetical protein KIAA0946 [Triticum aestivum]
  misc_feature (1)..(61): Homolog of NCBI NO: 15241327 NR Description: ankyrin repeat-containing protein [Arabidopsis
  misc_feature (1)..(394): Homolog of NCBI NO: 15241327 NR Description: ankyrin repeat-containing protein [Arabidopsis
  misc_feature (198)..(198): Xaa is any aa, unknown or other
MITDKTGLTPAQLAAEKNHRQVSFFLGNARSLLEKRCDGSSPLGRLSKLGLAPVLWIMILLLLLVYTNSVVLASNLPKLTTGIGALAWLGFILATAGLFLFYRCSRKDPGYIRMNIHDPQTMKDDEPLLKIELNNPALLAGNWTQLCATCKIIRPLRAKHCSTCDRCVEQFDHHCPWVSNCVGKKNKWEFFLFLLLEXLAMLITGGVTLARILSDPSAPSSFGAWMSHVASNHVGALSFLLVEFCLFFSVAVLTVIQASQISRNITTNEMANALRYSYLRGPGGRFRNPYDLGCRRNCSDFLVKGYNEDIECHEEDATQRPEGISMMQMQRNPNLQNGNGHVAIDVNPTHNSQSAHVHSANCSHSHNSKSKSDNVPLGLGLGLSRNPTRPVVSP

SEQ ID NO: 20583 - DNA, 2085 bp, Arabidopsis thaliana
  misc_feature (1)..(2085): Ceres Seq. ID no. 14309934
ttctcctgttctaactgaggggtcgaggacaaagctcctcattgagttctccttcagtggggtttgatgcgaggtgctgccaaggtcatttcctcttgctgtgctccgcctctcgttcagataaagcggtcgggataagtttgtaaattgcttgtcaaatcaggacaagattctgaattaggggaacctaccgcatagtttgctcatcagacaggccgaaggacaatgtcatcgcctaacaattctgtcagcgcggcactgtcagaaacgacccccgtgtttcagttgagagtatggcaactgattgccattgctgtcgggatagtcatggcgatcctgctcgtcattgcgctttgcctttcgctccagaggaaaaagaagacagtgaaagggtttgacaacagttcgctggctgagatccctatcgtttctaaggaaatcaatgttgacagagttggtgctcagagtctacatgacagtgaagcgcccttcatgccagtgcgggataagtatacgcagaccaaaggtgcagggcagttgggagagagtagatccgtcgacgccgataccttcagccagttcagctcagtgtacaacgtagagaaggctgggagctcatactctgaagattacagtcacagcagctctggtccagctaggaaaggtagctcaccatatgcatattcagcatcaccgctggttggcctgcctgagttatcacatctaggctggggccactggtttaccttgagggacctggagtgtgcaacgaatcggtttgcaaagagtaatgttcttggggagggtggctatggagttgtctacaagggtcgtctggtaaatgggaccgagattgccgtgaagaagatccttaataatctggggcaggcagagaaggaatttagagttgaagttgaagccatcggccatgttcggcataagaatctggtccgccttctgggatactgcgtggaagggatacataggatgcttgtctatgaatatgtcaataatggcaacctagaacaatggcttcatggcatgaatcaacacggtgtccttagttgggaaaatcgtatgaaaattctccttggcactgcaaaagctctcgcgtaccttcatgaggccatagatcccaaagttgtacacagagatatcaagtcaagtaatatcttaattgacgatgaattcaacagcaaggtttctgattttgggttggctaaacttctgaattctgacaaaagtcatatcaatacaagagtgatgggaacatatgggtatgtagcacctgaatatgcaaacagtgggatgctaaatgaaaagagtgatatttacagtttcggagtggtgctgttagaatgtgcgaccgctagggatccagtcgattactctaagcctgcagatgaggtgaatctcatagagtggcttaaaatgatggtcaccagtaagagggcagaggaggtagtggatccaaacctcaatgttaagccaccaaaacgtgccctcaagcggacaatcctggttggtttcaagtgtgtcgatcctgacgctgacaagaggccaaagatgagtcacgttgtccagatgcttgaagcagttcagaatgcatatcatgaagatcaaagcaagctcagccaggtgggatcacagcagtcgctagaggagacctcaaacagcgctgatgcctgaacctcctattctgaacaagcacatcaaataggaccctgaatcatctgatagcaacattgatttgatcattgctcggcacttaatagagtgagcggtgatcggatttacagtttgggtttgcatatactggaggtggtggttaaatcaattagtagcaagttgtttctaaaaggttcatgtcttttacccttaggatatgtatagttttcctgtaggggagcatagaagcaccttcatctttatttgttgttcgagttacaaggagggactaacctcaggcatataactacagtcactggatttcgttacccatgtgtagtgactttttggaaagtcgttattaccctagagatatgaaaacatgaatttctgcaatgaagtactaccccgttctcg

SEQ ID NO: 20584 - protein, 487 aa, Arabidopsis thaliana
  peptide (1)..(487): Ceres Seq. ID no. 14309935
  misc_feature (21)..(480): Homolog of NCBI NO: 15217511 NR Description: protein kinase family [Arabidopsis thaliana]
  misc_feature (1)..(457): Homolog of NCBI NO: 34912364 NR Description: putative receptor-like protein kinase
  misc_feature (8)..(487): Homolog of NCBI NO: 25404144 NR Description: probable protein kinase F25P12.84
  misc_feature (8)..(487): Homolog of NCBI NO: 18405946 NR Description: protein kinase family [Arabidopsis thaliana]
  misc_feature (8)..(487): Homolog of NCBI NO: 21593085 NR Description: Putative protein kinase [Arabidopsis thaliana]
  misc_feature (2)..(486): Homolog of NCBI NO: 34894708 NR Description: Putative protein kinase [Oryza sativa (japonica
  misc_feature (1)..(486): Homolog of NCBI NO: 15231637 NR Description: protein kinase family [Arabidopsis thaliana]
  misc_feature (4)..(484): Homolog of NCBI NO: 15228043 NR Description: protein kinase family [Arabidopsis thaliana]
  misc_feature (3)..(487): Homolog of NCBI NO: 37535714 NR Description: putative kinase [Oryza sativa (japonica
  misc_feature (1)..(487): Homolog of NCBI NO: 34910880 NR Description: P0003E08.6 [Oryza sativa (japonica
MSSPNNSVSAALSETTPVFQLRVWQLIAIAVGIVMAILLVIALCLSLQRKKKTVKGFDNSSLAEIPIVSKEINVDRVGAQSLHDSEAPFMPVRDKYTQTKGAGQLGESRSVDADTFSQFSSVYNVEKAGSSYSEDYSHSSSGPARKGSSPYAYSASPLVGLPELSHLGWGHWFTLRDLECATNRFAKSNVLGEGGYGVVYKGRLVNGTEIAVKKILNNLGQAEKEFRVEVEAIGHVRHKNLVRLLGYCVEGIHRMLVYEYVNNGNLEQWLHGMNQHGVLSWENRMKILLGTAKALAYLHEAIDPKVVHRDIKSSNILIDDEFNSKVSDFGLAKLLNSDKSHINTRVMGTYGYVAPEYANSGMLNEKSDIYSFGVVLLECATARDPVDYSKPADEVNLIEWLKMMVTSKRAEEVVDPNLNVKPPKRALKRTILVGFKCVDPDADKRPKMSHVVQMLEAVQNAYHEDQSKLSQVGSQQSLEETSNSADA

SEQ ID NO: 20585 - protein, 453 aa, Arabidopsis thaliana
  peptide (1)..(453): Ceres Seq. ID no. 14309936
  misc_feature (1)..(446): Homolog of NCBI NO: 15217511 NR Description: protein kinase family [Arabidopsis thaliana]
  misc_feature (1)..(423): Homolog of NCBI NO: 34912364 NR Description: putative receptor-like protein kinase
  misc_feature (1)..(453): Homolog of NCBI NO: 25404144 NR Description: probable protein kinase F25P12.84
  misc_feature (1)..(453): Homolog of NCBI NO: 18405946 NR Description: protein kinase family [Arabidopsis thaliana]
  misc_feature (1)..(453): Homolog of NCBI NO: 21593085 NR Description: Putative protein kinase [Arabidopsis thaliana]
  misc_feature (1)..(452): Homolog of NCBI NO: 34894708 NR Description: Putative protein kinase [Oryza sativa (japonica
  misc_feature (1)..(452): Homolog of NCBI NO: 15231637 NR Description: protein kinase family [Arabidopsis thaliana]
  misc_feature (1)..(450): Homolog of NCBI NO: 15228043 NR Description: protein kinase family [Arabidopsis thaliana]
  misc_feature (1)..(453): Homolog of NCBI NO: 37535714 NR Description: putative kinase [Oryza sativa (japonica
  misc_feature (1)..(453): Homolog of NCBI NO: 34910880 NR Description: P0003E08.6 [Oryza sativa (japonica
MAILLVIALCLSLQRKKKTVKGFDNSSLAEIPIVSKEINVDRVGAQSLHDSEAPFMPVRDKYTQTKGAGQLGESRSVDADTFSQFSSVYNVEKAGSSYSEDYSHSSSGPARKGSSPYAYSASPLVGLPELSHLGWGHWFTLRDLECATNRFAKSNVLGEGGYGVVYKGRLVNGTEIAVKKILNNLGQAEKEFRVEVEAIGHVRHKNLVRLLGYCVEGIHRMLVYEYVNNGNLEQWLHGMNQHGVLSWENRMKILLGTAKALAYLHEAIDPKVVHRDIKSSNILIDDEFNSKVSDFGLAKLLNSDKSHINTRVMGTYGYVAPEYANSGMLNEKSDIYSFGVVLLECATARDPVDYSKPADEVNLIEWLKMMVTSKRAEEVVDPNLNVKPPKRALKRTILVGFKCVDPDADKRPKMSHVVQMLEAVQNAYHEDQSKLSQVGSQQSLEETSNSADA

SEQ ID NO: 20586 - protein, 398 aa, Arabidopsis thaliana
  peptide (1)..(398): Ceres Seq. ID no. 14309937
  misc_feature (1)..(391): Homolog of NCBI NO: 15217511 NR Description: protein kinase family [Arabidopsis thaliana]
  misc_feature (1)..(368): Homolog of NCBI NO: 34912364 NR Description: putative receptor-like protein kinase
  misc_feature (1)..(398): Homolog of NCBI NO: 25404144 NR Description: probable protein kinase F25P12.84
  misc_feature (1)..(398): Homolog of NCBI NO: 18405946 NR Description: protein kinase family [Arabidopsis thaliana]
  misc_feature (1)..(398): Homolog of NCBI NO: 21593085 NR Description: Putative protein kinase [Arabidopsis thaliana]
  misc_feature (1)..(397): Homolog of NCBI NO: 34894708 NR Description: Putative protein kinase [Oryza sativa (japonica
  misc_feature (1)..(397): Homolog of NCBI NO: 15231637 NR Description: protein kinase family [Arabidopsis thaliana]
  misc_feature (1)..(395): Homolog of NCBI NO: 15228043 NR Description: protein kinase family [Arabidopsis thaliana]
  misc_feature (1)..(398): Homolog of NCBI NO: 37535714 NR Description: putative kinase [Oryza sativa (japonica
  misc_feature (1)..(398): Homolog of NCBI NO: 34910880 NR Description: P0003E08.6 [Oryza sativa (japonica
MPVRDKYTQTKGAGQLGESRSVDADTFSQFSSVYNVEKAGSSYSEDYSHSSSGPARKGSSPYAYSASPLVGLPELSHLGWGHWFTLRDLECATNRFAKSNVLGEGGYGVVYKGRLVNGTEIAVKKILNNLGQAEKEFRVEVEAIGHVRHKNLVRLLGYCVEGIHRMLVYEYVNNGNLEQWLHGMNQHGVLSWENRMKILLGTAKALAYLHEAIDPKVVHRDIKSSNILIDDEFNSKVSDFGLAKLLNSDKSHINTRVMGTYGYVAPEYANSGMLNEKSDIYSFGVVLLECATARDPVDYSKPADEVNLIEWLKMMVTSKRAEEVVDPNLNVKPPKRALKRTILVGFKCVDPDADKRPKMSHVVQMLEAVQNAYHEDQSKLSQVGSQQSLEETSNSADA

SEQ ID NO: 20587 - DNA, 3300 bp, Arabidopsis thaliana
  misc_feature (1)..(3300): Ceres Seq. ID no. 15168977
attcccagtcatctccactctccagcagtcctcacgttccttctctctctcccccccgctttaggtttgcctgtgttgggtagagtcgtatagcgaggagaagaggcttggtgccaagaaactggcatttcgatttggggagtggctaaattcgtcgctgtggaatcatggttctggagtcgtacacaaatctgctagatatgtgttgtgaagatgtgtttgacttccaacaacctttaagatctcttcgtcatgtggtgaactctcctggcatcatatctgaccctgattgggaaagtagtaatgatggcaactcagttggttctatgcctttttgttttaagagaaagattattgttgcaaatttccttcctgtgatctgtgcaaaaaatgaagctaccggagaatggtcctttgccatggatgataatcaactgcttgttcaactcaaagatggttttccaattgataatgaagttatttatgtgggtagtttgaatgttcaagttgatcctattgagcaagatcgagtttctcagaagctcttcaaggaacacagatgcgtacctacctttctcccagctgaactccagcatcaattctatcacatattctgcaaacagcacttatggccacttttccattatatgcttcctgtttgtcatgacaaagatgagctctttgaccgttcactttttcaagcctacgtgcgggccaacaaaatttttgctggcaaaattgtggaggcagtcaattcggatgatgattgtgtgtgggttcatgattatcacctcatgcttatcccaacccttttaagaaagaaactgcaccggatcaaagttggtttcttcctccacagcccatttccctcgtctgagatctataggacactgccagtgcgggatgaaattctaaaatcacttcttaatgctgacctcattggctttcaaacttttgactatgcccgccacttcctttcatgttgcagcaggcttttaggccttaattatgagtccaaacgtggccacataggtatagagtacttcggccgaacagtgagcctcaagattcttgctgcaggtgtacatgttggccggcttgaggctacattgaagttgcctgctacaattaaaaaggttcaagaaattgagagtagatatagtggcaagttggtaatattaggtgtagatgacatggacatctttaaaggtatcagtctaaaactgcttggcttggagcttcttctggaaagaacacctaagcttcgaggcaaggttgtccttgtacagattgttaatcctgcaagaagcatcggaaaagacattgaggaagcgaaatatgaagctgtatctgtagctcaaaggataaatgataaatatggttctgctaattacaagcctgttgtcctcattgactactcaatacctttctatgaaaagattgcattttatgctgcatctgactgctgtattgtaaatgctgtgagggatggcatgaatttgataccgtatgagtacaccgtatgcaggcagggcaatgaggagcttgataagctcagaggtcttaataagagctcatctcacacaagcacacttattgtgtctgaatttgtgggttgctctccatcacttagtggagcattcagggtaaatccttggagtatggaagatgtggctgatgcattatatagtgtaacagacctgacacgatatgagaagaatctgcgccatgaaaagcactatcgctatgtcaggtctcatgatgttgcttactgggcacgcagctttgaccaggatctggataaagcatgcatagagcaatacagccaaagatgttggacaactgggtttggtttaaattttagagttattgccctttcacctgggtttagaagactgtctctagaacacctagcctcgtcttataagaaggctaacaggaggatgatattcctggactacgatgggacccttgtgccgcagacatcacacgacaaatctccaagcgctgaacttatctctacccttaacagcttgtgcagtgatatgaagaacacagtatttatagtcagcgggcgaggaagagattccctaagcgagtggtttgcttcatgcgagaacctcggtatcgctgccgaacatggttactttatcagatggaacaaagcagctgaatgggagacaagcttctcaggtatttattctgaatggaagctcatcgcggaccctatcatgcatgtatacgtggaaacaactgatgggtccttcatagagccaaaagagagcgctttggtatggcactatcagaacacggatcatgactttggctcgtgccaggcaaaggagctagtgagccatcttgagcgagtcctatcgaacgaacctgttgtcgtgaggcgtggccatcagatcgtagaagttaaacctcagggagttagcaaggggatttccgtggacaagatcatccggaccttggtcagcaaaggggaagtaccagaccttttgatgtgcatcggaaacgatcggtcggacgaggacatgttcgagagcatcaacagagccacctccatttccgagcttcctgccgctccagaagtattcgcctgttccgttggccccaaggacagcaaggcaaactactacgtcgatggctgcgacgaagtaatcagactgctgaagggtgtcacagccgtttcgctccaaaaggatactgccggacatagccatgcggccttcgaggatacgcttgaggttgtcagctgatccacacaagtagtcagtcagctcaaactagctacgtccagtgtgttcaacgtgccaatctcaaatctccactgcatgcaagctactcatcactccaaaccatatgtgccaagtggaactctaaattggacggggacaagtatcgccattgctgacacagagagaacagcggtcacaaactgcaagttcgagcgaatggcgtcgcggttgatgattcactgacgacaacggaaatcacaaaccgcaagttttcaattcgtaggctaagacaactagtgggacgccatacattttgtaggcggctgatctggtggtgaaagggtggatgtccctgctagagccccagcttacggcatctgggagagccttggaagttggaccccgacgcttgtgctgcactgaggactgttacactattttctttgtacagaacaaacaggtgtggttaggcgattagcgctgtgacgattgattgtaattcacccacgtaccattgaggaaattaatggctgcgatggtgaagcgccgtgcgaatggc

SEQ ID NO: 20588 - protein, 864 aa, Arabidopsis thaliana
  peptide (1)..(864): Ceres Seq. ID no. 15168978
  misc_feature (59)..(546): Pfam Name: Glycosyltransferase family 20 Pfam Description: Glycosyltransferase family 20
  misc_feature (60)..(839): Homolog of NCBI NO: 34909526 NR Description: putative trehalose-6-phosphate synthase homolog
  misc_feature (1)..(843): Homolog of NCBI NO: 34902280 NR Description: Putative trehalose-6-phosphate synthase
  misc_feature (4)..(843): Homolog of NCBI NO: 15224213 NR Description: glycosyltransferase family 20 [Arabidopsis
  misc_feature (1)..(843): Homolog of NCBI NO: 7488400 NR Description: trehalose-6-phosphate synthase homolog DL4920W -
  misc_feature (1)..(845): Homolog of NCBI NO: 25347119 NR Description: hypothetical protein T23K23.13 [imported] -
  misc_feature (1)..(843): Homolog of NCBI NO: 18414960 NR Description: trehalose phosphatase family [Arabidopsis
  misc_feature (34)..(857): Homolog of NCBI NO: 7488401 NR Description: trehalose-6-phosphate synthase homolog F17O7.18 -
  misc_feature (1)..(857): Homolog of NCBI NO: 30698024 NR Description: alpha,alpha-trehalose-phosphate synthase, (trehalose-6-phosphate synthase/UDP-glucose-glucosephosphate
  misc_feature (4)..(860): Homolog of NCBI NO: 15219002 NR Description: trehalose phosphatase family [Arabidopsis
  misc_feature (1)..(860): Homolog of NCBI NO: 15220891 NR Description: trehalose phosphatase family [Arabidopsis
MVLESYTNLLDMCCEDVFDFQQPLRSLRHVVNSPGIISDPDWESSNDGNSVGSMPFCFKRKIIVANFLPVICAKNEATGEWSFAMDDNQLLVQLKDGFPIDNEVIYVGSLNVQVDPIEQDRVSQKLFKEHRCVPTFLPAELQHQFYHIFCKQHLWPLFHYMLPVCHDKDELFDRSLFQAYVRANKIFAGKIVEAVNSDDDCVWVHDYHLMLIPTLLRKKLHRIKVGFFLHSPFPSSEIYRTLPVRDEILKSLLNADLIGFQTFDYARHFLSCCSRLLGLNYESKRGHIGIEYFGRTVSLKILAAGVHVGRLEATLKLPATIKKVQEIESRYSGKLVILGVDDMDIFKGISLKLLGLELLLERTPKLRGKVVLVQIVNPARSIGKDIEEAKYEAVSVAQRINDKYGSANYKPVVLIDYSIPFYEKIAFYAASDCCIVNAVRDGMNLIPYEYTVCRQGNEELDKLRGLNKSSSHTSTLIVSEFVGCSPSLSGAFRVNPWSMEDVADALYSVTDLTRYEKNLRHEKHYRYVRSHDVAYWARSFDQDLDKACIEQYSQRCWTTGFGLNFRVIALSPGFRRLSLEHLASSYKKANRRMIFLDYDGTLVPQTSHDKSPSAELISTLNSLCSDMKNTVFIVSGRGRDSLSEWFASCENLGIAAEHGYFIRWNKAAEWETSFSGIYSEWKLIADPIMHVYVETTDGSFIEPKESALVWHYQNTDHDFGSCQAKELVSHLERVLSNEPVVVRRGHQIVEVKPQGVSKGISVDKIIRTLVSKGEVPDLLMCIGNDRSDEDMFESINRATSISELPAAPEVFACSVGPKDSKANYYVDGCDEVIRLLKGVTAVSLQKDTAGHSHAAFEDTLEVVS

SEQ ID NO: 20589 - protein, 853 aa, Arabidopsis thaliana
  peptide (1)..(853): Ceres Seq. ID no. 15168979
  misc_feature (48)..(535): Pfam Name: Glycosyltransferase family 20 Pfam Description: Glycosyltransferase family 20
  misc_feature (1)..(832): Homolog of NCBI NO: 15224213 NR Description: glycosyltransferase family 20 [Arabidopsis
  misc_feature (1)..(832): Homolog of NCBI NO: 7488400 NR Description: trehalose-6-phosphate synthase homolog DL4920W -
  misc_feature (1)..(834): Homolog of NCBI NO: 25347119 NR Description: hypothetical protein T23K23.13 [imported] -
  misc_feature (1)..(832): Homolog of NCBI NO: 18414960 NR Description: trehalose phosphatase family [Arabidopsis
  misc_feature (49)..(828): Homolog of NCBI NO: 34909526 NR Description: putative trehalose-6-phosphate synthase homolog
  misc_feature (1)..(832): Homolog of NCBI NO: 34902280 NR Description: Putative trehalose-6-phosphate synthase
  misc_feature (23)..(846): Homolog of NCBI NO: 7488401 NR Description: trehalose-6-phosphate synthase homolog F17O7.18 -
  misc_feature (1)..(846): Homolog of NCBI NO: 30698024 NR Description: alpha,alpha-trehalose-phosphate synthase, (trehalose-6-phosphate synthase/UDP-glucose-glucosephosphate
  misc_feature (1)..(849): Homolog of NCBI NO: 15219002 NR Description: trehalose phosphatase family [Arabidopsis
  misc_feature (1)..(849): Homolog of NCBI NO: 15220891 NR Description: trehalose phosphatase family [Arabidopsis
MCCEDVFDFQQPLRSLRHVVNSPGIISDPDWESSNDGNSVGSMPFCFKRKIIVANFLPVICAKNEATGEWSFAMDDNQLLVQLKDGFPIDNEVIYVGSLNVQVDPIEQDRVSQKLFKEHRCVPTFLPAELQHQFYHIFCKQHLWPLFHYMLPVCHDKDELFDRSLFQAYVRANKIFAGKIVEAVNSDDDCVWVHDYHLMLIPTLLRKKLHRIKVGFFLHSPFPSSEIYRTLPVRDEILKSLLNADLIGFQTFDYARHFLSCCSRLLGLNYESKRGHIGIEYFGRTVSLKILAAGVHVGRLEATLKLPATIKKVQEIESRYSGKLVILGVDDMDIFKGISLKLLGLELLLERTPKLRGKVVLVQIVNPARSIGKDIEEAKYEAVSVAQRINDKYGSANYKPVVLIDYSIPFYEKIAFYAASDCCIVNAVRDGMNLIPYEYTVCRQGNEELDKLRGLNKSSSHTSTLIVSEFVGCSPSLSGAFRVNPWSMEDVADALYSVTDLTRYEKNLRHEKHYRYVRSHDVAYWARSFDQDLDKACIEQYSQRCWTTGFGLNFRVIALSPGFRRLSLEHLASSYKKANRRMIFLDYDGTLVPQTSHDKSPSAELISTLNSLCSDMKNTVFIVSGRGRDSLSEWFASCENLGIAAEHGYFIRWNKAAEWETSFSGIYSEWKLIADPIMHVYVETTDGSFIEPKESALVWHYQNTDHDFGSCQAKELVSHLERVLSNEPVVVRRGHQIVEVKPQGVSKGISVDKIIRTLVSKGEVPDLLMCIGNDRSDEDMFESINRATSISELPAAPEVFACSVGPKDSKANYYVDGCDEVIRLLKGVTAVSLQKDTAGHSHAAFEDTLEVVS

SEQ ID NO: 20590 - protein, 811 aa, Arabidopsis thaliana
  peptide (1)..(811): Ceres Seq. ID no. 15168980
  misc_feature (6)..(493): Pfam Name: Glycosyltransferase family 20 Pfam Description: Glycosyltransferase family 20
  misc_feature (7)..(786): Homolog of NCBI NO: 34909526 NR Description: putative trehalose-6-phosphate synthase homolog
  misc_feature (1)..(790): Homolog of NCBI NO: 34902280 NR Description: Putative trehalose-6-phosphate synthase
  misc_feature (1)..(790): Homolog of NCBI NO: 15224213 NR Description: glycosyltransferase family 20 [Arabidopsis
  misc_feature (1)..(790): Homolog of NCBI NO: 7488400 NR Description: trehalose-6-phosphate synthase homolog DL4920W -
  misc_feature (1)..(792): Homolog of NCBI NO: 25347119 NR Description: hypothetical protein T23K23.13 [imported] -
  misc_feature (1)..(790): Homolog of NCBI NO: 18414960 NR Description: trehalose phosphatase family [Arabidopsis
  misc_feature (1)..(804): Homolog of NCBI NO: 7488401 NR Description: trehalose-6-phosphate synthase homolog F17O7.18 -
  misc_feature (1)..(804): Homolog of NCBI NO: 30698024 NR Description: alpha,alpha-trehalose-phosphate synthase, (trehalose-6-phosphate synthase/UDP-glucose-glucosephosphate
  misc_feature (1)..(807): Homolog of NCBI NO: 15219002 NR Description: trehalose phosphatase family [Arabidopsis
  misc_feature (1)..(807): Homolog of NCBI NO: 15220891 NR Description: trehalose phosphatase family [Arabidopsis
MPFCFKRKIIVANFLPVICAKNEATGEWSFAMDDNQLLVQLKDGFPIDNEVIYVGSLNVQVDPIEQDRVSQKLFKEHRCVPTFLPAELQHQFYHIFCKQHLWPLFHYMLPVCHDKDELFDRSLFQAYVRANKIFAGKIVEAVNSDDDCVWVHDYHLMLIPTLLRKKLHRIKVGFFLHSPFPSSEIYRTLPVRDEILKSLLNADLIGFQTFDYARHFLSCCSRLLGLNYESKRGHIGIEYFGRTVSLKILAAGVHVGRLEATLKLPATIKKVQEIESRYSGKLVILGVDDMDIFKGISLKLLGLELLLERTPKLRGKVVLVQIVNPARSIGKDIEEAKYEAVSVAQRINDKYGSANYKPVVLIDYSIPFYEKIAFYAASDCCIVNAVRDGMNLIPYEYTVCRQGNEELDKLRGLNKSSSHTSTLIVSEFVGCSPSLSGAFRVNPWSMEDVADALYSVTDLTRYEKNLRHEKHYRYVRSHDVAYWARSFDQDLDKACIEQYSQRCWTTGFGLNFRVIALSPGFRRLSLEHLASSYKKANRRMIFLDYDGTLVPQTSHDKSPSAELISTLNSLCSDMKNTVFIVSGRGRDSLSEWFASCENLGIAAEHGYFIRWNKAAEWETSFSGIYSEWKLIADPIMHVYVETTDGSFIEPKESALVWHYQNTDHDFGSCQAKELVSHLERVLSNEPVVVRRGHQIVEVKPQGVSKGISVDKIIRTLVSKGEVPDLLMCIGNDRSDEDMFESINRATSISELPAAPEVFACSVGPKDSKANYYVDGCDEVIRLLKGVTAVSLQKDTAGHSHAAFEDTLEVVS

SEQ ID NO: 20591 - DNA, 2573 bp, Arabidopsis thaliana
  misc_feature (1)..(2573): Ceres Seq. ID no. 14310097
  misc_feature: MA Experiment ID: 20000307 Result: Up-regulated in Transcription
  misc_feature: MA Experiment 20000307 PARAMETER Experiment Name: At_Germinating_Seeds_Sub_P Parameter: Age (hr) Value: 24 vs. 0
  misc_feature: MA Experiment 20000307 PARAMETER Experiment Name: At_Germinating_Seeds_Sub_P Parameter: Organism Value: A. thaliana
  misc_feature: MA Experiment 20000307 PARAMETER Experiment Name: At_Germinating_Seeds_Sub_P Parameter: Plant Line Value: WS
  misc_feature: MA Experiment 20000307 PARAMETER Experiment Name: At_Germinating_Seeds_Sub_P Parameter: Tissue Value: Germinating Seeds
  misc_feature: MA Experiment ID: 20000355 Result: Up-regulated in Transcription
  misc_feature: MA Experiment 20000355 PARAMETER Experiment Name: At_Siliques_Sub_P Parameter: Age (day) Value: 21
  misc_feature: MA Experiment 20000355 PARAMETER Experiment Name: At_Siliques_Sub_P Parameter: Organism Value: A. thaliana
  misc_feature: MA Experiment 20000355 PARAMETER Experiment Name: At_Siliques_Sub_P Parameter: Plant Line Value: WS
  misc_feature: MA Experiment 20000355 PARAMETER Experiment Name: At_Siliques_Sub_P Parameter: Tissue Value: Less Than 5mm Siliques vs. Whole Plant
  misc_feature: MA Experiment ID: 20000440 Result: Up-regulated in Transcription
  misc_feature: MA Experiment 20000440 PARAMETER Experiment Name: At_Closed-Flower__Sub_P Parameter: Tissue Value: Closed Flower vs. Whole Plant
tttctggttacagacagatacattccctctgagaaccaagaaaacaaaataataataaaaaaccctaattccccgctccacttctctctctcacgctctctctgtgattttagtatggaagcaacggcggaggaatcagttagtactcttgttacgacgatggttgatgagacgtatgagttcttagcgcctcgatggtttgatttcgttaatggagagactgaagatgagtctcgccgagcagaactctggtttcaatcggccttaagctgcgctccttctccttcggttcctagaatcaaagcaaggagatcgttcaaggtagaggccatgtgcaacttcaatgaagatgaagaagagacgctcaaggataaagagccgttagaaccagtagttccaattgtttctttacaatcgcagccttctcaggccaagaaagcagaagttgctccttctaaagcaagcactgttaagccgtctcgcatcagttccaaggacgcagaggtcaacaacaagaccgtagatgccagcgatccgacgactgagccaatagaagacaaggagaacattgctcctgcttgcacacccaaaccaccaatgcagttttctctaggggcaaagtcggtggatcttaagaagcagcaaactgctagaaagatagctagtctgctgaagaatccatctacactaaggcctaaaaaccagtctcaagccaaaggcagtcatcagaaaagtgtgaaaggggaaacgaatcttaacaacatagctagcactaccaatctgattcaagaaaatcaagccatcaaaaggcaaaagctagatgatggaaaatcaagacagattctcaatccaaaaccagcaactctgctccacaagacaagaaatggtcttgttaacactggtttcaacttatgcccttcagtcactaagcacactccgaaggaaaacagaaaggtttatgttcgtgagcaaattgcaccttttgtttcaactgctgaattgatgaagaagttccaaacaagcacgcgagacctattcgtccagaatcgacctaagctgacactgacaagaccaaaggaacccgaatttgtgacgtcccaacgagctcgtcctttgagagttaagagcagtgcagaacttgaggaagagatgttggcaaagattcccaagtttaaagctcgacctgtgaacaagaagattttggcagctccagctttgcctgcacctcaaagaagtacaccacatctgccagaatttcaggaatttcatcttcaaacaatggcaagggctaaccagcatgcagagacatcttcaatagcttcaacagaagtgtctaagcagcataatgatcagaagcatcaccttactgaaccaaagagccctgtgctccaaacaatgctaagagctcgtcctactatagcaaaaactactgcagaacttgagcaagaggaactggagaaggcaccaaagttcaaagcaaaacctttgaacaaaaagatatttgaaagtaaaggagaaatgggtatcttttgcaacaccaagaagcacataacgatacctcaagagtatcactttgcgacagatgagaggatatcacgaccagaatctgtcttagatatattcgacaagctctcactgaactccgaatcttgccatgaaaaacctctaccaaggaacactgctccaaaccccttcaatcttaagacagaagaaagaggcgctgagaaagagaagaaattttatatggaactcatgtataagaaattaggagatgtaaaggcaagagttccaaaggcaaatccatatccttacacgacggactatccagtggtaccaccaaaaccagaacctaagcaatgcacacaaccagaaccgttccagttagagagtctagtaaggcacgaagaggaaatgcgaagagaaagggaagagaggaggagaatggagacagaagaagcccagaagaggctcttcaaagcacaaccagttataaaagaggacccaatccctgttccagagaaagtacgaatgcccctcacagaaattcaggagttcaatcttcatgtagagcatcgagctgttgaacgagcagattttgatcacaaaatcaaagagaaggagaaccagtacaaaagataccgtgaagagagtgaagctgcaaaaatggtggaggaagagagagctctgaagcaaatgagaaagacaatggttcctcatgccagacctgtgcctaacttcaacaaacccttcttacctcagaagtccaacaaggggaccacaaaagcaaaatcacccaatcttagagtgattaaaagaaccgagagaagaaccatgatggctcgaccaaccatctctgcagctactagcgcctctgctggtcagatgagatagttgtttgcagtaatgttttctgaagcagcctgaaatgttcatgaatgcttgaacctacattttcctttgtaaaaatgattcagtactaaattttcctgtaacctgttcttactaatatagtacattgtcttatgtatcctggttcaagttttaataaactgaaaaaaaaaactgttcttact

SEQ ID NO: 20592 - protein, 796 aa, Arabidopsis thaliana
  peptide (1)..(796): Ceres Seq. ID no. 14310098
  misc_feature (137)..(448): Homolog of NCBI NO: 34395225 NR Description: unknown protein [Oryza sativa (japonica
  misc_feature (350)..(429): Homolog of NCBI NO: 15241452 NR Description: hypothetical protein [Arabidopsis thaliana]
  misc_feature (656)..(779): Homolog of NCBI NO: 15241452 NR Description: hypothetical protein [Arabidopsis thaliana]
  misc_feature (165)..(724): Homolog of NCBI NO: 30678673 NR Description: expressed protein [Arabidopsis thaliana]
  misc_feature (165)..(724): Homolog of NCBI NO: 25406742 NR Description: hypothetical protein [imported] - Arabidopsis
  misc_feature (699)..(723): Homolog of NCBI NO: 30678673 NR Description: expressed protein [Arabidopsis thaliana]
  misc_feature (54)..(399): Homolog of NCBI NO: 30678673 NR Description: expressed protein [Arabidopsis thaliana]
  misc_feature (699)..(796): Homolog of NCBI NO: 25406742 NR Description: hypothetical protein [imported] - Arabidopsis
  misc_feature (611)..(796): Homolog of NCBI NO: 25406742 NR Description: hypothetical protein [imported] - Arabidopsis
  misc_feature (54)..(399): Homolog of NCBI NO: 25406742 NR Description: hypothetical protein [imported] - Arabidopsis
FLVTDRYIPSENQENKIIIKNPNSPLHFSLSRSLCDFSMEATAEESVSTLVTTMVDETYEFLAPRWFDFVNGETEDESRRAELWFQSALSCAPSPSVPRIKARRSFKVEAMCNFNEDEEETLKDKEPLEPVVPIVSLQSQPSQAKKAEVAPSKASTVKPSRISSKDAEVNNKTVDASDPTTEPIEDKENIAPACTPKPPMQFSLGAKSVDLKKQQTARKIASLLKNPSTLRPKNQSQAKGSHQKSVKGETNLNNIASTTNLIQENQAIKRQKLDDGKSRQILNPKPATLLHKTRNGLVNTGFNLCPSVTKHTPKENRKVYVREQIAPFVSTAELMKKFQTSTRDLFVQNRPKLTLTRPKEPEFVTSQRARPLRVKSSAELEEEMLAKIPKFKARPVNKKILAAPALPAPQRSTPHLPEFQEFHLQTMARANQHAETSSIASTEVSKQHNDQKHHLTEPKSPVLQTMLRARPTIAKTTAELEQEELEKAPKFKAKPLNKKIFESKGEMGIFCNTKKHITIPQEYHFATDERISRPESVLDIFDKLSLNSESCHEKPLPRNTAPNPFNLKTEERGAEKEKKFYMELMYKKLGDVKARVPKANPYPYTTDYPVVPPKPEPKQCTQPEPFQLESLVRHEEEMRREREERRRMETEEAQKRLFKAQPVIKEDPIPVPEKVRMPLTEIQEFNLHVEHRAVERADFDHKIKEKENQYKRYREESEAAKMVEEERALKQMRKTMVPHARPVPNFNKPFLPQKSNKGTTKAKSPNLRVIKRTERRTMMARPTISAATSASAGQMR

SEQ ID NO: 20593 - protein, 758 aa, Arabidopsis thaliana
  peptide (1)..(758): Ceres Seq. ID no. 14310099
  misc_feature (99)..(410): Homolog of NCBI NO: 34395225 NR Description: unknown protein [Oryza sativa (japonica
  misc_feature (312)..(391): Homolog of NCBI NO: 15241452 NR Description: hypothetical protein [Arabidopsis thaliana]
  misc_feature (618)..(741): Homolog of NCBI NO: 15241452 NR Description: hypothetical protein [Arabidopsis thaliana]
  misc_feature (127)..(686): Homolog of NCBI NO: 30678673 NR Description: expressed protein [Arabidopsis thaliana]
  misc_feature (127)..(686): Homolog of NCBI NO: 25406742 NR Description: hypothetical protein [imported] - Arabidopsis
  misc_feature (661)..(685): Homolog of NCBI NO: 30678673 NR Description: expressed protein [Arabidopsis thaliana]
  misc_feature (16)..(361): Homolog of NCBI NO: 30678673 NR Description: expressed protein [Arabidopsis thaliana]
  misc_feature (661)..(758): Homolog of NCBI NO: 25406742 NR Description: hypothetical protein [imported] - Arabidopsis
  misc_feature (573)..(758): Homolog of NCBI NO: 25406742 NR Description: hypothetical protein [imported] - Arabidopsis
  misc_feature (16)..(361): Homolog of NCBI NO: 25406742 NR Description: hypothetical protein [imported] - Arabidopsis
MEATAEESVSTLVTTMVDETYEFLAPRWFDFVNGETEDESRRAELWFQSALSCAPSPSVPRIKARRSFKVEAMCNFNEDEEETLKDKEPLEPVVPIVSLQSQPSQAKKAEVAPSKASTVKPSRISSKDAEVNNKTVDASDPTTEPIEDKENIAPACTPKPPMQFSLGAKSVDLKKQQTARKIASLLKNPSTLRPKNQSQAKGSHQKSVKGETNLNNIASTTNLIQENQAIKRQKLDDGKSRQILNPKPATLLHKTRNGLVNTGFNLCPSVTKHTPKENRKVYVREQIAPFVSTAELMKKFQTSTRDLFVQNRPKLTLTRPKEPEFVTSQRARPLRVKSSAELEEEMLAKIPKFKARPVNKKILAAPALPAPQRSTPHLPEFQEFHLQTMARANQHAETSSIASTEVSKQHNDQKHHLTEPKSPVLQTMLRARPTIAKTTAELEQEELEKAPKFKAKPLNKKIFESKGEMGIFCNTKKHITIPQEYHFATDERISRPESVLDIFDKLSLNSESCHEKPLPRNTAPNPFNLKTEERGAEKEKKFYMELMYKKLGDVKARVPKANPYPYTTDYPVVPPKPEPKQCTQPEPFQLESLVRHEEEMRREREERRRMETEEAQKRLFKAQPVIKEDPIPVPEKVRMPLTEIQEFNLHVEHRAVERADFDHKIKEKENQYKRYREESEAAKMVEEERALKQMRKTMVPHARPVPNFNKPFLPQKSNKGTTKAKSPNLRVIKRTERRTMMARPTISAATSASAGQMR

SEQ ID NO: 20594 - protein, 743 aa, Arabidopsis thaliana
  peptide (1)..(743): Ceres Seq. ID no. 14310100
  misc_feature (84)..(395): Homolog of NCBI NO: 34395225 NR Description: unknown protein [Oryza sativa (japonica
  misc_feature (297)..(376): Homolog of NCBI NO: 15241452 NR Description: hypothetical protein [Arabidopsis thaliana]
  misc_feature (603)..(726): Homolog of NCBI NO: 15241452 NR Description: hypothetical protein [Arabidopsis thaliana]
  misc_feature (112)..(671): Homolog of NCBI NO: 30678673 NR Description: expressed protein [Arabidopsis thaliana]
  misc_feature (112)..(671): Homolog of NCBI NO: 25406742 NR Description: hypothetical protein [imported] - Arabidopsis
  misc_feature (646)..(670): Homolog of NCBI NO: 30678673 NR Description: expressed protein [Arabidopsis thaliana]
  misc_feature (1)..(346): Homolog of NCBI NO: 30678673 NR Description: expressed protein [Arabidopsis thaliana]
  misc_feature (646)..(743): Homolog of NCBI NO: 25406742 NR Description: hypothetical protein [imported] - Arabidopsis
  misc_feature (558)..(743): Homolog of NCBI NO: 25406742 NR Description: hypothetical protein [imported] - Arabidopsis
  misc_feature (1)..(346): Homolog of NCBI NO: 25406742 NR Description: hypothetical protein [imported] - Arabidopsis
MVDETYEFLAPRWFDFVNGETEDESRRAELWFQSALSCAPSPSVPRIKARRSFKVEAMCNFNEDEEETLKDKEPLEPVVPIVSLQSQPSQAKKAEVAPSKASTVKPSRISSKDAEVNNKTVDASDPTTEPIEDKENIAPACTPKPPMQFSLGAKSVDLKKQQTARKIASLLKNPSTLRPKNQSQAKGSHQKSVKGETNLNNIASTTNLIQENQAIKRQKLDDGKSRQILNPKPATLLHKTRNGLVNTGFNLCPSVTKHTPKENRKVYVREQIAPFVSTAELMKKFQTSTRDLFVQNRPKLTLTRPKEPEFVTSQRARPLRVKSSAELEEEMLAKIPKFKARPVNKKILAAPALPAPQRSTPHLPEFQEFHLQTMARANQHAETSSIASTEVSKQHNDQKHHLTEPKSPVLQTMLRARPTIAKTTAELEQEELEKAPKFKAKPLNKKIFESKGEMGIFCNTKKHITIPQEYHFATDERISRPESVLDIFDKLSLNSESCHEKPLPRNTAPNPFNLKTEERGAEKEKKFYMELMYKKLGDVKARVPKANPYPYTTDYPVVPPKPEPKQCTQPEPFQLESLVRHEEEMRREREERRRMETEEAQKRLFKAQPVIKEDPIPVPEKVRMPLTEIQEFNLHVEHRAVERADFDHKIKEKENQYKRYREESEAAKMVEEERALKQMRKTMVPHARPVPNFNKPFLPQKSNKGTTKAKSPNLRVIKRTERRTMMARPTISAATSASAGQMR

SEQ ID NO: 20595 - DNA, 1703 bp, Arabidopsis thaliana
  misc_feature (1)..(1703): Ceres Seq. ID no. 14309870
  misc_feature: MA Experiment ID: 20000171 Result: Down-regulated in Transcription
  misc_feature: MA Experiment 20000171 PARAMETER Experiment Name: At_42deg_Heat_P Parameter: Age (day) Value: 14
  misc_feature: MA Experiment 20000171 PARAMETER Experiment Name: At_42deg_Heat_P Parameter: Organism Value: A. thaliana
  misc_feature: MA Experiment 20000171 PARAMETER Experiment Name: At_42deg_Heat_P Parameter: Plant Line Value: WS
  misc_feature: MA Experiment 20000171 PARAMETER Experiment Name: At_42deg_Heat_P Parameter: Temperature (deg C) Value: 42 vs. 22
  misc_feature: MA Experiment 20000171 PARAMETER Experiment Name: At_42deg_Heat_P Parameter: Timepoint (hr) Value: 1
  misc_feature: MA Experiment 20000171 PARAMETER Experiment Name: At_42deg_Heat_P Parameter: Tissue Value: Aerial
  misc_feature: MA Experiment ID: 20000173 Result: Down-regulated in Transcription
  misc_feature: MA Experiment 20000173 PARAMETER Experiment Name: At_42deg_Heat_P Parameter: Age (day) Value: 14
  misc_feature: MA Experiment 20000173 PARAMETER Experiment Name: At_42deg_Heat_P Parameter: Organism Value: A. thaliana
  misc_feature: MA Experiment 20000173 PARAMETER Experiment Name: At_42deg_Heat_P Parameter: Plant Line Value: WS
  misc_feature: MA Experiment 20000173 PARAMETER Experiment Name: At_42deg_Heat_P Parameter: Temperature (deg C) Value: 42 vs. 22
  misc_feature: MA Experiment 20000173 PARAMETER Experiment Name: At_42deg_Heat_P Parameter: Timepoint (hr) Value: 6
  misc_feature: MA Experiment 20000173 PARAMETER Experiment Name: At_42deg_Heat_P Parameter: Tissue Value: Aerial
  misc_feature: MA Experiment ID: 20000235 Result: Up-regulated in Transcription
  misc_feature: MA Experiment 20000235 PARAMETER Experiment Name: At_Siliques_P Parameter: Age (day) Value: 21
  misc_feature: MA Experiment 20000235 PARAMETER Experiment Name: At_Siliques_P Parameter: Organism Value: A. thaliana
  misc_feature: MA Experiment 20000235 PARAMETER Experiment Name: At_Siliques_P Parameter: Plant Line Value: WS
  misc_feature: MA Experiment 20000235 PARAMETER Experiment Name: At_Siliques_P Parameter: Tissue Value: 5-10mm Siliques vs. Whole Plant
  misc_feature: MA Experiment ID: 20000496 Result: Up-regulated in Transcription
  misc_feature: MA Experiment 20000496 PARAMETER Experiment Name: At_Guard_Cells_P Parameter: Harvest Date Value: 7/19/2002
  misc_feature: MA Experiment 20000496 PARAMETER Experiment Name: At_Guard_Cells_P Parameter: Organism Value: Canola
  misc_feature: MA Experiment 20000496 PARAMETER Experiment Name: At_Guard_Cells_P Parameter: Tissue Value: Guard Cells vs. Leaves
ggtcggacttgtaaattttcgctcagcgatctgcttccaatggcgatctacttcattctctatacacttctcacgatcatcttcgccgtatctctgagtttatttctttccgtgatcaatgcaagaaagagcagaaaacgtgcggtgggattcttccatccgtacacgaacgacggtggcggcggcgagagagtgctctggtgcgccgttaaagccattcaagaggaaaatcccgatcttgactgtgtcatcttcaccggagatcatgactcttcttctgatagcttagctcgtcgcgccgttgatcgattcggtgttcaccttcagtctcctcctaaggtgattcatctaaacaaaaggaaatggattgaagagagtacttacccacattttacaatgataggtcagagtcttggttcggtttacttagcgtgggaagcattacgcatgttcactcctttgtatttccttgacactagtggatatgcgtttacatatcctcttgctcggatctttggttgcaaagttgtttgctatactcattatccaactattagtttggatatgatttctcgtgttcgtcagaggaactctatgtataacaatgatgcttccattgctaagagcaattggttatctacttgcaaattagtctattacagagcttttagctggatgtatgggatggttgggtcatgtactcatttagctatggttaactcttcgtggactaagtcccatatcgaagtgctttggagaattccagaacggattacacgggtctacccgccctgtgatacttcaggacttcaggcgtttcctcttgaacgatcatctgatcctcctaaaatcatatcagttgctcaatttcgtcctgagaaggctcatatgcttcagcttgaggccttttcactagccttagagaagctagatgcagacgtccctagacccaagctccaatttgtgggaagttgtaggaacaattcagatgaagaacgtctgcagaaattgaaagacagagcagaagaactaaaagtagatggagacgtgcaattctataaaaatgccatgtacagagaactagtggaactgttaggaaatgcagttgcaggactgcatgggatgatagatgaacactttggtataagtgttgttgagtacatggctgctggtgcaatcccaatagctcacaactcagctggacctaaaatggacattgtgttggaagaagacggacaaaaaaccgggtttcttgctgagactgtggaggaatacgctgaagcgatccttgagattgtgaagatgaatgaaacagagaggcttaaaatggctgaatctgctagaaaacgagcggcaaggttctctgaacaacggttttgtgaggacttcaaaactgcgattcgacccattttcacaggtcctcttaaatgacagttcttaaaccctcaaaacctgcttactgcactagcttttaaacgcacaagacaagctaggttataccttttatcctctctttatagattttttttttaattctggttaaaggtctgacgtagacgttgtaagaaacagtttggtcaaaagaaacgagtaagatcttcctatttctagttgactgttggggaaaactgacaccaacatttgctttcaaacgttttcgatttgtccgaatgcattttattatgagaaacttggtgttattc

SEQ ID NO: 20596 - protein, 476 aa, Arabidopsis thaliana
  peptide (1)..(476): Ceres Seq. ID no. 14309871
  misc_feature (270)..(450): Pfam Name: Glycosyl transferases group 1 Pfam Description: Glycosyl transferases group 1
  misc_feature (15)..(459): Homolog of NCBI NO: 39581396 NR Description: Hypothetical protein CBG15348 [Caenorhabditis
  misc_feature (24)..(471): Homolog of NCBI NO: 18029286 NR Description: similar to CG11306 [Oikopleura dioica]
  misc_feature (37)..(76): Homolog of NCBI NO: 34147157 NR Description: hypothetical protein B230397C21 [Mus musculus]
  misc_feature (113)..(472): Homolog of NCBI NO: 34147157 NR Description: hypothetical protein B230397C21 [Mus musculus]
  misc_feature (49)..(470): Homolog of NCBI NO: 31200761 NR Description: ENSANGP00000008208 [Anopheles gambiae]
  misc_feature (18)..(472): Homolog of NCBI NO: 21358031 NR Description: CG11306-PA [Drosophila melanogaster]
  misc_feature (12)..(472): Homolog of NCBI NO: 28374203 NR Description: Unknown (protein for IMAGE:2601678) [Danio rerio]
  misc_feature (49)..(472): Homolog of NCBI NO: 34879128 NR Description: similar to CG11306-PA [Rattus norvegicus]
  misc_feature (45)..(471): Homolog of NCBI NO: 39795589 NR Description: Unknown (protein for MGC:76133) [Silurana
  misc_feature (14)..(476): Homolog of NCBI NO: 4587993 NR Description: hypothetical protein [Arabidopsis thaliana]
GRTCKFSLSDLLPMAIYFILYTLLTIIFAVSLSLFLSVINARKSRKRAVGFFHPYTNDGGGGERVLWCAVKAIQEENPDLDCVIFTGDHDSSSDSLARRAVDRFGVHLQSPPKVIHLNKRKWIEESTYPHFTMIGQSLGSVYLAWEALRMFTPLYFLDTSGYAFTYPLARIFGCKVVCYTHYPTISLDMISRVRQRNSMYNNDASIAKSNWLSTCKLVYYRAFSWMYGMVGSCTHLAMVNSSWTKSHIEVLWRIPERITRVYPPCDTSGLQAFPLERSSDPPKIISVAQFRPEKAHMLQLEAFSLALEKLDADVPRPKLQFVGSCRNNSDEERLQKLKDRAEELKVDGDVQFYKNAMYRELVELLGNAVAGLHGMIDEHFGISVVEYMAAGAIPIAHNSAGPKMDIVLEEDGQKTGFLAETVEEYAEAILEIVKMNETERLKMAESARKRAARFSEQRFCEDFKTAIRPIFTGPLK

SEQ ID NO: 20597 - protein, 463 aa, Arabidopsis thaliana
  peptide (1)..(463): Ceres Seq. ID no. 14309872
  misc_feature (257)..(437): Pfam Name: Glycosyl transferases group 1 Pfam Description: Glycosyl transferases group 1
  misc_feature (2)..(446): Homolog of NCBI NO: 39581396 NR Description: Hypothetical protein CBG15348 [Caenorhabditis
  misc_feature (11)..(458): Homolog of NCBI NO: 18029286 NR Description: similar to CG11306 [Oikopleura dioica]
  misc_feature (24)..(63): Homolog of NCBI NO: 34147157 NR Description: hypothetical protein B230397C21 [Mus musculus]
  misc_feature (100)..(459): Homolog of NCBI NO: 34147157 NR Description: hypothetical protein B230397C21 [Mus musculus]
  misc_feature (36)..(457): Homolog of NCBI NO: 31200761 NR Description: ENSANGP00000008208 [Anopheles gambiae]
  misc_feature (5)..(459): Homolog of NCBI NO: 21358031 NR Description: CG11306-PA [Drosophila melanogaster]
  misc_feature (1)..(459): Homolog of NCBI NO: 28374203 NR Description: Unknown (protein for IMAGE:2601678) [Danio rerio]
  misc_feature (36)..(459): Homolog of NCBI NO: 34879128 NR Description: similar to CG11306-PA [Rattus norvegicus]
  misc_feature (32)..(458): Homolog of NCBI NO: 39795589 NR Description: Unknown (protein for MGC:76133) [Silurana
  misc_feature (1)..(463): Homolog of NCBI NO: 4587993 NR Description: hypothetical protein [Arabidopsis thaliana]
MAIYFILYTLLTIIFAVSLSLFLSVINARKSRKRAVGFFHPYTNDGGGGERVLWCAVKAIQEENPDLDCVIFTGDHDSSSDSLARRAVDRFGVHLQSPPKVIHLNKRKWIEESTYPHFTMIGQSLGSVYLAWEALRMFTPLYFLDTSGYAFTYPLARIFGCKVVCYTHYPTISLDMISRVRQRNSMYNNDASIAKSNWLSTCKLVYYRAFSWMYGMVGSCTHLAMVNSSWTKSHIEVLWRIPERITRVYPPCDTSGLQAFPLERSSDPPKIISVAQFRPEKAHMLQLEAFSLALEKLDADVPRPKLQFVGSCRNNSDEERLQKLKDRAEELKVDGDVQFYKNAMYRELVELLGNAVAGLHGMIDEHFGISVVEYMAAGAIPIAHNSAGPKMDIVLEEDGQKTGFLAETVEEYAEAILEIVKMNETERLKMAESARKRAARFSEQRFCEDFKTAIRPIFTGPLK

SEQ ID NO: 20598 - protein, 344 aa, Arabidopsis thaliana
  peptide (1)..(344): Ceres Seq. ID no. 14309873
  misc_feature (138)..(318): Pfam Name: Glycosyl transferases group 1 Pfam Description: Glycosyl transferases group 1
  misc_feature (165)..(344): Homolog of NCBI NO: 15225657 NR Description: glycosyltransferase family 1 [Arabidopsis
  misc_feature (1)..(327): Homolog of NCBI NO: 39581396 NR Description: Hypothetical protein CBG15348 [Caenorhabditis
  misc_feature (1)..(339): Homolog of NCBI NO: 18029286 NR Description: similar to CG11306 [Oikopleura dioica]
  misc_feature (1)..(340): Homolog of NCBI NO: 34147157 NR Description: hypothetical protein B230397C21 [Mus musculus]
  misc_feature (1)..(338): Homolog of NCBI NO: 31200761 NR Description: ENSANGP00000008208 [Anopheles gambiae]
  misc_feature (1)..(340): Homolog of NCBI NO: 21358031 NR Description: CG11306-PA [Drosophila melanogaster]
  misc_feature (1)..(340): Homolog of NCBI NO: 28374203 NR Description: Unknown (protein for IMAGE:2601678) [Danio rerio]
  misc_feature (1)..(340): Homolog of NCBI NO: 34879128 NR Description: similar to CG11306-PA [Rattus norvegicus]
  misc_feature (1)..(339): Homolog of NCBI NO: 39795589 NR Description: Unknown (protein for MGC:76133) [Silurana
  misc_feature (1)..(344): Homolog of NCBI NO: 4587993 NR Description: hypothetical protein [Arabidopsis thaliana]
MIGQSLGSVYLAWEALRMFTPLYFLDTSGYAFTYPLARIFGCKVVCYTHYPTISLDMISRVRQRNSMYNNDASIAKSNWLSTCKLVYYRAFSWMYGMVGSCTHLAMVNSSWTKSHIEVLWRIPERITRVYPPCDTSGLQAFPLERSSDPPKIISVAQFRPEKAHMLQLEAFSLALEKLDADVPRPKLQFVGSCRNNSDEERLQKLKDRAEELKVDGDVQFYKNAMYRELVELLGNAVAGLHGMIDEHFGISVVEYMAAGAIPIAHNSAGPKMDIVLEEDGQKTGFLAETVEEYAEAILEIVKMNETERLKMAESARKRAARFSEQRFCEDFKTAIRPIFTGPLK

SEQ ID NO: 20599 - DNA, 647 bp, Arabidopsis thaliana
  misc_feature (1)..(647): Ceres Seq. ID no. 12393496
attacctctaatgttttgcttccaaagaaaaaaagaaacaatgaagttcttgatttacctcgttgtgtttgttcttcttttcaatggtttgacggccaacagagtggaaaactctctggttcagaaatattgcaatcaaagttcaaagtacgcggaacgatatttctataagttttgcattgcatctctcgaagagaatgcggaaagtcagaaagcaaggaatagcaatgatttaacattggtaggaacgaataacgctttatcaaacctaacaaacgtgaaaagaattgtggagaagattttcaacgagagaaaatataagggcaggctgagtaagaagttgttgcaaaagtgccttaagctttattctgaaggctatgacgcgttaacctcagctttgaagtacattaaagtgagagatctgtttaaagtttcggttcatttgcagaaagcaaaagaagcaccaagcatttgcgaaatgggattcaacggcgacaataaacaaatatctccgatgaagaaagaaaacgatgttcttttcgacgtgatcaatattccttacagttttaatatgaatcgacatggttagattagcgcctgaaaaggaaccggaggttgcatgagttttattttaattgaaaaaagtt

SEQ ID NO: 20600 - protein, 195 aa, Arabidopsis thaliana
  peptide (1)..(195): Ceres Seq. ID no. 12393497
  misc_feature (14)..(189): Homolog of NCBI NO: 21554276 NR Description: unknown [Arabidopsis thaliana]
  misc_feature (14)..(189): Homolog of NCBI NO: 18422735 NR Description: expressed protein
  misc_feature (14)..(191): Homolog of NCBI NO: 18422737 NR Description: expressed protein; protein id: At5g46960.1
  misc_feature (14)..(191): Homolog of NCBI NO: 15237979 NR Description: putative protein
  misc_feature (14)..(191): Homolog of NCBI NO: 21536868 NR Description: unknown [Arabidopsis thaliana]
  misc_feature (14)..(189): Homolog of NCBI NO: 15237978 NR Description: unknown protein; protein id: At5g46930.1
  misc_feature (14)..(180): Homolog of NCBI NO: 15237982 NR Description: unknown protein; protein id: At5g46970.1
  misc_feature (14)..(194): Homolog of NCBI NO: 15237994 NR Description: unknown protein; protein id: At5g46990.1
  misc_feature (14)..(194): Homolog of NCBI NO: 15237983 NR Description: unknown protein; protein id: At5g46980.1
  misc_feature (14)..(195): Homolog of NCBI NO: 15221869 NR Description: hypothetical protein; protein id: At1g54620.1
LPLMFCFQRKKETMKFLIYLVVFVLLFNGLTANRVENSLVQKYCNQSSKYAERYFYKFCIASLEENAESQKARNSNDLTLVGTNNALSNLTNVKRIVEKIFNERKYKGRLSKKLLQKCLKLYSEGYDALTSALKYIKVRDLFKVSVHLQKAKEAPSICEMGFNGDNKQISPMKKENDVLFDVINIPYSFNMNRHG

SEQ ID NO: 20601 - protein, 192 aa, Arabidopsis thaliana
  peptide (1)..(192): Ceres Seq. ID no. 12393498
  misc_feature (11)..(188): Homolog of NCBI NO: 18422737 NR Description: expressed protein; protein id: At5g46960.1
  misc_feature (11)..(188): Homolog of NCBI NO: 15237979 NR Description: putative protein
  misc_feature (11)..(188): Homolog of NCBI NO: 21536868 NR Description: unknown [Arabidopsis thaliana]
  misc_feature (11)..(186): Homolog of NCBI NO: 15237978 NR Description: unknown protein; protein id: At5g46930.1
  misc_feature (11)..(177): Homolog of NCBI NO: 15237982 NR Description: unknown protein; protein id: At5g46970.1
  misc_feature (11)..(191): Homolog of NCBI NO: 15237994 NR Description: unknown protein; protein id: At5g46990.1
  misc_feature (11)..(191): Homolog of NCBI NO: 15237983 NR Description: unknown protein; protein id: At5g46980.1
  misc_feature (11)..(192): Homolog of NCBI NO: 15221869 NR Description: hypothetical protein; protein id: At1g54620.1
  misc_feature (11)..(186): Homolog of NCBI NO: 21554276 NR Description: unknown [Arabidopsis thaliana]
  misc_feature (11)..(186): Homolog of NCBI NO: 18422735 NR Description: expressed protein
MFCFQRKKETMKFLIYLVVFVLLFNGLTANRVENSLVQKYCNQSSKYAERYFYKFCIASLEENAESQKARNSNDLTLVGTNNALSNLTNVKRIVEKIFNERKYKGRLSKKLLQKCLKLYSEGYDALTSALKYIKVRDLFKVSVHLQKAKEAPSICEMGFNGDNKQISPMKKENDVLFDVINIPYSFNMNRHG

SEQ ID NO: 20602 - protein, 182 aa, Arabidopsis thaliana
  peptide (1)..(182): Ceres Seq. ID no. 12393499
  misc_feature (1)..(176): Homolog of NCBI NO: 21554276 NR Description: unknown [Arabidopsis thaliana]
  misc_feature (1)..(176): Homolog of NCBI NO: 18422735 NR Description: expressed protein
  misc_feature (1)..(178): Homolog of NCBI NO: 18422737 NR Description: expressed protein; protein id: At5g46960.1
  misc_feature (1)..(178): Homolog of NCBI NO: 15237979 NR Description: putative protein
  misc_feature (1)..(178): Homolog of NCBI NO: 21536868 NR Description: unknown [Arabidopsis thaliana]
  misc_feature (1)..(176): Homolog of NCBI NO: 15237978 NR Description: unknown protein; protein id: At5g46930.1
  misc_feature (1)..(167): Homolog of NCBI NO: 15237982 NR Description: unknown protein; protein id: At5g46970.1
  misc_feature (1)..(181): Homolog of NCBI NO: 15237994 NR Description: unknown protein; protein id: At5g46990.1
  misc_feature (1)..(181): Homolog of NCBI NO: 15237983 NR Description: unknown protein; protein id: At5g46980.1
  misc_feature (1)..(182): Homolog of NCBI NO: 15221869 NR Description: hypothetical protein; protein id: At1g54620.1
MKFLIYLVVFVLLFNGLTANRVENSLVQKYCNQSSKYAERYFYKFCIASLEENAESQKARNSNDLTLVGTNNALSNLTNVKRIVEKIFNERKYKGRLSKKLLQKCLKLYSEGYDALTSALKYIKVRDLFKVSVHLQKAKEAPSICEMGFNGDNKQISPMKKENDVLFDVINIPYSFNMNRHG

SEQ ID NO: 20603 - DNA, 1560 bp, Arabidopsis thaliana
  misc_feature (1)..(1560): Ceres Seq. ID no. 14310037
  misc_feature: MA Experiment ID: 20000264 Result: Up-regulated in Transcription
  misc_feature: MA Experiment 20000264 PARAMETER Experiment Name: At_Open_Flower_P Parameter: Age (day) Value: 21
  misc_feature: MA Experiment 20000264 PARAMETER Experiment Name: At_Open_Flower_P Parameter: Plant Line Value: WS
  misc_feature: MA Experiment 20000264 PARAMETER Experiment Name: At_Open_Flower_P Parameter: Tissue Value: Open Flower vs. Whole Plant
  misc_feature: MA Experiment ID: 20000286 Result: Up-regulated in Transcription
  misc_feature: MA Experiment 20000286 PARAMETER Experiment Name: At_Open_Flower_P Parameter: Age (day) Value: 21
  misc_feature: MA Experiment 20000286 PARAMETER Experiment Name: At_Open_Flower_P Parameter: Plant Line Value: WS
  misc_feature: MA Experiment 20000286 PARAMETER Experiment Name: At_Open_Flower_P Parameter: Tissue Value: Half Open vs. Whole Plant
  misc_feature: MA Experiment ID: 20000794 Result: Up-regulated in Transcription
  misc_feature: MA Experiment 20000794 PARAMETER Experiment Name: At_Petals_P Parameter: Age (day) Value: 23-25 days
  misc_feature: MA Experiment 20000794 PARAMETER Experiment Name: At_Petals_P Parameter: Plant Line Value: WS
  misc_feature: MA Experiment 20000794 PARAMETER Experiment Name: At_Petals_P Parameter: Tissue Value: Petals vs. Whole plant
  misc_feature: MA Experiment ID: 20001905 Result: Up-regulated in Transcription
  misc_feature: MA Experiment 20001905 PARAMETER Experiment Name: At_Drought_Reproduction_P Parameter: Age (day) Value: 40
  misc_feature: MA Experiment 20001905 PARAMETER Experiment Name: At_Drought_Reproduction_P Parameter: Organism Value: A. thaliana
  misc_feature: MA Experiment 20001905 PARAMETER Experiment Name: At_Drought_Reproduction_P Parameter: Plant Line Value: WS
  misc_feature: MA Experiment 20001905 PARAMETER Experiment Name: At_Drought_Reproduction_P Parameter: Timepoint (day) Value: 10
  misc_feature: MA Experiment 20001905 PARAMETER Experiment Name: At_Drought_Reproduction_P Parameter: Tissue Value: Rosettes
  misc_feature: MA Experiment 20001905 PARAMETER Experiment Name: At_Drought_Reproduction_P Parameter: Treatment Value: Drought vs. No Drought
gctcactagtccccccccccccggcttttccattttcatcttcatgcattgctttccttcgtcgtccttggaggggacgacgacggatctgtctttctgtctactgaaaatccaaatttcatcctctccatttatttaactttttcagatttagttttgtcaagaaaacacaaaatgtcctttcttgcgccttgtcaaattttggagctgaatattatttcggcccaagaattggcgcccgtggcacggtgtatgaagacatatgcaatcgcttggattgatccagagcgtaaattgacgactcgggtcgacaatacgggcggaacaagccctacatggaacgacaagtttgtgtttcgtctagatgaggaagcactctacgatgccacatcaatagttgttatagagatctatgcattgcattggttcaaagacattcatgttggaacggtacaagccttaataagtgaccttgtaagcccttcttcggctatgagatttgttaccctagaggttcttcgtgcctctggccgccctcacggcctcctaaacattgcggtggggcttatcgataactcaggccaaagcatgcctctttagtttgaagaagatttgttgtttcacaagaaaaacatatcttcaaaacctgtagggcttcgacggtcaaaaagtgatacaagctcaatggtggattcaccaaggaaggtgacacaatcccgtgtgagttctactacaaactcaggatttgagaaagatgagttttcttctgactctcaaatggttgtttatgaaccccaaagaaaaacgccaaatacaatgaggcaaacaaagcaacaactcgtgtatgggacaccgatgaggccaaggaaaacgacagcatatatccccaaaaggaacacggtcgaatatggaacaccaatgaggtcaagaccaatcgttattacagaatctgacttaggtccttcagcctcagtagttgctgcccaaatagcaaaagagaaagcacttacagggaaagatgcggagagtactgtgataagtgttggtgaacgaagtgtcgagggtcttcgttctaagttagaaagatggcaagccaatttaccagtggttttagacgtggggtcaagttatcaaccaagttctgactacaaaacaaactctaactttaaccctaaatcaagttacaagcctaatgaaatcgtcccaagaaatcctcaaatgattggagctcccatccaaaagccaagtgggaggaacaagaaaagtggagataatggattgttttcatgttttggtaacatttgtggcgttgagtgttctattgtttgtggtggctctagtggacaaaaagcagccaagaagaagatgaaaaagaagtgataaataacaaacatgattcctccaaattctaaatgattcatttctcattatgtttctatttttcaagcttgtcgattttgctactcaataatccaaatttataatagtaagacagggaaaaaggtacattaattatttcattacttttttatagtaaacatgaaaaatttggtttaaatc

SEQ ID NO: 20604 - protein, 231 aa, Arabidopsis thaliana
  peptide (1)..(231): Ceres Seq. ID no. 14310038
  misc_feature (1)..(29): Homolog of NCBI NO: 15234097 NR Description: C2 domain-containing protein [Arabidopsis
  misc_feature (1)..(18): Homolog of NCBI NO: 18396861 NR Description: C2 domain-containing protein [Arabidopsis
  misc_feature (185)..(229): Homolog of NCBI NO: 21618096 NR Description: unknown [Arabidopsis thaliana]
  misc_feature (1)..(18): Homolog of NCBI NO: 21618096 NR Description: unknown [Arabidopsis thaliana]
  misc_feature (32)..(155): Homolog of NCBI NO: 25372827 NR Description: hypothetical protein [imported] - Arabidopsis
  misc_feature (32)..(230): Homolog of NCBI NO: 15219742 NR Description: C2 domain-containing protein [Arabidopsis
  misc_feature (30)..(227): Homolog of NCBI NO: 15225835 NR Description: C2 domain-containing protein [Arabidopsis
  misc_feature (1)..(231): Homolog of NCBI NO: 15225023 NR Description: C2 domain-containing protein [Arabidopsis
MVDSPRKVTQSRVSSTTNSGFEKDEFSSDSQMVVYEPQRKTPNTMRQTKQQLVYGTPMRPRKTTAYIPKRNTVEYGTPMRSRPIVITESDLGPSASVVAAQIAKEKALTGKDAESTVISVGERSVEGLRSKLERWQANLPVVLDVGSSYQPSSDYKTNSNFNPKSSYKPNEIVPRNPQMIGAPIQKPSGRNKKSGDNGLFSCFGNICGVECSIVCGGSSGQKAAKKKMKKK

SEQ ID NO: 20605 - protein, 200 aa, Arabidopsis thaliana
  peptide (1)..(200): Ceres Seq. ID no. 14310039
  misc_feature (154)..(198): Homolog of NCBI NO: 21618096 NR Description: unknown [Arabidopsis thaliana]
  misc_feature (1)..(124): Homolog of NCBI NO: 25372827 NR Description: hypothetical protein [imported] - Arabidopsis
  misc_feature (1)..(199): Homolog of NCBI NO: 15219742 NR Description: C2 domain-containing protein [Arabidopsis
  misc_feature (1)..(196): Homolog of NCBI NO: 15225835 NR Description: C2 domain-containing protein [Arabidopsis
  misc_feature (1)..(200): Homolog of NCBI NO: 15225023 NR Description: C2 domain-containing protein [Arabidopsis
MVVYEPQRKTPNTMRQTKQQLVYGTPMRPRKTTAYIPKRNTVEYGTPMRSRPIVITESDLGPSASVVAAQIAKEKALTGKDAESTVISVGERSVEGLRSKLERWQANLPVVLDVGSSYQPSSDYKTNSNFNPKSSYKPNEIVPRNPQMIGAPIQKPSGRNKKSGDNGLFSCFGNICGVECSIVCGGSSGQKAAKKKMKKK

SEQ ID NO: 20606 - protein, 187 aa, Arabidopsis thaliana
  peptide (1)..(187): Ceres Seq. ID no. 14310040
  misc_feature (141)..(185): Homolog of NCBI NO: 21618096 NR Description: unknown [Arabidopsis thaliana]
  misc_feature (1)..(111): Homolog of NCBI NO: 25372827 NR Description: hypothetical protein [imported] - Arabidopsis
  misc_feature (1)..(186): Homolog of NCBI NO: 15219742 NR Description: C2 domain-containing protein [Arabidopsis
  misc_feature (1)..(183): Homolog of NCBI NO: 15225835 NR Description: C2 domain-containing protein [Arabidopsis
  misc_feature (1)..(187): Homolog of NCBI NO: 15225023 NR Description: C2 domain-containing protein [Arabidopsis
MRQTKQQLVYGTPMRPRKTTAYIPKRNTVEYGTPMRSRPIVITESDLGPSASVVAAQIAKEKALTGKDAESTVISVGERSVEGLRSKLERWQANLPVVLDVGSSYQPSSDYKTNSNFNPKSSYKPNEIVPRNPQMIGAPIQKPSGRNKKSGDNGLFSCFGNICGVECSIVCGGSSGQKAAKKKMKKK

SEQ ID NO: 20607 - DNA, 2963 bp, Arabidopsis thaliana
  misc_feature (1)..(2963): Ceres Seq. ID no. 15168965
  misc_feature: MA Experiment ID: 20000173 Result: Down-regulated in Transcription
  misc_feature: MA Experiment 20000173 PARAMETER Experiment Name: At_42deg_Heat_P Parameter: Age (day) Value: 14
  misc_feature: MA Experiment 20000173 PARAMETER Experiment Name: At_42deg_Heat_P Parameter: Organism Value: A. thaliana
  misc_feature: MA Experiment 20000173 PARAMETER Experiment Name: At_42deg_Heat_P Parameter: Plant Line Value: WS
  misc_feature: MA Experiment 20000173 PARAMETER Experiment Name: At_42deg_Heat_P Parameter: Temperature (deg C) Value: 42 vs. 22
  misc_feature: MA Experiment 20000173 PARAMETER Experiment Name: At_42deg_Heat_P Parameter: Timepoint (hr) Value: 6
  misc_feature: MA Experiment 20000173 PARAMETER Experiment Name: At_42deg_Heat_P Parameter: Tissue Value: Aerial
  misc_feature: MA Experiment ID: 20000179 Result: Up-regulated in Transcription
  misc_feature: MA Experiment 20000179 PARAMETER Experiment Name: At_Germinating_Seeds_P Parameter: Age (hr) Value: 6 vs. 0
  misc_feature: MA Experiment 20000179 PARAMETER Experiment Name: At_Germinating_Seeds_P Parameter: Tissue Value: Germinating Seeds
  misc_feature: MA Experiment ID: 20000180 Result: Up-regulated in Transcription
  misc_feature: MA Experiment 20000180 PARAMETER Experiment Name: At_Germinating_Seeds_P Parameter: Age (hr) Value: 24 vs. 0
  misc_feature: MA Experiment 20000180 PARAMETER Experiment Name: At_Germinating_Seeds_P Parameter: Tissue Value: Germinating Seeds
  misc_feature: MA Experiment ID: 20000184 Result: Down-regulated in Transcription
  misc_feature: MA Experiment 20000184 PARAMETER Experiment Name: At_Shoots__P Parameter: Age (day) Value: 7
  misc_feature: MA Experiment 20000184 PARAMETER Experiment Name: At_Shoots__P Parameter: Tissue Value: Shoots vs. Whole Plant
  misc_feature: MA Experiment ID: 20000185 Result: Down-regulated in Transcription
  misc_feature: MA Experiment 20000185 PARAMETER Experiment Name: At_Roots__P Parameter: Age (day) Value: 7 vs. 21
  misc_feature: MA Experiment 20000185 PARAMETER Experiment Name: At_Roots__P Parameter: Organism Value: A. thaliana
  misc_feature: MA Experiment 20000185 PARAMETER Experiment Name: At_Roots__P Parameter: Tissue Value: Roots vs. Whole Plant
  misc_feature: MA Experiment ID: 20000439 Result: Down-regulated in Transcription
  misc_feature: MA Experiment 20000439 PARAMETER Experiment Name: At_Roots__P Parameter: Age (day) Value: 14 vs. 21
  misc_feature: MA Experiment 20000439 PARAMETER Experiment Name: At_Roots__P Parameter: Organism Value: A. thaliana
  misc_feature: MA Experiment 20000439 PARAMETER Experiment Name: At_Roots__P Parameter: Tissue Value: Roots vs. Whole Plant
  misc_feature: MA Experiment ID: 20001247 Result: Down-regulated in Transcription
  misc_feature: MA Experiment 20001247 PARAMETER Experiment Name: At_Far-red-induction_P Parameter: Age (day) Value: 7
  misc_feature: MA Experiment 20001247 PARAMETER Experiment Name: At_Far-red-induction_P Parameter: Light Value: Far-red vs. White
  misc_feature: MA Experiment 20001247 PARAMETER Experiment Name: At_Far-red-induction_P Parameter: Organism Value: A. thaliana
  misc_feature: MA Experiment 20001247 PARAMETER Experiment Name: At_Far-red-induction_P Parameter: Plant Line Value: Columbia
  misc_feature: MA Experiment 20001247 PARAMETER Experiment Name: At_Far-red-induction_P Parameter: Timepoint (hr) Value: 1
  misc_feature: MA Experiment 20001247 PARAMETER Experiment Name: At_Far-red-induction_P Parameter: Tissue Value: Whole Plant
  misc_feature: MA Experiment ID: 20001451 Result: Down-regulated in Transcription
  misc_feature: MA Experiment 20001451 PARAMETER Experiment Name: At_Far-red-induction_P Parameter: Age (day) Value: 7
  misc_feature: MA Experiment 20001451 PARAMETER Experiment Name: At_Far-red-induction_P Parameter: Light Value: Far-red vs. White
  misc_feature: MA Experiment 20001451 PARAMETER Experiment Name: At_Far-red-induction_P Parameter: Organism Value: A. thaliana
  misc_feature: MA Experiment 20001451 PARAMETER Experiment Name: At_Far-red-induction_P Parameter: Plant Line Value: Columbia
  misc_feature: MA Experiment 20001451 PARAMETER Experiment Name: At_Far-red-induction_P Parameter: Timepoint (hr) Value: 24
  misc_feature: MA Experiment 20001451 PARAMETER Experiment Name: At_Far-red-induction_P Parameter: Tissue Value: Whole Plant
  misc_feature: MA Experiment ID: 20001557 Result: Down-regulated in Transcription
  misc_feature: MA Experiment 20001557 PARAMETER Experiment Name: At_Drought_Soil_Dry_P Parameter: Age (day) Value: 27
  misc_feature: MA Experiment 20001557 PARAMETER Experiment Name: At_Drought_Soil_Dry_P Parameter: Organism Value: A. thaliana
  misc_feature: MA Experiment 20001557 PARAMETER Experiment Name: At_Drought_Soil_Dry_P Parameter: Plant Line Value: WS
  misc_feature: MA Experiment 20001557 PARAMETER Experiment Name: At_Drought_Soil_Dry_P Parameter: Post Timepoint (hr) Value: 3
  misc_feature: MA Experiment 20001557 PARAMETER Experiment Name: At_Drought_Soil_Dry_P Parameter: Post-Treatment Value: Re-Water vs. No Drought
  misc_feature: MA Experiment 20001557 PARAMETER Experiment Name: At_Drought_Soil_Dry_P Parameter: Timepoint (day) Value: 13
  misc_feature: MA Experiment 20001557 PARAMETER Experiment Name: At_Drought_Soil_Dry_P Parameter: Treatment Value: Drought vs. No Drought
  misc_feature: MA Experiment ID: 20001905 Result: Down-regulated in Transcription
  misc_feature: MA Experiment 20001905 PARAMETER Experiment Name: At_Drought_Reproduction_P Parameter: Age (day) Value: 40
  misc_feature: MA Experiment 20001905 PARAMETER Experiment Name: At_Drought_Reproduction_P Parameter: Organism Value: A. thaliana
  misc_feature: MA Experiment 20001905 PARAMETER Experiment Name: At_Drought_Reproduction_P Parameter: Plant Line Value: WS
  misc_feature: MA Experiment 20001905 PARAMETER Experiment Name: At_Drought_Reproduction_P Parameter: Timepoint (day) Value: 10
  misc_feature: MA Experiment 20001905 PARAMETER Experiment Name: At_Drought_Reproduction_P Parameter: Tissue Value: Rosettes
  misc_feature: MA Experiment 20001905 PARAMETER Experiment Name: At_Drought_Reproduction_P Parameter: Treatment Value: Drought vs. No Drought
  misc_feature: MA Experiment ID: 20001906 Result: Down-regulated in Transcription
  misc_feature: MA Experiment 20001906 PARAMETER Experiment Name: At_Drought_Reproduction_P Parameter: Age (day) Value: 35
  misc_feature: MA Experiment 20001906 PARAMETER Experiment Name: At_Drought_Reproduction_P Parameter: Organism Value: A. thaliana
  misc_feature: MA Experiment 20001906 PARAMETER Experiment Name: At_Drought_Reproduction_P Parameter: Plant Line Value: WS
  misc_feature: MA Experiment 20001906 PARAMETER Experiment Name: At_Drought_Reproduction_P Parameter: Timepoint (day) Value: 5
  misc_feature: MA Experiment 20001906 PARAMETER Experiment Name: At_Drought_Reproduction_P Parameter: Tissue Value: Siliques
  misc_feature: MA Experiment 20001906 PARAMETER Experiment Name: At_Drought_Reproduction_P Parameter: Treatment Value: Drought vs. No Drought
gaaaatatcttcttcttctttcttctgctctctctctctctctctcgccatgtccactgttcccattgagtctcttctccaccattcttatcttcgtcacaactctagaatctatcgcggaactagaactttcttaccttactcgttgaatctcccttctcatttcactcctaacaaactactgcactcaattagaacaagcgtcggtgttagctcgaagcatagaagaaggtccgtcgcgattcgtgctagctcttccgatactgcggtcgtggaaaccgctcaatcggatgatgtcatcttcaaggaaattttctctgttcaacgaatcgaaaaggcagaaggaaagatttatgttcgattaaaggaagtgaaggagaataattgggagctgagtgttggatgtagtatacccggaaaatggattttgcattggggagtttcatatgtgggtgatactggcagtgaatgggatcaacctccggaagatatgagacctcctggctcaattgccattaaggactatgccatagagacaccgttgaagaagttatctgaaggagattctttttttgaagttgctattaatcaaaatctggagagttctgtagcagctctcaattttgttttgaaggacgaagaaactggggcatggtatcagcacaaagggagggactttaaggttcctcttgtagacgatgttcctgataatggaaatttgatcggagccaagaaaggatctgttggatctctaggtgcccttgggcagctttcaaacatctctctcaaacaagatgaatccagtgcagaagttccaaaagagagcaagagctcatctgattctacgaaagaaagaaaaggtcttcaagagttttacgaggagatgccaataagtaaacgtgttgccgatgataactctgtcagtgtcactgcaaggaaatgccctgaaacatctaagaacattgtatcaattgaaaccgatttaccgggtgacgttactgtccactggggagtttgcaaaaacggcactaagaaatgggaaattccatctgaaccttaccctgaagagacatctttgtttaagaacaaggcattacgcactcgtttacagcgaaaagacgatggaaatggatcgtttggattattctctctggatggaaagcttgaagggttatgctttgttcttaagttaaatgaaaatacgtggctaaattataggggggaagacttctatgtccctttccttacttcaagtagctcgcccgttgaaactgaagctgcccaagtgagtaaacccaaacgaaaaacagataaagaagtgtctgctagtggatttactaaagaaatcatcacggagataaggaacttggcaattgacatttcctctcataagaatcagaagacaaacgtcaaagaagtgcaggaaaacattctacaagaaattgagaaactggctgcggaggcatatagcatatttagaagcacaactccagctttttccgaggaaggtgttttagaagcagaggctgacaagcctgacattaaaatctcctcaggaaccggctcgggatttgagatattatgccaaggtttcaactgggagtccaataaatctgggagatggtacttggaacttcaagaaaaagccgatgagttagcttcacttggattcactgttctgtggttacctccaccgacagaatctgtgtcacctgaagggtacatgcctaaagacctgtataacttgaattccagatatggaactattgatgaactaaaagatacagtgaagaaatttcacaaggtcgggatcaaagttttaggcgatgctgttctgaatcaccgctgtgcacacttcaagaatcaaaatggtgtatggaatctatttggaggacgtctaaactgggacgatagggcagtagttgcagatgaccctcatttccagggtagaggaaacaagagcagtggagataatttccatgctgctccaaacatagatcactcgcaagactttgttaggaaggatatcaaggaatggctatgctggatgatggaagaagttgggtatgatggatggaggcttgactttgtaagagggttctggggaggttatgtgaaagactatatggatgctagcaaaccgtactttgcggttggtgaatattgggattctttaagttacacgtacggagaaatggactacaatcaagacgcacatcgtcaaagaatagttgactggattaatgcaactagtggagctgctggtgcatttgatgtcactaccaaaggaattcttcatacggcgcttcaaaaatgtgaatattggagactctcagacccaaaagggaagcctccaggtgtagttggttggtggccttctcgtgctgtaacattcatcgagaatcatgacactggctctacacagggtcattggagatttccggaggggaaggaaatgcaaggatatgcttacatcctaactcatccaggaacaccagcggtcttcttcgaccatatcttctcggattatcattccgagattgctgcacttctctctctcaggaacagacagaaactccactgtaggagtgaggtgaatatagacaagagtgagagagatgtgtatgcggctataatagatgaaaaggttgcaatgaagatcggaccagggcattacgaaccaccaaacggatctcaaaactggtctgtagccgttgaaggcagagactacaaggtgtgggaaacatcttaagaaggttcccaatttttatgtgtatctagtagtaaataaaattgtccttggaggaaaatattatattatttcaggggaataagattaaaagttaaaaccagatttaagatttgtcccacttttttcaatgctgagagaatattcatattgttgtattggatgcttgtaaagtgtatgcataatatatatgaataataatatatctatttcc

SEQ ID NO: 20608 - protein, 916 aa, Arabidopsis thaliana
  peptide (1)..(916): Ceres Seq. ID no. 15168966
  misc_feature (525)..(854): Pfam Name: Alpha amylase, catalytic domain Pfam Description: Alpha amylase, catalytic domain
  misc_feature (523)..(915): Homolog of NCBI NO: 2506188 NR Description: GLUCAN 1,4-ALPHA-MALTOTETRAHYDROLASE PRECURSOR (MALTOTETRAOSE-FORMING AMYLASE) (EXO-MALTOTETRAOHYDROLASE)
  misc_feature (523)..(915): Homolog of NCBI NO: 94997 NR Description: glucan 1,4-alpha-maltotetraohydrolase (EC
  misc_feature (523)..(915): Homolog of NCBI NO: 10120674 NR Description: Chain A, High Resolution Crystal Structure Of
  misc_feature (522)..(913): Homolog of NCBI NO: 23027235 NR Description: hypothetical protein [Microbulbifer degradans
  misc_feature (516)..(913): Homolog of NCBI NO: 7532799 NR Description: alpha-amylase [Malus x domestica]
  misc_feature (522)..(914): Homolog of NCBI NO: 1220453 NR Description: alpha-amylase
  misc_feature (510)..(913): Homolog of NCBI NO: 25289325 NR Description: protein T23E18.6 [imported] - Arabidopsis
  misc_feature (523)..(913): Homolog of NCBI NO: 15222959 NR Description: alpha-amylase (1,4-alpha-D-glucan
  misc_feature (523)..(913): Homolog of NCBI NO: 38346145 NR Description: OSJNBb0118P14.5 [Oryza sativa (japonica
  misc_feature (126)..(916): Homolog of NCBI NO: 34910588 NR Description: putative alpha-amylase [Oryza sativa (japonica
KISSSSFFCSLSLSLAMSTVPIESLLHHSYLRHNSRIYRGTRTFLPYSLNLPSHFTPNKLLHSIRTSVGVSSKHRRRSVAIRASSSDTAVVETAQSDDVIFKEIFSVQRIEKAEGKIYVRLKEVKENNWELSVGCSIPGKWILHWGVSYVGDTGSEWDQPPEDMRPPGSIAIKDYAIETPLKKLSEGDSFFEVAINQNLESSVAALNFVLKDEETGAWYQHKGRDFKVPLVDDVPDNGNLIGAKKGSVGSLGALGQLSNISLKQDESSAEVPKESKSSSDSTKERKGLQEFYEEMPISKRVADDNSVSVTARKCPETSKNIVSIETDLPGDVTVHWGVCKNGTKKWEIPSEPYPEETSLFKNKALRTRLQRKDDGNGSFGLFSLDGKLEGLCFVLKLNENTWLNYRGEDFYVPFLTSSSSPVETEAAQVSKPKRKTDKEVSASGFTKEIITEIRNLAIDISSHKNQKTNVKEVQENILQEIEKLAAEAYSIFRSTTPAFSEEGVLEAEADKPDIKISSGTGSGFEILCQGFNWESNKSGRWYLELQEKADELASLGFTVLWLPPPTESVSPEGYMPKDLYNLNSRYGTIDELKDTVKKFHKVGIKVLGDAVLNHRCAHFKNQNGVWNLFGGRLNWDDRAVVADDPHFQGRGNKSSGDNFHAAPNIDHSQDFVRKDIKEWLCWMMEEVGYDGWRLDFVRGFWGGYVKDYMDASKPYFAVGEYWDSLSYTYGEMDYNQDAHRQRIVDWINATSGAAGAFDVTTKGILHTALQKCEYWRLSDPKGKPPGVVGWWPSRAVTFIENHDTGSTQGHWRFPEGKEMQGYAYILTHPGTPAVFFDHIFSDYHSEIAALLSLRNRQKLHCRSEVNIDKSERDVYAAIIDEKVAMKIGPGHYEPPNGSQNWSVAVEGRDYKVWETS

SEQ ID NO: 20609 - protein, 900 aa, Arabidopsis thaliana
  peptide (1)..(900): Ceres Seq. ID no. 15168967
  misc_feature (509)..(838): Pfam Name: Alpha amylase, catalytic domain Pfam Description: Alpha amylase, catalytic domain
  misc_feature (507)..(899): Homolog of NCBI NO: 2506188 NR Description: GLUCAN 1,4-ALPHA-MALTOTETRAHYDROLASE PRECURSOR (MALTOTETRAOSE-FORMING AMYLASE) (EXO-MALTOTETRAOHYDROLASE)
  misc_feature (507)..(899): Homolog of NCBI NO: 94997 NR Description: glucan 1,4-alpha-maltotetraohydrolase (EC
  misc_feature (507)..(899): Homolog of NCBI NO: 10120674 NR Description: Chain A, High Resolution Crystal Structure Of
  misc_feature (506)..(897): Homolog of NCBI NO: 23027235 NR Description: hypothetical protein [Microbulbifer degradans
  misc_feature (500)..(897): Homolog of NCBI NO: 7532799 NR Description: alpha-amylase [Malus x domestica]
  misc_feature (506)..(898): Homolog of NCBI NO: 1220453 NR Description: alpha-amylase
  misc_feature (494)..(897): Homolog of NCBI NO: 25289325 NR Description: protein T23E18.6 [imported] - Arabidopsis
  misc_feature (507)..(897): Homolog of NCBI NO: 15222959 NR Description: alpha-amylase (1,4-alpha-D-glucan
  misc_feature (507)..(897): Homolog of NCBI NO: 38346145 NR Description: OSJNBb0118P14.5 [Oryza sativa (japonica
  misc_feature (110)..(900): Homolog of NCBI NO: 34910588 NR Description: putative alpha-amylase [Oryza sativa (japonica
MSTVPIESLLHHSYLRHNSRIYRGTRTFLPYSLNLPSHFTPNKLLHSIRTSVGVSSKHRRRSVAIRASSSDTAVVETAQSDDVIFKEIFSVQRIEKAEGKIYVRLKEVKENNWELSVGCSIPGKWILHWGVSYVGDTGSEWDQPPEDMRPPGSIAIKDYAIETPLKKLSEGDSFFEVAINQNLESSVAALNFVLKDEETGAWYQHKGRDFKVPLVDDVPDNGNLIGAKKGSVGSLGALGQLSNISLKQDESSAEVPKESKSSSDSTKERKGLQEFYEEMPISKRVADDNSVSVTARKCPETSKNIVSIETDLPGDVTVHWGVCKNGTKKWEIPSEPYPEETSLFKNKALRTRLQRKDDGNGSFGLFSLDGKLEGLCFVLKLNENTWLNYRGEDFYVPFLTSSSSPVETEAAQVSKPKRKTDKEVSASGFTKEIITEIRNLAIDISSHKNQKTNVKEVQENILQEIEKLAAEAYSIFRSTTPAFSEEGVLEAEADKPDIKISSGTGSGFEILCQGFNWESNKSGRWYLELQEKADELASLGFTVLWLPPPTESVSPEGYMPKDLYNLNSRYGTIDELKDTVKKFHKVGIKVLGDAVLNHRCAHFKNQNGVWNLFGGRLNWDDRAVVADDPHFQGRGNKSSGDNFHAAPNIDHSQDFVRKDIKEWLCWMMEEVGYDGWRLDFVRGFWGGYVKDYMDASKPYFAVGEYWDSLSYTYGEMDYNQDAHRQRIVDWINATSGAAGAFDVTTKGILHTALQKCEYWRLSDPKGKPPGVVGWWPSRAVTFIENHDTGSTQGHWRFPEGKEMQGYAYILTHPGTPAVFFDHIFSDYHSEIAALLSLRNRQKLHCRSEVNIDKSERDVYAAIIDEKVAMKIGPGHYEPPNGSQNWSVAVEGRDYKVWETS

SEQ ID NO: 20610 - protein, 753 aa, Arabidopsis thaliana
  peptide (1)..(753): Ceres Seq. ID no. 15168968
  misc_feature (362)..(691): Pfam Name: Alpha amylase, catalytic domain Pfam Description: Alpha amylase, catalytic domain
  misc_feature (360)..(752): Homolog of NCBI NO: 2506188 NR Description: GLUCAN 1,4-ALPHA-MALTOTETRAHYDROLASE PRECURSOR (MALTOTETRAOSE-FORMING AMYLASE) (EXO-MALTOTETRAOHYDROLASE)
  misc_feature (360)..(752): Homolog of NCBI NO: 94997 NR Description: glucan 1,4-alpha-maltotetraohydrolase (EC
  misc_feature (360)..(752): Homolog of NCBI NO: 10120674 NR Description: Chain A, High Resolution Crystal Structure Of
  misc_feature (359)..(750): Homolog of NCBI NO: 23027235 NR Description: hypothetical protein [Microbulbifer degradans
  misc_feature (353)..(750): Homolog of NCBI NO: 7532799 NR Description: alpha-amylase [Malus x domestica]
  misc_feature (359)..(751): Homolog of NCBI NO: 1220453 NR Description: alpha-amylase
  misc_feature (347)..(750): Homolog of NCBI NO: 25289325 NR Description: protein T23E18.6 [imported] - Arabidopsis
  misc_feature (360)..(750): Homolog of NCBI NO: 15222959 NR Description: alpha-amylase (1,4-alpha-D-glucan
  misc_feature (360)..(750): Homolog of NCBI NO: 38346145 NR Description: OSJNBb0118P14.5 [Oryza sativa (japonica
  misc_feature (1)..(753): Homolog of NCBI NO: 34910588 NR Description: putative alpha-amylase [Oryza sativa (japonica
MRPPGSIAIKDYAIETPLKKLSEGDSFFEVAINQNLESSVAALNFVLKDEETGAWYQHKGRDFKVPLVDDVPDNGNLIGAKKGSVGSLGALGQLSNISLKQDESSAEVPKESKSSSDSTKERKGLQEFYEEMPISKRVADDNSVSVTARKCPETSKNIVSIETDLPGDVTVHWGVCKNGTKKWEIPSEPYPEETSLFKNKALRTRLQRKDDGNGSFGLFSLDGKLEGLCFVLKLNENTWLNYRGEDFYVPFLTSSSSPVETEAAQVSKPKRKTDKEVSASGFTKEIITEIRNLAIDISSHKNQKTNVKEVQENILQEIEKLAAEAYSIFRSTTPAFSEEGVLEAEADKPDIKISSGTGSGFEILCQGFNWESNKSGRWYLELQEKADELASLGFTVLWLPPPTESVSPEGYMPKDLYNLNSRYGTIDELKDTVKKFHKVGIKVLGDAVLNHRCAHFKNQNGVWNLFGGRLNWDDRAVVADDPHFQGRGNKSSGDNFHAAPNIDHSQDFVRKDIKEWLCWMMEEVGYDGWRLDFVRGFWGGYVKDYMDASKPYFAVGEYWDSLSYTYGEMDYNQDAHRQRIVDWINATSGAAGAFDVTTKGILHTALQKCEYWRLSDPKGKPPGVVGWWPSRAVTFIENHDTGSTQGHWRFPEGKEMQGYAYILTHPGTPAVFFDHIFSDYHSEIAALLSLRNRQKLHCRSEVNIDKSERDVYAAIIDEKVAMKIGPGHYEPPNGSQNWSVAVEGRDYKVWETS

SEQ ID NO: 20611 - DNA, 1903 bp, Arabidopsis thaliana
  misc_feature (1)..(1903): Ceres Seq. ID no. 15168904
gggggtcgccgcctgaaccatttggattccctcacctggaattcgaaaaacggcgactactcccctagagcagatccatctagactctagagtacatccgagggggaagcgagcagatcgatggcgatggctgagaaggtgaaggagaagatgctgatgctccgcagcagcgacaaccaggagttcgaggtgaaggagtcggtggcgatgcaatcgatgaccctcaagaaaatggtcgaggacggctgcgccgacaaaggcatcccgctccccaacgtcacctcccacatcctcgacaaggtcatcgagtattgcaacaagcacgccgagccgaccgggccgggcgacgcggccggcaccaccaacaggtccgccgaggatgagctcaacatcttcgacgcagacttcgtcaatgtagagcactccaccctcttggacctcatcctggctgcaaactacctggacatcaaggggctcctgaacctggcccgccaaaccattacagacttgatcaatgggaagatgcctgaggaggtctgcaagaccaacatcaagaacgacttgaccatcccttccacgtcggccttggccaccacaatgccctcctccgagcgaaagcagatggaggccaggtttatcgcctatatgcaagaaactgctgaggagaggatgactgggtttgctgttcgtggtgaaaaatacagaaagcatggtgaacgtccgccacaaccaccattggagatagttaaatacccagctcttttggaaagagcttggggatgggattcgatactgccgtactgtcctgtgaattcttggcccctatacaagacttacctccaagaatattatgagcgcaattctcgtgaagtattggctcatcaagtggaagctaatgctgcctctggtcccaatctcaacggggctgatgagaatgatctggcaactctgttcaacttgtgtatcagtagggaggttcaacttttgaatctgctgaagcgccgtgatcaaaaacacaatgttgatgagatcagcctgaatgaaaagctcaccaactgtgcccgtcagataacttttgtggaatatgctggttttcctttccccagtgttgccttaaagtgcatcatggcggagtctgatctgttgtgcatgttgctgatgtgtgggactggaatgatatcccaagtcaacatttgctccaggattcgaaaggtggccttcagatttatgacctacaaaggacctggatgttttgctgctgctgccaccatgatggccaccacaaaggaggccaagttgatgagtggactgctgaggaacagatgtagggaaaataatggtccattttcaaggagtgtctttatcaggaaatggaccattgcagctatgttcagaatatgtgaggaatgttctcctgtggaagagtctacagggggctacactgctactaaattgatacttgatggatctgatgacaagaatccttgtgataaggaactagttaataaggacaacctgctgcagaggaacaagataaatcaaaaataccaaggactgttcaaaggaaaaacaactaaatgccgacaccctgtacaaaagcaagaaccaggagatggagcaacgcccgcatcacccagtccggccaatcccatctcaactgtggtgcaaaaactttggtaagaaggaatactgaaggaccttccaaactagcatgaagtgcgggcaccttgcttttcttttgccttctttttgtgaaaacgtgtgcttagcgacaatgctggcaaagtgttagaagcatctctggaatgcttcgtgtagtatcttttgactctcttttcttttgtcgtctcaatcatgttacatgagaaatgcctgatggactcaaataatgaaccggtgattc

SEQ ID NO: 20612 - protein, 519 aa, Arabidopsis thaliana
  peptide (1)..(519): Ceres Seq. ID no. 15168905
  misc_feature (10)..(70): Pfam Name: Skp1 family, tetramerisation domain Pfam Description: Skp1 family, tetramerisation domain
  misc_feature (10)..(149): Homolog of NCBI NO: 18422184 NR Description: E3 ubiquitin ligase SCF complex subunit,
  misc_feature (10)..(149): Homolog of NCBI NO: 3719211 NR Description: UIP2 [Arabidopsis thaliana]
  misc_feature (10)..(149): Homolog of NCBI NO: 4959710 NR Description: Skp1 [Medicago sativa]
  misc_feature (7)..(149): Homolog of NCBI NO: 7489299 NR Description: fimbriata-associated protein - garden snapdragon
  misc_feature (2)..(149): Homolog of NCBI NO: 32330695 NR Description: SKP1/ASK1-like protein [Triticum aestivum]
  misc_feature (2)..(149): Homolog of NCBI NO: 7378764 NR Description: putative kinetochore protein [Hordeum vulgare
  misc_feature (10)..(149): Homolog of NCBI NO: 29468341 NR Description: SKP1 [Nicotiana benthamiana]
  misc_feature (10)..(149): Homolog of NCBI NO: 3551838 NR Description: SKP1-like protein [Nicotiana clevelandii]
  misc_feature (2)..(149): Homolog of NCBI NO: 40644754 NR Description: putative SKP1 protein [Triticum aestivum]
  misc_feature (168)..(466): Homolog of NCBI NO: 38345604 NR Description: OSJNBa0093O08.6 [Oryza sativa (japonica
MAMAEKVKEKMLMLRSSDNQEFEVKESVAMQSMTLKKMVEDGCADKGIPLPNVTSHILDKVIEYCNKHAEPTGPGDAAGTTNRSAEDELNIFDADFVNVEHSTLLDLILAANYLDIKGLLNLARQTITDLINGKMPEEVCKTNIKNDLTIPSTSALATTMPSSERKQMEARFIAYMQETAEERMTGFAVRGEKYRKHGERPPQPPLEIVKYPALLERAWGWDSILPYCPVNSWPLYKTYLQEYYERNSREVLAHQVEANAASGPNLNGADENDLATLFNLCISREVQLLNLLKRRDQKHNVDEISLNEKLTNCARQITFVEYAGFPFPSVALKCIMAESDLLCMLLMCGTGMISQVNICSRIRKVAFRFMTYKGPGCFAAAATMMATTKEAKLMSGLLRNRCRENNGPFSRSVFIRKWTIAAMFRICEECSPVEESTGGYTATKLILDGSDDKNPCDKELVNKDNLLQRNKINQKYQGLFKGKTTKCRHPVQKQEPGDGATPASPSPANPISTVVQKLW

SEQ ID NO: 20613 - protein, 517 aa, Arabidopsis thaliana
  peptide (1)..(517): Ceres Seq. ID no. 15168906
  misc_feature (8)..(68): Pfam Name: Skp1 family, tetramerisation domain Pfam Description: Skp1 family, tetramerisation domain
  misc_feature (8)..(147): Homolog of NCBI NO: 18422184 NR Description: E3 ubiquitin ligase SCF complex subunit,
  misc_feature (8)..(147): Homolog of NCBI NO: 3719211 NR Description: UIP2 [Arabidopsis thaliana]
  misc_feature (8)..(147): Homolog of NCBI NO: 4959710 NR Description: Skp1 [Medicago sativa]
  misc_feature (5)..(147): Homolog of NCBI NO: 7489299 NR Description: fimbriata-associated protein - garden snapdragon
  misc_feature (1)..(147): Homolog of NCBI NO: 32330695 NR Description: SKP1/ASK1-like protein [Triticum aestivum]
  misc_feature (1)..(147): Homolog of NCBI NO: 7378764 NR Description: putative kinetochore protein [Hordeum vulgare
  misc_feature (8)..(147): Homolog of NCBI NO: 29468341 NR Description: SKP1 [Nicotiana benthamiana]
  misc_feature (8)..(147): Homolog of NCBI NO: 3551838 NR Description: SKP1-like protein [Nicotiana clevelandii]
  misc_feature (1)..(147): Homolog of NCBI NO: 40644754 NR Description: putative SKP1 protein [Triticum aestivum]
  misc_feature (166)..(464): Homolog of NCBI NO: 38345604 NR Description: OSJNBa0093O08.6 [Oryza sativa (japonica
MAEKVKEKMLMLRSSDNQEFEVKESVAMQSMTLKKMVEDGCADKGIPLPNVTSHILDKVIEYCNKHAEPTGPGDAAGTTNRSAEDELNIFDADFVNVEHSTLLDLILAANYLDIKGLLNLARQTITDLINGKMPEEVCKTNIKNDLTIPSTSALATTMPSSERKQMEARFIAYMQETAEERMTGFAVRGEKYRKHGERPPQPPLEIVKYPALLERAWGWDSILPYCPVNSWPLYKTYLQEYYERNSREVLAHQVEANAASGPNLNGADENDLATLFNLCISREVQLLNLLKRRDQKHNVDEISLNEKLTNCARQITFVEYAGFPFPSVALKCIMAESDLLCMLLMCGTGMISQVNICSRIRKVAFRFMTYKGPGCFAAAATMMATTKEAKLMSGLLRNRCRENNGPFSRSVFIRKWTIAAMFRICEECSPVEESTGGYTATKLILDGSDDKNPCDKELVNKDNLLQRNKINQKYQGLFKGKTTKCRHPVQKQEPGDGATPASPSPANPISTVVQKLW

SEQ ID NO: 20614 - protein, 509 aa, Arabidopsis thaliana
  peptide (1)..(509): Ceres Seq. ID no. 15168907
  misc_feature (1)..(60): Pfam Name: Skp1 family, tetramerisation domain Pfam Description: Skp1 family, tetramerisation domain
  misc_feature (1)..(139): Homolog of NCBI NO: 18422184 NR Description: E3 ubiquitin ligase SCF complex subunit,
  misc_feature (1)..(139): Homolog of NCBI NO: 3719211 NR Description: UIP2 [Arabidopsis thaliana]
  misc_feature (1)..(139): Homolog of NCBI NO: 4959710 NR Description: Skp1 [Medicago sativa]
  misc_feature (1)..(139): Homolog of NCBI NO: 7489299 NR Description: fimbriata-associated protein - garden snapdragon
  misc_feature (1)..(139): Homolog of NCBI NO: 32330695 NR Description: SKP1/ASK1-like protein [Triticum aestivum]
  misc_feature (1)..(139): Homolog of NCBI NO: 7378764 NR Description: putative kinetochore protein [Hordeum vulgare
  misc_feature (1)..(139): Homolog of NCBI NO: 29468341 NR Description: SKP1 [Nicotiana benthamiana]
  misc_feature (1)..(139): Homolog of NCBI NO: 3551838 NR Description: SKP1-like protein [Nicotiana clevelandii]
  misc_feature (1)..(139): Homolog of NCBI NO: 40644754 NR Description: putative SKP1 protein [Triticum aestivum]
  misc_feature (158)..(456): Homolog of NCBI NO: 38345604 NR Description: OSJNBa0093O08.6 [Oryza sativa (japonica
MLMLRSSDNQEFEVKESVAMQSMTLKKMVEDGCADKGIPLPNVTSHILDKVIEYCNKHAEPTGPGDAAGTTNRSAEDELNIFDADFVNVEHSTLLDLILAANYLDIKGLLNLARQTITDLINGKMPEEVCKTNIKNDLTIPSTSALATTMPSSERKQMEARFIAYMQETAEERMTGFAVRGEKYRKHGERPPQPPLEIVKYPALLERAWGWDSILPYCPVNSWPLYKTYLQEYYERNSREVLAHQVEANAASGPNLNGADENDLATLFNLCISREVQLLNLLKRRDQKHNVDEISLNEKLTNCARQITFVEYAGFPFPSVALKCIMAESDLLCMLLMCGTGMISQVNICSRIRKVAFRFMTYKGPGCFAAAATMMATTKEAKLMSGLLRNRCRENNGPFSRSVFIRKWTIAAMFRICEECSPVEESTGGYTATKLILDGSDDKNPCDKELVNKDNLLQRNKINQKYQGLFKGKTTKCRHPVQKQEPGDGATPASPSPANPISTVVQKLW

SEQ ID NO: 20615 - DNA, 1973 bp, Arabidopsis thaliana
  misc_feature (1)..(1973): Ceres Seq. ID no. 15175957
  misc_feature: MA Experiment ID: 20000348 Result: Up-regulated in Transcription
  misc_feature: MA Experiment 20000348 PARAMETER Experiment Name: At_100uM_ABA_Sub_P Parameter: Age (day) Value: 14
  misc_feature: MA Experiment 20000348 PARAMETER Experiment Name: At_100uM_ABA_Sub_P Parameter: Organism Value: A. thaliana
  misc_feature: MA Experiment 20000348 PARAMETER Experiment Name: At_100uM_ABA_Sub_P Parameter: Plant Line Value: WS
  misc_feature: MA Experiment 20000348 PARAMETER Experiment Name: At_100uM_ABA_Sub_P Parameter: Timepoint (hr) Value: 1
  misc_feature: MA Experiment 20000348 PARAMETER Experiment Name: At_100uM_ABA_Sub_P Parameter: Tissue Value: Aerial
  misc_feature: MA Experiment 20000348 PARAMETER Experiment Name: At_100uM_ABA_Sub_P Parameter: Treatment Value: 100uM ABA vs. No Treatment
  misc_feature: MA Experiment ID: 20000352 Result: Up-regulated in Transcription
  misc_feature: MA Experiment 20000352 PARAMETER Experiment Name: At_Drought_Sub_P Parameter: Age (day) Value: 7
  misc_feature: MA Experiment 20000352 PARAMETER Experiment Name: At_Drought_Sub_P Parameter: Organism Value: A. thaliana
  misc_feature: MA Experiment 20000352 PARAMETER Experiment Name: At_Drought_Sub_P Parameter: Plant Line Value: WS
  misc_feature: MA Experiment 20000352 PARAMETER Experiment Name: At_Drought_Sub_P Parameter: Timepoint (hr) Value: 6
  misc_feature: MA Experiment 20000352 PARAMETER Experiment Name: At_Drought_Sub_P Parameter: Tissue Value: Whole Plant
  misc_feature: MA Experiment 20000352 PARAMETER Experiment Name: At_Drought_Sub_P Parameter: Treatment Value: Drought vs. No Drought
gattattttctcttctcgttgaaattgatcccttctaatatttttctttttcttcttcttcttcttcataatttgtatcaatcatttcaaagaaccattctctctgtatatctccttccagtttagctatataaaggagcggtttttaaaaatatcttagaactcgattgattttgatagcttatagccaatcaagatttcttaagctctgtgaaaaatgggatgctttgcatcaacgccgaaagactcaggtgggaacagaagaaagcctacaagcatcggtgaggtttcagtatatgtacctggtttaaggatacccagagcggtggattttttgcagtcacttggtgatcaattaccgaagactttagtggaacgcttgacagctttaagaacgcgtatagtagtgatggctaatcaagaaggacctacaattacgagaactaggagaaagacacaacatggaggttcaacgctcttggatctccatcaagctttgctagattatctacctgttgtcttgggattaactaaagatggtagccatctacagtttaaagtgcaatttaattgggtaaatcaggaggatgaggaagaggaaacagagatgtcaaacgtttggtatgaagttttatctgttttgcatctaatggcaatgctacaaatgtctcaagccaatttactgcttcttcctagaggttctagtgatggtcacaatcatccgaaagtatccgaagaaaacagacgaacttcgattgatatcttcttaaaagcagctggatatcttgattgtgccgttaagcatgttctcccccagttttctgctgagcaaaggagaagtttaccagttgacttagcagaaggaactctacgggctctttgcttgcaagcacttggccagggtgttgatatccaacttggcatggcgattgatagctcaaaggccactcttgcagtaaaacgaagactttcatgtgaaatggtgaaatattggcagcaggcacaagataatttaatgaatctcccgttagcaaatggttggggagaaaagcatggactctttgttaagtggaagtatgttgaagctaaggtactgttacattctttctctcttgctcttatactcctttcatatctgaatttgtctgttccttttgtcttgaggtatggccctttcttgtaaactgtctctataagacccaaattttgtttttgcttataatatgatccatatcattattatttgagaaccatgagtcttttaagagagtctatctctcgatgtggagttaagtgctataggtgacgaaggttcatgtgtctaatgtcttgtttcatcttctggaatcttttggatcaggctgcggcttactactatcatggtttgattcttgatgaaggaaacacagagaagtcacatggcatggcagttgctgctttacaagctgcagatgaatgtttcaaagaaagtaagaaagcatccgaagcattcaacgcctctgcgcctacttcaagaacaccgcccctctttggaacaatgaaatatctaactgagaaaatcccgaaagatacttcgagtaaagtcaggataaaccgtgatctatactcttatgaaaaaatcatggagacagcaccaacacttcctgatttcgctttggcattgaaaccagatgagtatcaacttccactcgccgaagcttcgtagtctgaagatgctcaaagcgcttcgaaccaactttaaggagcaaacgaagagagagagagagatgtgtaaaccttgtatagccaaaaaatcagtggtttccaatggctgcctgcaaattatggtatggctatagaatttacccaacaggtttctatactgtgtgagaaaaaacacttatcaaaattgggtttggatcagtttacatgagagagatctttgtatgttaatgtactaatatatttcttcaataaagcattatttttttccc

SEQ ID NO: 20616 - protein, 321 aa, Arabidopsis thaliana
  peptide (1)..(321): Ceres Seq. ID no. 15175958
  misc_feature (1)..(293): Homolog of NCBI NO: 30684716 NR Description: expressed protein [Arabidopsis thaliana]
  misc_feature (1)..(303): Homolog of NCBI NO: 38344447 NR Description: OSJNBa0038O10.19 [Oryza sativa (japonica
  misc_feature (1)..(303): Homolog of NCBI NO: 15219459 NR Description: expressed protein [Arabidopsis thaliana]
  misc_feature (1)..(303): Homolog of NCBI NO: 15220908 NR Description: hypothetical protein [Arabidopsis thaliana]
  misc_feature (1)..(303): Homolog of NCBI NO: 25372891 NR Description: protein F2H15.16 [imported] - Arabidopsis
MGCFASTPKDSGGNRRKPTSIGEVSVYVPGLRIPRAVDFLQSLGDQLPKTLVERLTALRTRIVVMANQEGPTITRTRRKTQHGGSTLLDLHQALLDYLPVVLGLTKDGSHLQFKVQFNWVNQEDEEEETEMSNVWYEVLSVLHLMAMLQMSQANLLLLPRGSSDGHNHPKVSEENRRTSIDIFLKAAGYLDCAVKHVLPQFSAEQRRSLPVDLAEGTLRALCLQALGQGVDIQLGMAIDSSKATLAVKRRLSCEMVKYWQQAQDNLMNLPLANGWGEKHGLFVKWKYVEAKVLLHSFSLALILLSYLNLSVPFVLRYGPFL

SEQ ID NO: 20617 - protein, 257 aa, Arabidopsis thaliana
  peptide (1)..(257): Ceres Seq. ID no. 15175959
  misc_feature (1)..(229): Homolog of NCBI NO: 30684716 NR Description: expressed protein [Arabidopsis thaliana]
  misc_feature (1)..(239): Homolog of NCBI NO: 38344447 NR Description: OSJNBa0038O10.19 [Oryza sativa (japonica
  misc_feature (1)..(239): Homolog of NCBI NO: 15219459 NR Description: expressed protein [Arabidopsis thaliana]
  misc_feature (1)..(239): Homolog of NCBI NO: 15220908 NR Description: hypothetical protein [Arabidopsis thaliana]
  misc_feature (1)..(239): Homolog of NCBI NO: 25372891 NR Description: protein F2H15.16 [imported] - Arabidopsis
MANQEGPTITRTRRKTQHGGSTLLDLHQALLDYLPVVLGLTKDGSHLQFKVQFNWVNQEDEEEETEMSNVWYEVLSVLHLMAMLQMSQANLLLLPRGSSDGHNHPKVSEENRRTSIDIFLKAAGYLDCAVKHVLPQFSAEQRRSLPVDLAEGTLRALCLQALGQGVDIQLGMAIDSSKATLAVKRRLSCEMVKYWQQAQDNLMNLPLANGWGEKHGLFVKWKYVEAKVLLHSFSLALILLSYLNLSVPFVLRYGPFL

SEQ ID NO: 20618 - protein, 191 aa, Arabidopsis thaliana
  peptide (1)..(191): Ceres Seq. ID no. 15175960
  misc_feature (1)..(173): Homolog of NCBI NO: 25372891 NR Description: protein F2H15.16 [imported] - Arabidopsis
  misc_feature (1)..(173): Homolog of NCBI NO: 15219459 NR Description: expressed protein [Arabidopsis thaliana]
  misc_feature (1)..(173): Homolog of NCBI NO: 15220908 NR Description: hypothetical protein [Arabidopsis thaliana]
  misc_feature (1)..(163): Homolog of NCBI NO: 30684716 NR Description: expressed protein [Arabidopsis thaliana]
  misc_feature (1)..(173): Homolog of NCBI NO: 38344447 NR Description: OSJNBa0038O10.19 [Oryza sativa (japonica
MSNVWYEVLSVLHLMAMLQMSQANLLLLPRGSSDGHNHPKVSEENRRTSIDIFLKAAGYLDCAVKHVLPQFSAEQRRSLPVDLAEGTLRALCLQALGQGVDIQLGMAIDSSKATLAVKRRLSCEMVKYWQQAQDNLMNLPLANGWGEKHGLFVKWKYVEAKVLLHSFSLALILLSYLNLSVPFVLRYGPFL

SEQ ID NO: 20619 - DNA, 1864 bp, Arabidopsis thaliana
  misc_feature (1)..(1864): Ceres Seq. ID no. 15175507
attttttgggggccatagtgacttgaggacggtgtacacatccatagtaaagggtacaatcgagcaagttagaatgatgttattgggaagttcacaatgaaaatccaaataatagtaccgctgcaataatctcttctcctgaggctgtcctgctttgctgcttaaaaccgtattcagttattgttctaaaaaaatgattcatacctactgaaaaccgttctcactctatctaattccttctatttttttcttttttctaaatgaaccctcacccagcattcaccatacgcagtttattttagcagttgatatactatatcaaactaagaaccatgtgaagatagttctctatcatagcaacctctagcatcgtagggatctattttccatttttaacaatcaggttaatagcttgagcttgggtgccttaaatgctcactatttttcatatggggtgatgtgcatcaagcggacggtctggcaagattgacaaatcattgtgctttctcccccggtaagaattgcatcttgacacatcagcttcaaagcagatgctgaccgaaagaattagcattcttttttgggatgtttagaagtcctatcatgtgatctgttcaaaagggagtcttaaaaagaaacagttccaaaacctcaaataatatacatatagatatcaaaaggttgtataatgttgttgccttgtttgctgagtggttctattgattaattaaagctctagcatattgttaaggtttcgacctgagtttgttccatgattttagtggaacgactcaatttcttattgatgggataacaggcagctgttgatcaaatcgaaccctggcgaagttgtgaagcctggtgaggaatccgattcattgtgttcagggctgcttgcggtttgaatttgacagtatttgtgtttgtgccagtgatcagccggctacactaccacctgaaccggttgcattgcatagactcttccgagtttaacaagtaggtgttggtagttcgtcaggggcgtttagcttttgccaatgggggatttggctgcattttgttaccttttggtatatgtactgattatattatttattggtctataagaccactggggtactaaactatattgctgattgttaagataagatctgtgatgatttttgccaagtgagcacctgatcttttttatgcaatcaatttcaggtgtgtgtagacaacctattttttagttgatatagatggtgctgatttgttagttaaagctattgtctttgatggtcacacttttattggaaatctgcaattccttttatgttgtaacaaaatttaatatctaaaaatgttgttggtgtcttggtggtaccgtgtcagttgtcaacagtccaattccattctcatggctttgattctgacgtatgattatgattattttaaatttgtgcagattcattcaaggcaatcaacgatgaaggcatgcccatgtatcagaggcccttcatgaagggcaagctgtacatccacttctcggtggagttcccggactcattgagcccggagcagtggaatgccctggaggatgttctcccacccaagccagtatcacagtacactgacatagagctggacgagtgcgaggagacaatgccctacgacgtgaacatcgaagaggagatgcggaggcagcagcagcaccaggaggcctacgacgaggatgatgatgtgccaggcggtgggcagagggtgcagtgcgcccagcagtaggcagcttacgtcaaatttgctgtttcgctttgggcgactattgagtttacccgcttgtattggtctgatgatacttcggttacaagagtgcagtattact

SEQ ID NO: 20620 - protein, 95 aa, Arabidopsis thaliana
  peptide (1)..(95): Ceres Seq. ID no. 15175508
MPMYQRPFMKGKLYIHFSVEFPDSLSPEQWNALEDVLPPKPVSQYTDIELDECEETMPYDVNIEEEMRRQQQHQEAYDEDDDVPGGGQRVQCAQQ

SEQ ID NO: 20621 - protein, 93 aa, Arabidopsis thaliana
  peptide (1)..(93): Ceres Seq. ID no. 15175509
MYQRPFMKGKLYIHFSVEFPDSLSPEQWNALEDVLPPKPVSQYTDIELDECEETMPYDVNIEEEMRRQQQHQEAYDEDDDVPGGGQRVQCAQQ

SEQ ID NO: 20622 - protein, 87 aa, Arabidopsis thaliana
  peptide (1)..(87): Ceres Seq. ID no. 15175510
MKGKLYIHFSVEFPDSLSPEQWNALEDVLPPKPVSQYTDIELDECEETMPYDVNIEEEMRRQQQHQEAYDEDDDVPGGGQRVQCAQQ

SEQ ID NO: 20623 - DNA, 2477 bp, Arabidopsis thaliana
  misc_feature (1)..(2477): Ceres Seq. ID no. 14309904
  misc_feature: MA Experiment ID: 20000173 Result: Down-regulated in Transcription
  misc_feature: MA Experiment 20000173 PARAMETER Experiment Name: At_42deg_Heat_P Parameter: Age (day) Value: 14
  misc_feature: MA Experiment 20000173 PARAMETER Experiment Name: At_42deg_Heat_P Parameter: Organism Value: A. thaliana
  misc_feature: MA Experiment 20000173 PARAMETER Experiment Name: At_42deg_Heat_P Parameter: Plant Line Value: WS
  misc_feature: MA Experiment 20000173 PARAMETER Experiment Name: At_42deg_Heat_P Parameter: Temperature (deg C) Value: 42 vs. 22
  misc_feature: MA Experiment 20000173 PARAMETER Experiment Name: At_42deg_Heat_P Parameter: Timepoint (hr) Value: 6
  misc_feature: MA Experiment 20000173 PARAMETER Experiment Name: At_42deg_Heat_P Parameter: Tissue Value: Aerial
  misc_feature: MA Experiment ID: 20000184 Result: Down-regulated in Transcription
  misc_feature: MA Experiment 20000184 PARAMETER Experiment Name: At_Shoots__P Parameter: Age (day) Value: 7
  misc_feature: MA Experiment 20000184 PARAMETER Experiment Name: At_Shoots__P Parameter: Tissue Value: Shoots vs. Whole Plant
  misc_feature: MA Experiment ID: 20000439 Result: Up-regulated in Transcription
  misc_feature: MA Experiment 20000439 PARAMETER Experiment Name: At_Roots__P Parameter: Age (day) Value: 14 vs. 21
  misc_feature: MA Experiment 20000439 PARAMETER Experiment Name: At_Roots__P Parameter: Organism Value: A. thaliana
  misc_feature: MA Experiment 20000439 PARAMETER Experiment Name: At_Roots__P Parameter: Tissue Value: Roots vs. Whole Plant
  misc_feature: MA Experiment ID: 20001451 Result: Down-regulated in Transcription
  misc_feature: MA Experiment 20001451 PARAMETER Experiment Name: At_Far-red-induction_P Parameter: Age (day) Value: 7
  misc_feature: MA Experiment 20001451 PARAMETER Experiment Name: At_Far-red-induction_P Parameter: Light Value: Far-red vs. White
  misc_feature: MA Experiment 20001451 PARAMETER Experiment Name: At_Far-red-induction_P Parameter: Organism Value: A. thaliana
  misc_feature: MA Experiment 20001451 PARAMETER Experiment Name: At_Far-red-induction_P Parameter: Plant Line Value: Columbia
  misc_feature: MA Experiment 20001451 PARAMETER Experiment Name: At_Far-red-induction_P Parameter: Timepoint (hr) Value: 24
  misc_feature: MA Experiment 20001451 PARAMETER Experiment Name: At_Far-red-induction_P Parameter: Tissue Value: Whole Plant
aaattcaagaaaaaaaaaaagtggcgcctctgcaatttcaattttcaaatcctattttttctctcgcttcccggagaacggaaccctaatttctcgacgcagacatgattttgagaactccgcagccgaagaggctcaggtccgacgccggagaaagccccgtccccaccggcgctactggttccggcaatcagcttgtcatctacgaagattctcctcttcctgctcctgctcctgctccgctgcaatcatctcatgatcattcggcagatcaacacctttgcacctatcaatgccgccaaatggttaaagctgatgttctagatgccttaagcaaagcagagaaacaagttgaagaatctcaaaccaaattactgactcttaatgccaacttcaccgaagcagatgctgaaagaaagcattttcgagataagttcctatactcagagcaagaacttgctgctgccaaagcgcgtgagaagatgcttcaggagcagttacttatggagatcaacaattctcaagagcggtataccaaagaactacaatcttgccgtgaactggaggtaaaacttcaaaatgaaatgaaccttcgaaagaaagcggagtcttttgctgcaacagctgaggaaaaagctaaacttttggaggataaactgactcagctatctggaagtgtcgacagggagaagaaacgtctcaacaatgatattgctcaactgggtaaagaggcaaagctttctgtgtctaggattggtgcagatcttgaaaggatgcaatgtagggcacaaaatgcagagacggaatcaaatcttttaagatcgcagcttgagcatcttaaactgaaatttgacgagtgtttgcaagaaaagactgaagtagacaagaagctgtcgtcattcacttcggaggcagcatcttcttcagataacagtgtattggttaaacatcttcaggaagaacttaaacgctatgaagctgaagtgcgagaagctagaaagttaaaatcacggcatttagatgcggagttgttgaatgtgaacttattagaagaacaaagccgtagggagagggcagagtcagagttatcaaaatttcatgacttgcagctaagcatggaaaagttggagaatgaattgtcctcttggaagtcattgctaaatgacattcctggtgtgtcctgtcctgatgacatagttatgagattctcggtgctacagaatgaggtggttcaaagcactatgaagattggggaagcaagtacccgtattaaacaactggaggagacgctggaggctatacaacttggcagacagaatgctgtaagtgaggctgcattagcgaaagagaaatctgaggctctcaaaacagacgtgaagagaattgaagtaatgctcactttggtcacggaggagaaagaacaatagaaagctgttgttaatgaattaaggaagtcaaacagtgaaggatctgtgtctggagccgcagatggagcccttattcaggggtttgaatcttctcttgcaaagaaggagaactatattaaggatttagagcaggatctaaatcaactgaaggatgtcaataatcgtcaacgtactgaaatagaacttctaaatgagaaactagttgatgaagcaaggaggaataagtcgctggaaagggatagtgatcgtcttcgctctgagatctctttactggagtcaaagctgggtcatggtgattattctgccgcaaatacaagggttttgcgcatggtgaatactcttggtgttgaaaacgaggcaaaacaaacaatagaggctttacaagctgagttacagaagacaaaagaaagacttcaagctgttgaagaattaaagagccagtctggagatgctgggaagctagttgactctcatataactggaaagattgctcaactaaaagagcaaattgctacgcttgaaaaacgtgaagagaggtacaaaactgtttttgctgatagaatttccgtgtttagaagggcttgttgtgagctttttggttataagattgtaatggacgaacatcagcgtcccaatggaatcccagtgactcggtttactctccagtctatatatgctcaaagtgatgatgaaaaactcgagtttgaatacgagtcaggaaacaccagtattctaaacaatgagtatgcctctcagggcgacatagcgaagcagatagaaatattcatcaggaaattcaactcgattccagcttttacagccaacttaacgatggaatcattcaaccgtcggactctatattgagagcactgcgtccttatttccaactctgtgttttgtatatttctaaagcctgctgaatagaaactgaaactcgaaagccgcagcttagaacactggccttatctatatctacctctggttcgttatgtctgctacaattgtggtgtcagtaactctattttggtatgaaagaaactggtttcgatt

SEQ ID NO: 20624 - protein, 440 aa, Arabidopsis thaliana
  peptide (1)..(440): Ceres Seq. ID no. 14309905
  misc_feature (66)..(440): Pfam Name: Myosin tail Pfam Description: Myosin tail
  misc_feature (43)..(440): Homolog of NCBI NO: 4505065 NR Description: MAD1-like 1
  misc_feature (66)..(440): Homolog of NCBI NO: 7511962 NR Description: microtubule binding protein D-CLIP-190 - fruit
  misc_feature (78)..(440): Homolog of NCBI NO: 4583429 NR Description: spindle checkpoint protein Xmad1 [Xenopus laevis]
  misc_feature (29)..(440): Homolog of NCBI NO: 19112308 NR Description: hypothetical protein [Schizosaccharomyces pombe]
  misc_feature (82)..(440): Homolog of NCBI NO: 4580769 NR Description: mitotic checkpoint protein isoform MAD1a [Mus
  misc_feature (43)..(440): Homolog of NCBI NO: 29725736 NR Description: mitotic checkpoint protein [Cricetulus griseus]
  misc_feature (43)..(440): Homolog of NCBI NO: 4580767 NR Description: mitotic checkpoint protein isoform MAD1a [Homo
  misc_feature (43)..(440): Homolog of NCBI NO: 4416457 NR Description: mitotic checkpoint protein [Homo sapiens]
  misc_feature (93)..(440): Homolog of NCBI NO: 31218457 NR Description: ENSANGP00000011542 [Anopheles gambiae]
  misc_feature (1)..(440): Homolog of NCBI NO: 34907340 NR Description: P0471B04.4 [Oryza sativa (japonica
MILRTPQPKRLRSDAGESPVPTGATGSGNQLVIYEDSPLPAPAPAPLQSSHDHSADQHLCTYQCRQMVKADVLDALSKAEKQVEESQTKLLTLNANFTEADAERKHFRDKFLYSEQELAAAKAREKMLQEQLLMEINNSQERYTKELQSCRELEVKLQNEMNLRKKAESFAATAEEKAKLLEDKLTQLSGSVDREKKRLNNDIAQLGKEAKLSVSRIGADLERMQCRAQNAETESNLLRSQLEHLKLKFDECLQEKTEVDKKLSSFTSEAASSSDNSVLVKHLQEELKRYEAEVREARKLKSRHLDAELLNVNLLEEQSRRERAESELSKFHDLQLSMEKLENELSSWKSLLNDIPGVSCPDDIVMRFSVLQNEVVQSTMKIGEASTRIKQLEETLEAIQLGRQNAVSEAALAKEKSEALKTDVKRIEVMLTLVTEEKEQ

SEQ ID NO: 20625 - protein, 374 aa, Arabidopsis thaliana
  peptide (1)..(374): Ceres Seq. ID no. 14309906
  misc_feature (1)..(374): Pfam Name: Myosin tail Pfam Description: Myosin tail
  misc_feature (1)..(374): Homolog of NCBI NO: 4505065 NR Description: MAD1-like 1
  misc_feature (1)..(374): Homolog of NCBI NO: 7511962 NR Description: microtubule binding protein D-CLIP-190 - fruit
  misc_feature (12)..(374): Homolog of NCBI NO: 4583429 NR Description: spindle checkpoint protein Xmad1 [Xenopus laevis]
  misc_feature (1)..(374): Homolog of NCBI NO: 19112308 NR Description: hypothetical protein [Schizosaccharomyces pombe]
  misc_feature (16)..(374): Homolog of NCBI NO: 4580769 NR Description: mitotic checkpoint protein isoform MAD1a [Mus
  misc_feature (1)..(374): Homolog of NCBI NO: 29725736 NR Description: mitotic checkpoint protein [Cricetulus griseus]
  misc_feature (1)..(374): Homolog of NCBI NO: 4580767 NR Description: mitotic checkpoint protein isoform MAD1a [Homo
  misc_feature (1)..(374): Homolog of NCBI NO: 4416457 NR Description: mitotic checkpoint protein [Homo sapiens]
  misc_feature (27)..(374): Homolog of NCBI NO: 31218457 NR Description: ENSANGP00000011542 [Anopheles gambiae]
  misc_feature (1)..(374): Homolog of NCBI NO: 34907340 NR Description: P0471B04.4 [Oryza sativa (japonica
MVKADVLDALSKAEKQVEESQTKLLTLNANFTEADAERKHFRDKFLYSEQELAAAKAREKMLQEQLLMEINNSQERYTKELQSCRELEVKLQNEMNLRKKAESFAATAEEKAKLLEDKLTQLSGSVDREKKRLNNDIAQLGKEAKLSVSRIGADLERMQCRAQNAETESNLLRSQLEHLKLKFDECLQEKTEVDKKLSSFTSEAASSSDNSVLVKHLQEELKRYEAEVREARKLKSRHLDAELLNVNLLEEQSRRERAESELSKFHDLQLSMEKLENELSSWKSLLNDIPGVSCPDDIVMRFSVLQNEVVQSTMKIGEASTRIKQLEETLEAIQLGRQNAVSEAALAKEKSEALKTDVKRIEVMLTLVTEEKEQ

SEQ ID NO: 20626 - protein, 314 aa, Arabidopsis thaliana
  peptide (1)..(314): Ceres Seq. ID no. 14309907
  misc_feature (1)..(314): Pfam Name: Myosin tail Pfam Description: Myosin tail
  misc_feature (1)..(314): Homolog of NCBI NO: 4505065 NR Description: MAD1-like 1
  misc_feature (1)..(314): Homolog of NCBI NO: 7511962 NR Description: microtubule binding protein D-CLIP-190 - fruit
  misc_feature (1)..(314): Homolog of NCBI NO: 4583429 NR Description: spindle checkpoint protein Xmad1 [Xenopus laevis]
  misc_feature (1)..(314): Homolog of NCBI NO: 19112308 NR Description: hypothetical protein [Schizosaccharomyces pombe]
  misc_feature (1)..(314): Homolog of NCBI NO: 4580769 NR Description: mitotic checkpoint protein isoform MAD1a [Mus
  misc_feature (1)..(314): Homolog of NCBI NO: 29725736 NR Description: mitotic checkpoint protein [Cricetulus griseus]
  misc_feature (1)..(314): Homolog of NCBI NO: 4580767 NR Description: mitotic checkpoint protein isoform MAD1a [Homo
  misc_feature (1)..(314): Homolog of NCBI NO: 4416457 NR Description: mitotic checkpoint protein [Homo sapiens]
  misc_feature (1)..(314): Homolog of NCBI NO: 31218457 NR Description: ENSANGP00000011542 [Anopheles gambiae]
  misc_feature (1)..(314): Homolog of NCBI NO: 34907340 NR Description: P0471B04.4 [Oryza sativa (japonica
MLQEQLLMEINNSQERYTKELQSCRELEVKLQNEMNLRKKAESFAATAEEKAKLLEDKLTQLSGSVDREKKRLNNDIAQLGKEAKLSVSRIGADLERMQCRAQNAETESNLLRSQLEHLKLKFDECLQEKTEVDKKLSSFTSEAASSSDNSVLVKHLQEELKRYEAEVREARKLKSRHLDAELLNVNLLEEQSRRERAESELSKFHDLQLSMEKLENELSSWKSLLNDIPGVSCPDDIVMRFSVLQNEVVQSTMKIGEASTRIKQLEETLEAIQLGRQNAVSEAALAKEKSEALKTDVKRIEVMLTLVTEEKEQ

SEQ ID NO: 20627 - DNA, 1240 bp, Arabidopsis thaliana
  misc_feature (1)..(1240): Ceres Seq. ID no. 15175965
gagctattcagtactacagaggtctcgggttcgaagccatctttttcctaaatccccaatttttttttttttccctcgtttccgaatcttttaccggcgagactctgccatggattcaggcgaacaaaagtctaagcggaggttccaaccaaatcctccgaggccttctcgccgtcttccgatcgctccaacctcaaacaccgaagctgaggaggatgaagagaatataaaagcatctcgccaatttgacagacgtatcgtcggcaggagacccaaaaccgaaacgaaagcttcttctcctgaagttgcattccaaccaagcttgtcaccacttgcaataaggtcctttggtgttcctaaagaagatgacaagcccaattctgatgttaatccgtcttctcctgctagtattcttcctgctgtttcgtctgttactgctgcccaagaagatggagaagaggttcataattttgttacaagaactggggatgactacgttgaaccttgggattatagaaactcctactatcctactgttcttcctttgagaaagcctaactctggtgatatagaacttcttgaccaggaggaatttggggaggtggctaaaaaccgtgattatgatgagaacaccatcaactccgcagaagaactcggtctgacatcggtgcaacacagcaaaaaacagatgtttatctttaagatcccaaactgtctccctgtagtgaagcaaacgacaggagcaaccaccaagagatcggtacgggagtatagttcagggataagcaacccttttgaaggtttaccagagggattcatgggcaaaatgctggtttacaagagcggtgctgtcaagttgaaagttggagatgccctctttgatgtctcgccaggtccaggtacaaaaatccctaatgatgtggtagcaatagacatcaaagggaggaactgcagtcgcattggttcttcagcgaagtttgttactgttactcccgatgttgagtctcttttgaaccctgcttcagacatggaaacacagaagtgaaggttgctctggaaatagccggtcctgttcatacaaggatgtgaaaaagcgtagtattgaccacttagattctgtatctacaaactaatcttcaactatgatcgtaaaaaaactcttcttgcctccttggtgtcttcttttgtaataagagattcagtagttgttgggataaaagaaaatgctcaacattttgac

SEQ ID NO: 20628 - protein, 347 aa, Arabidopsis thaliana
  peptide (1)..(347): Ceres Seq. ID no. 15175966
  misc_feature (226)..(296): Pfam Name: RNA polymerase III RPC4 Pfam Description: RNA polymerase III RPC4
  misc_feature (194)..(337): Homolog of NCBI NO: 34907504 NR Description: B1099D03.22 [Oryza sativa (japonica
  misc_feature (164)..(344): Homolog of NCBI NO: 21740741 NR Description: OSJNBa0072K14.6 [Oryza sativa (japonica
  misc_feature (89)..(337): Homolog of NCBI NO: 15242400 NR Description: hypothetical protein [Arabidopsis thaliana]
  misc_feature (295)..(347): Homolog of NCBI NO: 7486060 NR Description: hypothetical protein F24A6.20 - Arabidopsis
  misc_feature (97)..(296): Homolog of NCBI NO: 7486060 NR Description: hypothetical protein F24A6.20 - Arabidopsis
  misc_feature (295)..(347): Homolog of NCBI NO: 15234965 NR Description: hypothetical protein [Arabidopsis thaliana]
  misc_feature (89)..(296): Homolog of NCBI NO: 15234965 NR Description: hypothetical protein [Arabidopsis thaliana]
SYSVLQRSRVRSHLFPKSPIFFFFPRFRIFYRRDSAMDSGEQKSKRRFQPNPPRPSRRLPIAPTSNTEAEEDEENIKASRQFDRRIVGRRPKTETKASSPEVAFQPSLSPLAIRSFGVPKEDDKPNSDVNPSSPASILPAVSSVTAAQEDGEEVHNFVTRTGDDYVEPWDYRNSYYPTVLPLRKPNSGDIELLDQEEFGEVAKNRDYDENTINSAEELGLTSVQHSKKQMFIFKIPNCLPVVKQTTGATTKRSVREYSSGISNPFEGLPEGFMGKMLVYKSGAVKLKVGDALFDVSPGPGTKIPNDVVAIDIKGRNCSRIGSSAKFVTVTPDVESLLNPASDMETQK

SEQ ID NO: 20629 - protein, 311 aa, Arabidopsis thaliana
  peptide (1)..(311): Ceres Seq. ID no. 15175967
  misc_feature (190)..(260): Pfam Name: RNA polymerase III RPC4 Pfam Description: RNA polymerase III RPC4
  misc_feature (158)..(301): Homolog of NCBI NO: 34907504 NR Description: B1099D03.22 [Oryza sativa (japonica
  misc_feature (128)..(308): Homolog of NCBI NO: 21740741 NR Description: OSJNBa0072K14.6 [Oryza sativa (japonica
  misc_feature (53)..(301): Homolog of NCBI NO: 15242400 NR Description: hypothetical protein [Arabidopsis thaliana]
  misc_feature (259)..(311): Homolog of NCBI NO: 7486060 NR Description: hypothetical protein F24A6.20 - Arabidopsis
  misc_feature (61)..(260): Homolog of NCBI NO: 7486060 NR Description: hypothetical protein F24A6.20 - Arabidopsis
  misc_feature (259)..(311): Homolog of NCBI NO: 15234965 NR Description: hypothetical protein [Arabidopsis thaliana]
  misc_feature (53)..(260): Homolog of NCBI NO: 15234965 NR Description: hypothetical protein [Arabidopsis thaliana]
MDSGEQKSKRRFQPNPPRPSRRLPIAPTSNTEAEEDEENIKASRQFDRRIVGRRPKTETKASSPEVAFQPSLSPLAIRSFGVPKEDDKPNSDVNPSSPASILPAVSSVTAAQEDGEEVHNFVTRTGDDYVEPWDYRNSYYPTVLPLRKPNSGDIELLDQEEFGEVAKNRDYDENTINSAEELGLTSVQHSKKQMFIFKIPNCLPVVKQTTGATTKRSVREYSSGISNPFEGLPEGFMGKMLVYKSGAVKLKVGDALFDVSPGPGTKIPNDVVAIDIKGRNCSRIGSSAKFVTVTPDVESLLNPASDMETQK

SEQ ID NO: 20630 - DNA, 2500 bp, Arabidopsis thaliana
  misc_feature (1)..(2500): Ceres Seq. ID no. 14315774
  misc_feature: MA Experiment ID: 20000180 Result: Down-regulated in Transcription
  misc_feature: MA Experiment 20000180 PARAMETER Experiment Name: At_Germinating_Seeds_P Parameter: Age (hr) Value: 24 vs. 0
  misc_feature: MA Experiment 20000180 PARAMETER Experiment Name: At_Germinating_Seeds_P Parameter: Tissue Value: Germinating Seeds
ggcgcaacgttgtaacaaaaatcgtcctctcagttccaatctctctcagattctcctcctcatcacaattcctcactcctttgattcttgtcccagagtcacgtcctctcctattcgggtctctacagagtctaactctgacccgacccgacccaattcactaaatggaggacgaaccaaagctcccaaccgatgacggtccaactttcgacgaatcgtgtaaaatctcgtctgagatattgaccgccggtgatcggaaattacttaaagttgaactcctcaaagaggagaccacgctcgtatcgtggaagaagcttatggatgaggctagcaaagaaaacggcggcttgttcgtttcggctcccgaacggcctcttaatgccaaccctaacctcgagtttcgccttgcaccgggggcacaaacagagaatgaaatggtgaatcaacctcatcctaatcgtcttaactctgttatagccaagattgagagactttatatgggtaaagacggtagtgatggggaagagttagacggtgctcctgacgatgatgactatgacactgaagattcatttatcgatgatgctgaattggatgagtattttgaagttgataattcgccaattaaacatgatggattttttgtcaatagaggaaagttagaacgaattgaaccttcagctacatcgaaccagcagcaaccaaagaaaaggcgaaggaaggagtcagcaaaaccttgtggcgatgttgttgatgtatccagaaaacaagccaagatggctaagacggctgggggaaaggatcaatctgcttctcctgggccctcttcgaagaaaatttccaatgattcaaagacggtgcaagattcgttttcccctttgaaagcgcaaaatggcaatgattccttagttttggaaaatgtgaagcatactgataaagcgaatcaccagccaatgaatgccacgagtccgaagtcaaaggcagctggatcttctggcccccttcatccgaagtgcagcagcaaaagtgttcatgaacaatctaattcccctccaggaaaatctcggccaaatgtttcggcaaaatcagcagtagttcgtcagcaagttaacaatggcatgcctgacctggacactgcaacggaaagcaaaacatctattcaaatatctaaaaaaagcggttcaaatggccggcctaaatactcgacacttgagaaagccatcaggaatttggagaaggtggtcgctgaatcaaggcctcctgctgccactgagaatcaagatgccgatatctcttcccaagcagtgaagaggggattgccaggagatgtaaaattgcatcttgctaaagttgctagaatcgcgtatgcgagccaaggtgaaatatcaggagagttaatcaatcgtctcatgggcattgtcggtcatctaatacagattagatcacttaagaggaacttgaaaatcatgattgattcgatcgtcactgcaaatcgagaaaaagatactagatttcagcggatcaagagtgaaataactgagatgttaaaaacacaagttccacttatggaatcccaggaaacaaatcaagaagctggaacatcagacgattttcaggatgttggatctcttggaaagtcacctgtgaagaagtttgtcatggatgtggcgctggaggaaaaattgtgtgatctatatgacgtgtttgttgagggaatggatgaacattcaggttcacaaatcagaaagctttattcagatctagctcaactctggcccaatagtttagttgacaatcatgagatcaggcgtgccatttgccgggaaaaggaaaggcggagagcattggaaggaaacattgggaaggagatggatcaaacgaagataacaaagaagaaacagacacaattggtccctaaatctgagggtattacttatcccgacaaggcttcaggtgttgaagttaaagcaagtgttgtcctaactgcaaccaccacgtccttagtggactgtcaacctgcagcagactcgtcctttgaaaggtcaaagcagcaacatgagaaattaaagcgaacttcgagcttaagcaatcctgcagcagaaggaaagaaagtcagaagaaagacagaaccagctctagaagaaactcacctgcccgcagagaaacccctcgttctggccctgaagcggcagacacatctaaaatccaagacacataaacaggtacaggtacatccacagtccaaggcacataaacaggcacaggtacatccaaaggccaagacacagactcctccagacctgaacctgccaagttaggtactacagcttagattttttttctcaaagtctggctctagccttgcctttgtttttcgtagctatagtttcgcttctaatttttgcgcctagtattgattttctagtcgtttcttacgtagaagacgaagtccctctcctctgtacaaattaaagatgttaagagaagctccaattctttc

SEQ ID NO: 20631 - protein, 717 aa, Arabidopsis thaliana
  peptide (1)..(717): Ceres Seq. ID no. 14315775
  misc_feature (337)..(450): Homolog of NCBI NO: 16506638 NR Description: wound-responsive protein 14.05 [Castanea sativa]
  misc_feature (31)..(275): Homolog of NCBI NO: 20161447 NR Description: B1065E10.22 [Oryza sativa (japonica
  misc_feature (317)..(667): Homolog of NCBI NO: 20161447 NR Description: B1065E10.22 [Oryza sativa (japonica
  misc_feature (518)..(717): Homolog of NCBI NO: 4106388 NR Description: unknown [Arabidopsis thaliana]
  misc_feature (116)..(717): Homolog of NCBI NO: 15223894 NR Description: expressed protein [Arabidopsis thaliana]
  misc_feature (17)..(682): Homolog of NCBI NO: 25361037 NR Description: F8K7.2 protein - Arabidopsis thaliana
  misc_feature (17)..(682): Homolog of NCBI NO: 22329715 NR Description: expressed protein [Arabidopsis thaliana]
  misc_feature (1)..(429): Homolog of NCBI NO: 15223894 NR Description: expressed protein [Arabidopsis thaliana]
  misc_feature (1)..(516): Homolog of NCBI NO: 7486999 NR Description: hypothetical protein T14N5.16 - Arabidopsis
MEDEPKLPTDDGPTFDESCKISSEILTAGDRKLLKVELLKEETTLVSWKKLMDEASKENGGLFVSAPERPLNANPNLEFRLAPGAQTENEMVNQPHPNRLNSVIAKIERLYMGKDGSDGEELDGAPDDDDYDTEDSFIDDAELDEYFEVDNSPIKHDGFFVNRGKLERIEPSATSNQQQPKKRRRKESAKPCGDVVDVSRKQAKMAKTAGGKDQSASPGPSSKKISNDSKTVQDSFSPLKAQNGNDSLVLENVKHTDKANHQPMNATSPKSKAAGSSGPLHPKCSSKSVHEQSNSPPGKSRPNVSAKSAVVRQQVNNGMPDLDTATESKTSIQISKKSGSNGRPKYSTLEKAIRNLEKVVAESRPPAATENQDADISSQAVKRGLPGDVKLHLAKVARIAYASQGEISGELINRLMGIVGHLIQIRSLKRNLKIMIDSIVTANREKDTRFQRIKSEITEMLKTQVPLMESQETNQEAGTSDDFQDVGSLGKSPVKKFVMDVALEEKLCDLYDVFVEGMDEHSGSQIRKLYSDLAQLWPNSLVDNHEIRRAICREKERRRALEGNIGKEMDQTKITKKKQTQLVPKSEGITYPDKASGVEVKASVVLTATTTSLVDCQPAADSSFERSKQQHEKLKRTSSLSNPAAEGKKVRRKTEPALEETHLPAEKPLVLALKRQTHLKSKTHKQVQVHPQSKAHKQAQVHPKAKTQTPPDLNLPS

SEQ ID NO: 20632 - protein, 666 aa, Arabidopsis thaliana
  peptide (1)..(666): Ceres Seq. ID no. 14315776
  misc_feature (286)..(399): Homolog of NCBI NO: 16506638 NR Description: wound-responsive protein 14.05 [Castanea sativa]
  misc_feature (1)..(224): Homolog of NCBI NO: 20161447 NR Description: B1065E10.22 [Oryza sativa (japonica
  misc_feature (266)..(616): Homolog of NCBI NO: 20161447 NR Description: B1065E10.22 [Oryza sativa (japonica
  misc_feature (467)..(666): Homolog of NCBI NO: 4106388 NR Description: unknown [Arabidopsis thaliana]
  misc_feature (65)..(666): Homolog of NCBI NO: 15223894 NR Description: expressed protein [Arabidopsis thaliana]
  misc_feature (1)..(631): Homolog of NCBI NO: 25361037 NR Description: F8K7.2 protein - Arabidopsis thaliana
  misc_feature (1)..(631): Homolog of NCBI NO: 22329715 NR Description: expressed protein [Arabidopsis thaliana]
  misc_feature (1)..(378): Homolog of NCBI NO: 15223894 NR Description: expressed protein [Arabidopsis thaliana]
  misc_feature (1)..(465): Homolog of NCBI NO: 7486999 NR Description: hypothetical protein T14N5.16 - Arabidopsis
MDEASKENGGLFVSAPERPLNANPNLEFRLAPGAQTENEMVNQPHPNRLNSVIAKIERLYMGKDGSDGEELDGAPDDDDYDTEDSFIDDAELDEYFEVDNSPIKHDGFFVNRGKLERIEPSATSNQQQPKKRRRKESAKPCGDVVDVSRKQAKMAKTAGGKDQSASPGPSSKKISNDSKTVQDSFSPLKAQNGNDSLVLENVKHTDKANHQPMNATSPKSKAAGSSGPLHPKCSSKSVHEQSNSPPGKSRPNVSAKSAVVRQQVNNGMPDLDTATESKTSIQISKKSGSNGRPKYSTLEKAIRNLEKVVAESRPPAATENQDADISSQAVKRGLPGDVKLHLAKVARIAYASQGEISGELINRLMGIVGHLIQIRSLKRNLKIMIDSIVTANREKDTRFQRIKSEITEMLKTQVPLMESQETNQEAGTSDDFQDVGSLGKSPVKKFVMDVALEEKLCDLYDVFVEGMDEHSGSQIRKLYSDLAQLWPNSLVDNHEIRRAICREKERRRALEGNIGKEMDQTKITKKKQTQLVPKSEGITYPDKASGVEVKASVVLTATTTSLVDCQPAADSSFERSKQQHEKLKRTSSLSNPAAEGKKVRRKTEPALEETHLPAEKPLVLALKRQTHLKSKTHKQVQVHPQSKAHKQAQVHPKAKTQTPPDLNLPS

SEQ ID NO: 20633 - protein, 627 aa, Arabidopsis thaliana
  peptide (1)..(627): Ceres Seq. ID no. 14315777
  misc_feature (247)..(360): Homolog of NCBI NO: 16506638 NR Description: wound-responsive protein 14.05 [Castanea sativa]
  misc_feature (1)..(185): Homolog of NCBI NO: 20161447 NR Description: B1065E10.22 [Oryza sativa (japonica
  misc_feature (227)..(577): Homolog of NCBI NO: 20161447 NR Description: B1065E10.22 [Oryza sativa (japonica
  misc_feature (428)..(627): Homolog of NCBI NO: 4106388 NR Description: unknown [Arabidopsis thaliana]
  misc_feature (26)..(627): Homolog of NCBI NO: 15223894 NR Description: expressed protein [Arabidopsis thaliana]
  misc_feature (1)..(592): Homolog of NCBI NO: 25361037 NR Description: F8K7.2 protein - Arabidopsis thaliana
  misc_feature (1)..(592): Homolog of NCBI NO: 22329715 NR Description: expressed protein [Arabidopsis thaliana]
  misc_feature (1)..(339): Homolog of NCBI NO: 15223894 NR Description: expressed protein [Arabidopsis thaliana]
  misc_feature (1)..(426): Homolog of NCBI NO: 7486999 NR Description: hypothetical protein T14N5.16 - Arabidopsis
MVNQPHPNRLNSVIAKIERLYMGKDGSDGEELDGAPDDDDYDTEDSFIDDAELDEYFEVDNSPIKHDGFFVNRGKLERIEPSATSNQQQPKKRRRKESAKPCGDVVDVSRKQAKMAKTAGGKDQSASPGPSSKKISNDSKTVQDSFSPLKAQNGNDSLVLENVKHTDKANHQPMNATSPKSKAAGSSGPLHPKCSSKSVHEQSNSPPGKSRPNVSAKSAVVRQQVNNGMPDLDTATESKTSIQISKKSGSNGRPKYSTLEKAIRNLEKVVAESRPPAATENQDADISSQAVKRGLPGDVKLHLAKVARIAYASQGEISGELINRLMGIVGHLIQIRSLKRNLKIMIDSIVTANREKDTRFQRIKSEITEMLKTQVPLMESQETNQEAGTSDDFQDVGSLGKSPVKKFVMDVALEEKLCDLYDVFVEGMDEHSGSQIRKLYSDLAQLWPNSLVDNHEIRRAICREKERRRALEGNIGKEMDQTKITKKKQTQLVPKSEGITYPDKASGVEVKASVVLTATTTSLVDCQPAADSSFERSKQQHEKLKRTSSLSNPAAEGKKVRRKTEPALEETHLPAEKPLVLALKRQTHLKSKTHKQVQVHPQSKAHKQAQVHPKAKTQTPPDLNLPS

SEQ ID NO: 20634 - DNA, 2411 bp, Arabidopsis thaliana
  misc_feature (1)..(2411): Ceres Seq. ID no. 14310024
  misc_feature: MA Experiment ID: 20000213 Result: Up-regulated in Transcription
  misc_feature: MA Experiment 20000213 PARAMETER Experiment Name: At_4deg_Cold_P Parameter: Timepoint (hr) Value: 2
  misc_feature: MA Experiment ID: 20000227 Result: Up-regulated in Transcription
  misc_feature: MA Experiment 20000227 PARAMETER Experiment Name: At_Root-Tips-vs-Tops_P Parameter: Tissue Value: Root Tips vs. Root Tops
  misc_feature: MA Experiment ID: 20000234 Result: Up-regulated in Transcription
  misc_feature: MA Experiment 20000234 PARAMETER Experiment Name: At_Siliques_P Parameter: Age (day) Value: 21
  misc_feature: MA Experiment 20000234 PARAMETER Experiment Name: At_Siliques_P Parameter: Organism Value: A. thaliana
  misc_feature: MA Experiment 20000234 PARAMETER Experiment Name: At_Siliques_P Parameter: Plant Line Value: WS
  misc_feature: MA Experiment 20000234 PARAMETER Experiment Name: At_Siliques_P Parameter: Tissue Value: Less Than 5mm Siliques vs. Whole Plant
ggatgaagaccagctcaaagccaggtcaaaatccatcaatcctggcctcatcaatgttaaaaatctttactttcacacatctctagatcttccatagaaggatcaatcaaaagctgtaatctttctttcttcctcgtagctccttctcttgcggatccttgtcggtacacttctacattctcaaatctgattcctttctggagttgctcctgagctacggttcagcttcaattacttcgatctcgtgtaaaaatcacttctagaagctttgataagctttgataggagttggttttactctttagggttttgtttgagtttgatctttattgtatagatgttgtgatcttcgtacactctatatatgtttccaagggtttctatgaggcgtcgctctgctgaagtttctcctacagagccaatggagaagggaaatggaaaaaatcagactaatcgaatctgtttgttggttgctttgtcactctttttctgggcattgttgttgtacttccattttgttgtcttagggactagtaacattgataaacagctccaattgcaacctagttatgctcaatctcagccatcatcagtctctcttcgtgttgataaattccctatagagcctcatgcagctccatcgaaaccacctcccaaagagcctttagttactatcgataagccaatactccctcctgcaccagtagccaattctagttccacctttaagccacctagaattgttgagagcgggaagaaacaggagttttcgtttataagagccttgaagacagtagacaacaagagtgacccttgtggagggaagtacatttatgttcacaatctaccctcaaagttcaatgaggatatgcttagagactgtaagaagcttagtctctggactaacatgtgtaagttcacaaccaatgctggccttgggccgccgcttgagaatgttgaaggtgtcttctctgatgaaggttggtatgcgactaatcagtttgctgttgatgtgatattcagcaaccggatgaagcagtacaaatgtttgacaaatgattcttcccttgctgctgccatctttgtgccgttctatgctggattcgacattgctaggtatctgtggggatacaatatctcgagaagggatgctgcttcgcttgagttggtcgattggctcatgaagcggcctgagtgggatataatgaggggaaaagatcatttccttgtggcgggtaggataacgtgggattttaggagattgtctgaagaagaaactgattggggcaacaagcttctcttcttaccggctgccaagaacatgtctatgcttgtggttgagtcgagcccatggaatgctaatgattttgggatcccgtacccaacctacttccacccagcaaaggactcagaggtttttgaatggcaagaccggatgagaaacctggaaaggaagtggcttttctcgtttgcaggagccccacgacctgacaatccgaaatctatcagagggcagatcattgatcaatgtcgaaactcaaatgttggcaaattattagaatgcgattttggggagagcaaatgccatgcaccaagcagcattatgcaaatgtttcaaagctctctcttctgcctgcagccacagggagactcttacacccgaagatcggcatttgactcaatgcttgccggttgtataccggtcttcttccatccgggttcagcctacacgcaatacacgtggcatctacccaagaactacacaacctactcggtattcatccccgaggatgatgttcggaagagaaacataagcatcgaggagcgactcctccagattccagccaagcaggtcaagataatgagagagaatgtcatcaacctcatcccaaggctgatctacgcagacccgagatcagaactggagacgcagaaagatgcatttgatgtctcggtacaggctgtgatagacaaggtgactcggttaaggaagaacatgatcgagggccgaaccgagtatgactacttcgtggaggagaacagctggaagtatgcgttgctggaggaaggccaacgggaagcagggggccatgtgtgggacccgttcttctccaaaccaaagcccggagaagatggcagcagcgatggtaatggaggcacgactatttcagcagatgcagctaagaattcatggaagagtgagcagagagaaagacacagtgaaaagagacagaaaccacattttgttacggttttgatatagttttcggttactatttatacggacaaaaaatgatttatttttgttgtattggtatcaaatgtagtttctccagtttcatagagataagtttgtttgtatcagttacccacagaaattaataataagaagtgacccttttcaagttttt

SEQ ID NO: 20635 - protein, 632 aa, Arabidopsis thaliana
  peptide (1)..(632): Ceres Seq. ID no. 14310025
  misc_feature (156)..(504): Pfam Name: Exostosin family Pfam Description: Exostosin family
  misc_feature (149)..(549): Homolog of NCBI NO: 37535054 NR Description: hypothetical protein [Oryza sativa (japonica
  misc_feature (138)..(562): Homolog of NCBI NO: 15225735 NR Description: hypothetical protein [Arabidopsis thaliana]
  misc_feature (136)..(581): Homolog of NCBI NO: 37535048 NR Description: hypothetical protein [Oryza sativa (japonica
  misc_feature (119)..(570): Homolog of NCBI NO: 29824391 NR Description: unknown protein [Arabidopsis thaliana]
  misc_feature (145)..(542): Homolog of NCBI NO: 27497203 NR Description: Hypothetical protein [Oryza sativa (japonica
  misc_feature (114)..(585): Homolog of NCBI NO: 15227020 NR Description: hypothetical protein [Arabidopsis thaliana]
  misc_feature (151)..(545): Homolog of NCBI NO: 27497204 NR Description: Hypothetical protein [Oryza sativa (japonica
  misc_feature (137)..(583): Homolog of NCBI NO: 37535064 NR Description: putative exostosin family protein
  misc_feature (68)..(583): Homolog of NCBI NO: 37535066 NR Description: hypothetical protein [Oryza sativa (japonica
  misc_feature (20)..(615): Homolog of NCBI NO: 27497206 NR Description: Unknown protein [Oryza sativa (japonica
MFPRVSMRRRSAEVSPTEPMEKGNGKNQTNRICLLVALSLFFWALLLYFHFVVLGTSNIDKQLQLQPSYAQSQPSSVSLRVDKFPIEPHAAPSKPPPKEPLVTIDKPILPPAPVANSSSTFKPPRIVESGKKQEFSFIRALKTVDNKSDPCGGKYIYVHNLPSKFNEDMLRDCKKLSLWTNMCKFTTNAGLGPPLENVEGVFSDEGWYATNQFAVDVIFSNRMKQYKCLTNDSSLAAAIFVPFYAGFDIARYLWGYNISRRDAASLELVDWLMKRPEWDIMRGKDHFLVAGRITWDFRRLSEEETDWGNKLLFLPAAKNMSMLVVESSPWNANDFGIPYPTYFHPAKDSEVFEWQDRMRNLERKWLFSFAGAPRPDNPKSIRGQIIDQCRNSNVGKLLECDFGESKCHAPSSIMQMFQSSLFCLQPQGDSYTRRSAFDSMLAGCIPVFFHPGSAYTQYTWHLPKNYTTYSVFIPEDDVRKRNISIEERLLQIPAKQVKIMRENVINLIPRLIYADPRSELETQKDAFDVSVQAVIDKVTRLRKNMIEGRTEYDYFVEENSWKYALLEEGQREAGGHVWDPFFSKPKPGEDGSSDGNGGTTISADAAKNSWKSEQRERHSEKRQKPHFVTVLI

SEQ ID NO: 20636 - protein, 626 aa, Arabidopsis thaliana
  peptide (1)..(626): Ceres Seq. ID no. 14310026
  misc_feature (150)..(498): Pfam Name: Exostosin family Pfam Description: Exostosin family
  misc_feature (131)..(577): Homolog of NCBI NO: 37535064 NR Description: putative exostosin family protein
  misc_feature (62)..(577): Homolog of NCBI NO: 37535066 NR Description: hypothetical protein [Oryza sativa (japonica
  misc_feature (132)..(556): Homolog of NCBI NO: 15225735 NR Description: hypothetical protein [Arabidopsis thaliana]
  misc_feature (113)..(564): Homolog of NCBI NO: 29824391 NR Description: unknown protein [Arabidopsis thaliana]
  misc_feature (108)..(579): Homolog of NCBI NO: 15227020 NR Description: hypothetical protein [Arabidopsis thaliana]
  misc_feature (145)..(539): Homolog of NCBI NO: 27497204 NR Description: Hypothetical protein [Oryza sativa (japonica
  misc_feature (139)..(536): Homolog of NCBI NO: 27497203 NR Description: Hypothetical protein [Oryza sativa (japonica
  misc_feature (130)..(575): Homolog of NCBI NO: 37535048 NR Description: hypothetical protein [Oryza sativa (japonica
  misc_feature (143)..(543): Homolog of NCBI NO: 37535054 NR Description: hypothetical protein [Oryza sativa (japonica
  misc_feature (14)..(609): Homolog of NCBI NO: 27497206 NR Description: Unknown protein [Oryza sativa (japonica
MRRRSAEVSPTEPMEKGNGKNQTNRICLLVALSLFFWALLLYFHFVVLGTSNIDKQLQLQPSYAQSQPSSVSLRVDKFPIEPHAAPSKPPPKEPLVTIDKPILPPAPVANSSSTFKPPRIVESGKKQEFSFIRALKTVDNKSDPCGGKYIYVHNLPSKFNEDMLRDCKKLSLWTNMCKFTTNAGLGPPLENVEGVFSDEGWYATNQFAVDVIFSNRMKQYKCLTNDSSLAAAIFVPFYAGFDIARYLWGYNISRRDAASLELVDWLMKRPEWDIMRGKDHFLVAGRITWDFRRLSEEETDWGNKLLFLPAAKNMSMLVVESSPWNANDFGIPYPTYFHPAKDSEVFEWQDRMRNLERKWLFSFAGAPRPDNPKSIRGQIIDQCRNSNVGKLLECDFGESKCHAPSSIMQMFQSSLFCLQPQGDSYTRRSAFDSMLAGCIPVFFHPGSAYTQYTWHLPKNYTTYSVFIPEDDVRKRNISIEERLLQIPAKQVKIMRENVINLIPRLIYADPRSELETQKDAFDVSVQAVIDKVTRLRKNMIEGRTEYDYFVEENSWKYALLEEGQREAGGHVWDPFFSKPKPGEDGSSDGNGGTTISADAAKNSWKSEQRERHSEKRQKPHFVTVLI

SEQ ID NO: 20637 - protein, 613 aa, Arabidopsis thaliana
  peptide (1)..(613): Ceres Seq. ID no. 14310027
  misc_feature (137)..(485): Pfam Name: Exostosin family Pfam Description: Exostosin family
  misc_feature (130)..(530): Homolog of NCBI NO: 37535054 NR Description: hypothetical protein [Oryza sativa (japonica
  misc_feature (119)..(543): Homolog of NCBI NO: 15225735 NR Description: hypothetical protein [Arabidopsis thaliana]
  misc_feature (117)..(562): Homolog of NCBI NO: 37535048 NR Description: hypothetical protein [Oryza sativa (japonica
  misc_feature (100)..(551): Homolog of NCBI NO: 29824391 NR Description: unknown protein [Arabidopsis thaliana]
  misc_feature (126)..(523): Homolog of NCBI NO: 27497203 NR Description: Hypothetical protein [Oryza sativa (japonica
  misc_feature (95)..(566): Homolog of NCBI NO: 15227020 NR Description: hypothetical protein [Arabidopsis thaliana]
  misc_feature (132)..(526): Homolog of NCBI NO: 27497204 NR Description: Hypothetical protein [Oryza sativa (japonica
  misc_feature (118)..(564): Homolog of NCBI NO: 37535064 NR Description: putative exostosin family protein
  misc_feature (49)..(564): Homolog of NCBI NO: 37535066 NR Description: hypothetical protein [Oryza sativa (japonica
  misc_feature (1)..(596): Homolog of NCBI NO: 27497206 NR Description: Unknown protein [Oryza sativa (japonica
MEKGNGKNQTNRICLLVALSLFFWALLLYFHFVVLGTSNIDKQLQLQPSYAQSQPSSVSLRVDKFPIEPHAAPSKPPPKEPLVTIDKPILPPAPVANSSSTFKPPRIVESGKKQEFSFIRALKTVDNKSDPCGGKYIYVHNLPSKFNEDMLRDCKKLSLWTNMCKFTTNAGLGPPLENVEGVFSDEGWYATNQFAVDVIFSNRMKQYKCLTNDSSLAAAIFVPFYAGFDIARYLWGYNISRRDAASLELVDWLMKRPEWDIMRGKDHFLVAGRITWDFRRLSEEETDWGNKLLFLPAAKNMSMLVVESSPWNANDFGIPYPTYFHPAKDSEVFEWQDRMRNLERKWLFSFAGAPRPDNPKSIRGQIIDQCRNSNVGKLLECDFGESKCHAPSSIMQMFQSSLFCLQPQGDSYTRRSAFDSMLAGCIPVFFHPGSAYTQYTWHLPKNYTTYSVFIPEDDVRKRNISIEERLLQIPAKQVKIMRENVINLIPRLIYADPRSELETQKDAFDVSVQAVIDKVTRLRKNMIEGRTEYDYFVEENSWKYALLEEGQREAGGHVWDPFFSKPKPGEDGSSDGNGGTTISADAAKNSWKSEQRERHSEKRQKPHFVTVLI

SEQ ID NO: 20638 - DNA, 2524 bp, Arabidopsis thaliana
  misc_feature (1)..(2524): Ceres Seq. ID no. 14310132
  misc_feature: MA Experiment ID: 20000185 Result: Up-regulated in Transcription
  misc_feature: MA Experiment 20000185 PARAMETER Experiment Name: At_Roots__P Parameter: Age (day) Value: 7 vs. 21
  misc_feature: MA Experiment 20000185 PARAMETER Experiment Name: At_Roots__P Parameter: Organism Value: A. thaliana
  misc_feature: MA Experiment 20000185 PARAMETER Experiment Name: At_Roots__P Parameter: Tissue Value: Roots vs. Whole Plant
  misc_feature: MA Experiment ID: 20000234 Result: Up-regulated in Transcription
  misc_feature: MA Experiment 20000234 PARAMETER Experiment Name: At_Siliques_P Parameter: Age (day) Value: 21
  misc_feature: MA Experiment 20000234 PARAMETER Experiment Name: At_Siliques_P Parameter: Organism Value: A. thaliana
  misc_feature: MA Experiment 20000234 PARAMETER Experiment Name: At_Siliques_P Parameter: Plant Line Value: WS
  misc_feature: MA Experiment 20000234 PARAMETER Experiment Name: At_Siliques_P Parameter: Tissue Value: Less Than 5mm Siliques vs. Whole Plant
  misc_feature: MA Experiment ID: 20000264 Result: Up-regulated in Transcription
  misc_feature: MA Experiment 20000264 PARAMETER Experiment Name: At_Open_Flower_P Parameter: Age (day) Value: 21
  misc_feature: MA Experiment 20000264 PARAMETER Experiment Name: At_Open_Flower_P Parameter: Plant Line Value: WS
  misc_feature: MA Experiment 20000264 PARAMETER Experiment Name: At_Open_Flower_P Parameter: Tissue Value: Open Flower vs. Whole Plant
  misc_feature: MA Experiment ID: 20000265 Result: Up-regulated in Transcription
  misc_feature: MA Experiment 20000265 PARAMETER Experiment Name: At_Open_Flower_P Parameter: Age (day) Value: 21
  misc_feature: MA Experiment 20000265 PARAMETER Experiment Name: At_Open_Flower_P Parameter: Plant Line Value: WS
  misc_feature: MA Experiment 20000265 PARAMETER Experiment Name: At_Open_Flower_P Parameter: Tissue Value: Closed Flower vs. Whole Plant
  misc_feature: MA Experiment ID: 20000286 Result: Up-regulated in Transcription
  misc_feature: MA Experiment 20000286 PARAMETER Experiment Name: At_Open_Flower_P Parameter: Age (day) Value: 21
  misc_feature: MA Experiment 20000286 PARAMETER Experiment Name: At_Open_Flower_P Parameter: Plant Line Value: WS
  misc_feature: MA Experiment 20000286 PARAMETER Experiment Name: At_Open_Flower_P Parameter: Tissue Value: Half Open vs. Whole Plant
  misc_feature: MA Experiment ID: 20000439 Result: Up-regulated in Transcription
  misc_feature: MA Experiment 20000439 PARAMETER Experiment Name: At_Roots__P Parameter: Age (day) Value: 14 vs. 21
  misc_feature: MA Experiment 20000439 PARAMETER Experiment Name: At_Roots__P Parameter: Organism Value: A. thaliana
  misc_feature: MA Experiment 20000439 PARAMETER Experiment Name: At_Roots__P Parameter: Tissue Value: Roots vs. Whole Plant
  misc_feature: MA Experiment ID: 20000794 Result: Up-regulated in Transcription
  misc_feature: MA Experiment 20000794 PARAMETER Experiment Name: At_Petals_P Parameter: Age (day) Value: 23-25 days
  misc_feature: MA Experiment 20000794 PARAMETER Experiment Name: At_Petals_P Parameter: Plant Line Value: WS
  misc_feature: MA Experiment 20000794 PARAMETER Experiment Name: At_Petals_P Parameter: Tissue Value: Petals vs. Whole plant
aaaaacacccctcctcgattgtcgaacagtccaggttcctgaaatgttctcgtcagggcgacattagggtttcttcattcccgtccttcagattcgtatttgaaacaggaaggagagaaaaatgggtatacaagggcttttgccgttgttgaaatcgataatggtaccgattcatatcaaggagctcgagggttgtatcgtcgccgtcgatacatattcatggctacacaaaggggctttatcttgtagccgagagctctgcaagggattacccaccaagaggcatattcaatactgtatgcatagagtgaatttacttcgccatcatggagtgaagcctatcatggtctttgatggaggtccgttaccgatgaaactagaacaagagaataagcgtgctaggtccagaaaggaaaatcttgctcgtgcattggagcatgaagcaaatggaaattcctcagctgcttatgagtgctactcaaaggccgtagatatttcaccttctattgcacatgagttgatacaggttctgaggcaggagaatgttgattacgttgttgctccttacgaagctgatgcgcagatggcattcttagctattactaagcaagttgatgcgattatcactgaggattctgatctcataccttttggctgcccaagaatcattttcaaaatggacaagtttggtcatggtgttgagtttcaagcctccaagctacccaaaaataaggatctcagtctatcaggattttcaagccaaatgcttctcgaaatgtgcatattaagtggctgcgattatttgcagtcacttccaggaatgggactcaaaagagcacatgcactcattacaaaattcaaaagctatgacagggtaattaagcacttaaagtacagcacagtttcagttcctcctctttatgaagagtcattcaagagagctttactgactttcaagcatcaacgtgtctatgacccaaatgctgaagatatcatacacttgtgtgacatttctgacaaccttggtgaagattcagattttgttggcccatcgatgccacaagatattgctaagggtatagcactaggccagcttgatcccttcacacagttgccattccaggctgagagtgttactcctaaatcggctgttgatgatatatcccgtcccaaaagtttcaaacctgaaactgtaaagaaaaagcttgatttgccagtccaaaaaaaccttctcaccaagtacttctgctttgcgtctgttgaggcaaaaagaaaattcaaggctcctaggatatcaccaatgtctctgaccccaactgatgagtctccaagcattcctgatgacaacacaccagatttagatgctctttcaagccagacaacaaatgaatccccggtttatagcttgggtgagaatccatgtgttagcgaagttgcagagaaaagagattcacccgatgacgatgcagtggaaaggaatcacaaggaccttcatcataaatactgcgaacgggaagtggataggccgaagtcagatagtttgaaggttatagtaagaagcaagtattttaagcagaaacaggaggacaaaagtctgaaacaatcgatcccatgtcttaatgattgctctgtgattggtcagagaaaggctgttaaaactgtgattaacatgtcaagcgcgtctaaaagagaagagagtcacagagctatagcaacaagtccatgtttacaccatgaccgaatctacaacgatcatgaagatgctaaagaagcgagtttctctgccatgaacgaggtggctgagaggacaataaacacccacaagattaaccatcagatcaatgaagaagaacagaacccatccgttgaaattccttctgcctttagtactcccgagaatgttatacctctctcttccattgctattgatagttgccatggagttgcaacagggaagaggaagcttgactcagatgaaaaccttcacaaggaaaatttgaaatccaagcacatgcgcatggatgaaactgatactgctcttaatgcagaaacaccattggaaaccgatgatgttgagaagtttggatcgaacatttcacatatagggcattactcagaaatagcagagaaatcagtggaaagatttgtctcagctatatcgtctttcaaatattctgggactggctctcgtgctagcggtctccgtgcccctctcaaagatatccgcaacacttgtccgtccaaagggttatctcttaaaccagacatcagcaagtttggctatgcgtcaagcaaccgacacatggtgacaaagtcaaggagaatgtgagctcagatttgtaagttaaccatctctttagagccacatgtgagagctttagctttagaattaacttcttggtcgcatgatgatatttttggtgttgtgtctgtattagctttctacttactgtgcatagcattcttgttcaaagacacttcacacaacagttggattcataaatgaaacaactttcaacttgtc

SEQ ID NO: 20639 - protein, 735 aa, Arabidopsis thaliana
  peptide (1)..(735): Ceres Seq. ID no. 14310133
  misc_feature (1)..(99): Pfam Name: XPG N-terminal domain Pfam Description: XPG N-terminal domain
  misc_feature (1)..(364): Homolog of NCBI NO: 3445182 NR Description: Hex1 [Homo sapiens]
  misc_feature (1)..(364): Homolog of NCBI NO: 4249655 NR Description: exonuclease I [Homo sapiens]
  misc_feature (1)..(364): Homolog of NCBI NO: 3513573 NR Description: exonuclease I [Homo sapiens]
  misc_feature (1)..(364): Homolog of NCBI NO: 3170238 NR Description: Hex1 [Homo sapiens]
  misc_feature (1)..(535): Homolog of NCBI NO: 4884906 NR Description: exonuclease ExoI [Xenopus laevis]
  misc_feature (1)..(356): Homolog of NCBI NO: 30685678 NR Description: expressed protein [Arabidopsis thaliana]
  misc_feature (1)..(356): Homolog of NCBI NO: 18394573 NR Description: expressed protein [Arabidopsis thaliana]
  misc_feature (1)..(297): Homolog of NCBI NO: 34910036 NR Description: putative exonuclease [Oryza sativa (japonica
  misc_feature (378)..(720): Homolog of NCBI NO: 34910036 NR Description: putative exonuclease [Oryza sativa (japonica
  misc_feature (1)..(310): Homolog of NCBI NO: 15220506 NR Description: exonuclease -related [Arabidopsis thaliana]
MGIQGLLPLLKSIMVPIHIKELEGCIVAVDTYSWLHKGALSCSRELCKGLPTKRHIQYCMHRVNLLRHHGVKPIMVFDGGPLPMKLEQENKRARSRKENLARALEHEANGNSSAAYECYSKAVDISPSIAHELIQVLRQENVDYVVAPYEADAQMAFLAITKQVDAIITEDSDLIPFGCPRIIFKMDKFGHGVEFQASKLPKNKDLSLSGFSSQMLLEMCILSGCDYLQSLPGMGLKRAHALITKFKSYDRVIKHLKYSTVSVPPLYEESFKRALLTFKHQRVYDPNAEDIIHLCDISDNLGEDSDFVGPSMPQDIAKGIALGQLDPFTQLPFQAESVTPKSAVDDISRPKSFKPETVKKKLDLPVQKNLLTKYFCFASVEAKRKFKAPRISPMSLTPTDESPSIPDDNTPDLDALSSQTTNESPVYSLGENPCVSEVAEKRDSPDDDAVERNHKDLHHKYCEREVDRPKSDSLKVIVRSKYFKQKQEDKSLKQSIPCLNDCSVIGQRKAVKTVINMSSASKREESHRAIATSPCLHHDRIYNDHEDAKEASFSAMNEVAERTINTHKINHQINEEEQNPSVEIPSAFSTPENVIPLSSIAIDSCHGVATGKRKLDSDENLHKENLKSKHMRMDETDTALNAETPLETDDVEKFGSNISHIGHYSEIAEKSVERFVSAISSFKYSGTGSRASGLRAPLKDIRNTCPSKGLSLKPDISKFGYASSNRHMVTKSRRM

SEQ ID NO: 20640 - protein, 722 aa, Arabidopsis thaliana
  peptide (1)..(722): Ceres Seq. ID no. 14310134
  misc_feature (1)..(86): Pfam Name: XPG N-terminal domain Pfam Description: XPG N-terminal domain
  misc_feature (1)..(351): Homolog of NCBI NO: 3445182 NR Description: Hex1 [Homo sapiens]
  misc_feature (1)..(351): Homolog of NCBI NO: 4249655 NR Description: exonuclease I [Homo sapiens]
  misc_feature (1)..(351): Homolog of NCBI NO: 3513573 NR Description: exonuclease I [Homo sapiens]
  misc_feature (1)..(351): Homolog of NCBI NO: 3170238 NR Description: Hex1 [Homo sapiens]
  misc_feature (1)..(522): Homolog of NCBI NO: 4884906 NR Description: exonuclease ExoI [Xenopus laevis]
  misc_feature (1)..(343): Homolog of NCBI NO: 30685678 NR Description: expressed protein [Arabidopsis thaliana]
  misc_feature (1)..(343): Homolog of NCBI NO: 18394573 NR Description: expressed protein [Arabidopsis thaliana]
  misc_feature (1)..(284): Homolog of NCBI NO: 34910036 NR Description: putative exonuclease [Oryza sativa (japonica
  misc_feature (365)..(707): Homolog of NCBI NO: 34910036 NR Description: putative exonuclease [Oryza sativa (japonica
  misc_feature (1)..(297): Homolog of NCBI NO: 15220506 NR Description: exonuclease -related [Arabidopsis thaliana]
MVPIHIKELEGCIVAVDTYSWLHKGALSCSRELCKGLPTKRHIQYCMHRVNLLRHHGVKPIMVFDGGPLPMKLEQENKRARSRKENLARALEHEANGNSSAAYECYSKAVDISPSIAHELIQVLRQENVDYVVAPYEADAQMAFLAITKQVDAIITEDSDLIPFGCPRIIFKMDKFGHGVEFQASKLPKNKDLSLSGFSSQMLLEMCILSGCDYLQSLPGMGLKRAHALITKFKSYDRVIKHLKYSTVSVPPLYEESFKRALLTFKHQRVYDPNAEDIIHLCDISDNLGEDSDFVGPSMPQDIAKGIALGQLDPFTQLPFQAESVTPKSAVDDISRPKSFKPETVKKKLDLPVQKNLLTKYFCFASVEAKRKFKAPRISPMSLTPTDESPSIPDDNTPDLDALSSQTTNESPVYSLGENPCVSEVAEKRDSPDDDAVERNHKDLHHKYCEREVDRPKSDSLKVIVRSKYFKQKQEDKSLKQSIPCLNDCSVIGQRKAVKTVINMSSASKREESHRAIATSPCLHHDRIYNDHEDAKEASFSAMNEVAERTINTHKINHQINEEEQNPSVEIPSAFSTPENVIPLSSIAIDSCHGVATGKRKLDSDENLHKENLKSKHMRMDETDTALNAETPLETDDVEKFGSNISHIGHYSEIAEKSVERFVSAISSFKYSGTGSRASGLRAPLKDIRNTCPSKGLSLKPDISKFGYASSNRHMVTKSRRM

SEQ ID NO: 20641 - protein, 676 aa, Arabidopsis thaliana
  peptide (1)..(676): Ceres Seq. ID no. 14310135
  misc_feature (192)..(251): Pfam Name: XPG I-region Pfam Description: XPG I-region
  misc_feature (1)..(305): Homolog of NCBI NO: 3445182 NR Description: Hex1 [Homo sapiens]
  misc_feature (1)..(305): Homolog of NCBI NO: 4249655 NR Description: exonuclease I [Homo sapiens]
  misc_feature (1)..(305): Homolog of NCBI NO: 3513573 NR Description: exonuclease I [Homo sapiens]
  misc_feature (1)..(305): Homolog of NCBI NO: 3170238 NR Description: Hex1 [Homo sapiens]
  misc_feature (1)..(476): Homolog of NCBI NO: 4884906 NR Description: exonuclease ExoI [Xenopus laevis]
  misc_feature (1)..(297): Homolog of NCBI NO: 30685678 NR Description: expressed protein [Arabidopsis thaliana]
  misc_feature (1)..(297): Homolog of NCBI NO: 18394573 NR Description: expressed protein [Arabidopsis thaliana]
  misc_feature (1)..(238): Homolog of NCBI NO: 34910036 NR Description: putative exonuclease [Oryza sativa (japonica
  misc_feature (319)..(661): Homolog of NCBI NO: 34910036 NR Description: putative exonuclease [Oryza sativa (japonica
  misc_feature (1)..(251): Homolog of NCBI NO: 15220506 NR Description: exonuclease -related [Arabidopsis thaliana]
MHRVNLLRHHGVKPIMVFDGGPLPMKLEQENKRARSRKENLARALEHEANGNSSAAYECYSKAVDISPSIAHELIQVLRQENVDYVVAPYEADAQMAFLAITKQVDAIITEDSDLIPFGCPRIIFKMDKFGHGVEFQASKLPKNKDLSLSGFSSQMLLEMCILSGCDYLQSLPGMGLKRAHALITKFKSYDRVIKHLKYSTVSVPPLYEESFKRALLTFKHQRVYDPNAEDIIHLCDISDNLGEDSDFVGPSMPQDIAKGIALGQLDPFTQLPFQAESVTPKSAVDDISRPKSFKPETVKKKLDLPVQKNLLTKYFCFASVEAKRKFKAPRISPMSLTPTDESPSIPDDNTPDLDALSSQTTNESPVYSLGENPCVSEVAEKRDSPDDDAVERNHKDLHHKYCEREVDRPKSDSLKVIVRSKYFKQKQEDKSLKQSIPCLNDCSVIGQRKAVKTVINMSSASKREESHRAIATSPCLHHDRIYNDHEDAKEASFSAMNEVAERTINTHKINHQINEEEQNPSVEIPSAFSTPENVIPLSSIAIDSCHGVATGKRKLDSDENLHKENLKSKHMRMDETDTALNAETPLETDDVEKFGSNISHIGHYSEIAEKSVERFVSAISSFKYSGTGSRASGLRAPLKDIRNTCPSKGLSLKPDISKFGYASSNRHMVTKSRRM

SEQ ID NO: 20642 - DNA, 2130 bp, Arabidopsis thaliana
  misc_feature (1)..(2130): Ceres Seq. ID no. 15168666
gaaagtcactgctgaactttgttcagattgatcagttgaggatatattttgatccatctttgaaaaagtttgtcttggccaagaactctcctgtttctagaactaacacccctcttcatgaatctcctgatgcacttaaaacaaatgggactgaaatggatcacaaggctgctagaagatttgattcagtttcttctaatgtgggctcactgcagtctaaagtgcagttttgtcctgatggtgatgatgaagaagaaattgttttcaagccaacagcttatgagaagttttcaaaagtttcttcagatctgtcagttaatggatacgtccatcctgtaccagtgtctgctgctggtgggccaaccaatgctagtttagtgcctgttcagaacactgcatcaatgtctgcaactcgtttaccatccaatccacatgcaactggtttgccatccaatggtgggtcacttccaagtactgcatctctatcagctgctggtaattacaacactgatcagtcgcttcccaggtcgtctgttggttggactgattgggctgtcaatagtgagcaaaatgttactcctagcattgctccaagatttgaactcatgcagtctgttgaggagcctgtttccagctggacaagcagtggggcacagcatgttggtcctcagcacaagcacacaggtttaactttcccagatgttgtctctgaaccatgtgtatctgcatcaatggttcaatgttttagtagctccgattattcgaaatttctcagagaacaagaaatattcttaatgaatggactgaagactgtcaacataactggaaatggctatctagagcagagattgcagcctggattgagtggtttacagtctatgggttattcatctcagatacctattcaacctggtggtaccactgcaaacctgatgcataatcatgtcaaaattactggagagactgtcccctctacacttgattcagttgtaccttcaatagcaccatcaggtggcatgccaatcaaacttacagaagcaccactaactgcttcgaagaagaaccctgttagtcgtccatcaaagcctgttggaccaccaccaggatttaatcatgtaaccccaaagcgtcaagatgattctattccggttgaaaaactgcagaacccacaggtcgatgattacagctggctagatagctatcagcaatcgattgatcatgttcacagcttaagaactatttatcctggtgtcagtgatactagcactgcatttgccactccattctctttccctgggaggatacacacacaagggaccaatgaaaagacttggcaagatttccacctttttgagccttcaaaacagaacatgttccaaacttaccaccaaagaaatctgcaaagtggtcaaatggatgaacaagagccagcaaattctatctggtctagcagttaccatgtgtgatttggtaacttttaccaggatgattgctggagtttctggggacagactattggattaagtggcacgacctgatctattgagcttagcccatacctgcagcacttagtgttaaatttcttttgagaatggtagtctttcaagcatgacaatggctgctgttaagtttgggagtgccgccatcttttgggccaaagatggggtagaggatgattgatctgtcggcagtctgatggcgatgaattaatacgaggtcttcaatgctgacagaaagggttaatgaaacaaacttgaatccagtgattataggcactccgcacggaccacatgattcatctctcactggacatattgctaccacaagaagcggacggttgctgccgcaactaaaacatgccgtgtggatgtcagttttcagttggcctatgccatccagagagtaaaaagtgaggatcaacgagcatgttgccgagtagtttctcaagtataaattactgcgtctacttgctccttcgctttgggaacaatgtatcaggttgtaagttgcaattaaatgtttggaacagtttgtcatggtaattgtgtggctcctatatggctatattgttctctgtaattgtatggaccaaccctaagtgttacatacaaacatctttgatttgactcc

SEQ ID NO: 20643 - protein, 487 aa, Arabidopsis thaliana
  peptide (1)..(487): Ceres Seq. ID no. 15168667
  misc_feature (241)..(433): Homolog of NCBI NO: 18146966 NR Description: cig3 [Nicotiana tabacum]
  misc_feature (1)..(485): Homolog of NCBI NO: 30687291 NR Description: expressed protein [Arabidopsis thaliana]
  misc_feature (1)..(149): Homolog of NCBI NO: 34015261 NR Description: putative cytokinin inducibl protein
  misc_feature (171)..(487): Homolog of NCBI NO: 34015261 NR Description: putative cytokinin inducibl protein
  misc_feature (1)..(149): Homolog of NCBI NO: 35215104 NR Description: putative cig3 [Oryza sativa (japonica
  misc_feature (171)..(487): Homolog of NCBI NO: 35215104 NR Description: putative cig3 [Oryza sativa (japonica
KSLLNFVQIDQLRIYFDPSLKKFVLAKNSPVSRTNTPLHESPDALKTNGTEMDHKAARRFDSVSSNVGSLQSKVQFCPDGDDEEEIVFKPTAYEKFSKVSSDLSVNGYVHPVPVSAAGGPTNASLVPVQNTASMSATRLPSNPHATGLPSNGGSLPSTASLSAAGNYNTDQSLPRSSVGWTDWAVNSEQNVTPSIAPRFELMQSVEEPVSSWTSSGAQHVGPQHKHTGLTFPDVVSEPCVSASMVQCFSSSDYSKFLREQEIFLMNGLKTVNITGNGYLEQRLQPGLSGLQSMGYSSQIPIQPGGTTANLMHNHVKITGETVPSTLDSVVPSIAPSGGMPIKLTEAPLTASKKNPVSRPSKPVGPPPGFNHVTPKRQDDSIPVEKLQNPQVDDYSWLDSYQQSIDHVHSLRTIYPGVSDTSTAFATPFSFPGRIHTQGTNEKTWQDFHLFEPSKQNMFQTYHQRNLQSGQMDEQEPANSIWSSSYHV

SEQ ID NO: 20644 - protein, 436 aa, Arabidopsis thaliana
  peptide (1)..(436): Ceres Seq. ID no. 15168668
  misc_feature (190)..(382): Homolog of NCBI NO: 18146966 NR Description: cig3 [Nicotiana tabacum]
  misc_feature (1)..(434): Homolog of NCBI NO: 30687291 NR Description: expressed protein [Arabidopsis thaliana]
  misc_feature (1)..(98): Homolog of NCBI NO: 34015261 NR Description: putative cytokinin inducibl protein
  misc_feature (120)..(436): Homolog of NCBI NO: 34015261 NR Description: putative cytokinin inducibl protein
  misc_feature (1)..(98): Homolog of NCBI NO: 35215104 NR Description: putative cig3 [Oryza sativa (japonica
  misc_feature (120)..(436): Homolog of NCBI NO: 35215104 NR Description: putative cig3 [Oryza sativa (japonica
MDHKAARRFDSVSSNVGSLQSKVQFCPDGDDEEEIVFKPTAYEKFSKVSSDLSVNGYVHPVPVSAAGGPTNASLVPVQNTASMSATRLPSNPHATGLPSNGGSLPSTASLSAAGNYNTDQSLPRSSVGWTDWAVNSEQNVTPSIAPRFELMQSVEEPVSSWTSSGAQHVGPQHKHTGLTFPDVVSEPCVSASMVQCFSSSDYSKFLREQEIFLMNGLKTVNITGNGYLEQRLQPGLSGLQSMGYSSQIPIQPGGTTANLMHNHVKITGETVPSTLDSVVPSIAPSGGMPIKLTEAPLTASKKNPVSRPSKPVGPPPGFNHVTPKRQDDSIPVEKLQNPQVDDYSWLDSYQQSIDHVHSLRTIYPGVSDTSTAFATPFSFPGRIHTQGTNEKTWQDFHLFEPSKQNMFQTYHQRNLQSGQMDEQEPANSIWSSSYHV

SEQ ID NO: 20645 - protein, 354 aa, Arabidopsis thaliana
  peptide (1)..(354): Ceres Seq. ID no. 15168669
  misc_feature (108)..(300): Homolog of NCBI NO: 18146966 NR Description: cig3 [Nicotiana tabacum]
  misc_feature (1)..(352): Homolog of NCBI NO: 30687291 NR Description: expressed protein [Arabidopsis thaliana]
  misc_feature (1)..(16): Homolog of NCBI NO: 34015261 NR Description: putative cytokinin inducibl protein
  misc_feature (38)..(354): Homolog of NCBI NO: 34015261 NR Description: putative cytokinin inducibl protein
  misc_feature (1)..(16): Homolog of NCBI NO: 35215104 NR Description: putative cig3 [Oryza sativa (japonica
  misc_feature (38)..(354): Homolog of NCBI NO: 35215104 NR Description: putative cig3 [Oryza sativa (japonica
MSATRLPSNPHATGLPSNGGSLPSTASLSAAGNYNTDQSLPRSSVGWTDWAVNSEQNVTPSIAPRFELMQSVEEPVSSWTSSGAQHVGPQHKHTGLTFPDVVSEPCVSASMVQCFSSSDYSKFLREQEIFLMNGLKTVNITGNGYLEQRLQPGLSGLQSMGYSSQIPIQPGGTTANLMHNHVKITGETVPSTLDSVVPSIAPSGGMPIKLTEAPLTASKKNPVSRPSKPVGPPPGFNHVTPKRQDDSIPVEKLQNPQVDDYSWLDSYQQSIDHVHSLRTIYPGVSDTSTAFATPFSFPGRIHTQGTNEKTWQDFHLFEPSKQNMFQTYHQRNLQSGQMDEQEPANSIWSSSYHV

SEQ ID NO: 20646 - DNA, 1558 bp, Arabidopsis thaliana
  misc_feature (1)..(1558): Ceres Seq. ID no. 14310168
ggaagaagaaggaagctatggattctgagaaggcactagagcttgtgaagtatggagctacacttctatttctcgatgttcctcaatatacactggtcggaatcgatactcagattttcgcagttggaccagctttcaaagggattaagatgatacctcctggaattcactttgtattctatagttcatcgacaagggatggtagagagttttcacctaccattggcttctttattgatgttgctccttctcaggttattgtacgaaaatggaatcagcaagacgagtggttaaccaaagtatctgaagaagaggaagggagatattctcaagcagtcaggtctttggagtttgacaaaaatcttggcccatacaatctaaggcaatatggggaatggaagcacttatctaactacattacgaaggatgttgttgaaaagtttgagccagttggaggagaaataacagtcacatatgaatctgctattctaaaaggtggacctaaaacggcaatggaaatagcacttgatacgcagatgaaaaaaagcaagttgatgacatcatctactgagcaacctaaagggaataggttttactacacgtctattcctcggattataaagcacaagggaatgtctggacaggagctaacctctatgaatcttgacaagactcaattgctagaaagcgtattgtcaaaggagtacaaagactcggaagatttgctacttggggagctacaattttcatttgttgcatttttgatggggcagtctcttgaatcgttcatgcagtggaagtccatagttagtcttttactgggctgcaccagtgcgccctttcagacgaggagtcagctatttacaaagttcatcaaagtcatctaccatcaactaaaatatggactacaaaaagagaatagtggtcctgagacgggcattcatgcgcttcttgatgattcttggctagcttcagatagctttctgcatttcctttgtaaggacttctttgcattagtggaagagacgtctgtagttgatggagatttattgtcatggacaaggaagttcaaagagttgcttgagaacagattaggatgggagtttcagaagaagagccctgttgacgggatttactttgaagaagatgatgagtatgctcctgtggttgagatgttggatgaaagtcatggagaatatatggataaaaccacttagacatcgatcgatgcagtctctgtcttcatagcttcttcagcttttgacctctcaagccattccaaaaagcagctgcgttgatcgctttcttaccaggaagctggacttctagtacctgaatcagcaacaccaaatattagctttataaatacttgattaatgtctgattatcacgtcctaacgcatctgctttttgtagtaacagttagtgagtttgtaactttctatagctttatgtgaatattagcagtaattttctatagctttacctccaaagctgtaccgcctctacaaggaaacaccaatgaacctttcttgaaagttacataatcttgttcacc

SEQ ID NO: 20647 - protein, 404 aa, Arabidopsis thaliana
  peptide (1)..(404): Ceres Seq. ID no. 14310169
  misc_feature (6)..(370): Pfam Name: AAR2 protein Pfam Description: AAR2 protein
  misc_feature (6)..(375): Homolog of NCBI NO: 24211598 NR Description: Protein c20orf4 homolog
  misc_feature (6)..(375): Homolog of NCBI NO: 12858611 NR Description: unnamed protein product [Mus musculus]
  misc_feature (6)..(375): Homolog of NCBI NO: 18034690 NR Description: chromosome 20 open reading frame 4 [Homo sapiens]
  misc_feature (6)..(375): Homolog of NCBI NO: 34860266 NR Description: similar to RIKEN cDNA 0610011L14 gene [Rattus
  misc_feature (5)..(395): Homolog of NCBI NO: 38346780 NR Description: OSJNBa0095H06.5 [Oryza sativa (japonica
  misc_feature (156)..(400): Homolog of NCBI NO: 6069471 NR Description: S-locus protein 3 [Brassica rapa]
  misc_feature (1)..(276): Homolog of NCBI NO: 15864559 NR Description: CePP putative protein [Brassica napus]
  misc_feature (1)..(397): Homolog of NCBI NO: 7657874 NR Description: CePP protein [Brassica napus var. napus]
  misc_feature (50)..(404): Homolog of NCBI NO: 30697362 NR Description: expressed protein [Arabidopsis thaliana]
  misc_feature (6)..(404): Homolog of NCBI NO: 18408532 NR Description: expressed protein [Arabidopsis thaliana]
KKKEAMDSEKALELVKYGATLLFLDVPQYTLVGIDTQIFAVGPAFKGIKMIPPGIHFVFYSSSTRDGREFSPTIGFFIDVAPSQVIVRKWNQQDEWLTKVSEEEEGRYSQAVRSLEFDKNLGPYNLRQYGEWKHLSNYITKDVVEKFEPVGGEITVTYESAILKGGPKTAMEIALDTQMKKSKLMTSSTEQPKGNRFYYTSIPRIIKHKGMSGQELTSMNLDKTQLLESVLSKEYKDSEDLLLGELQFSFVAFLMGQSLESFMQWKSIVSLLLGCTSAPFQTRSQLFTKFIKVIYHQLKYGLQKENSGPETGIHALLDDSWLASDSFLHFLCKDFFALVEETSVVDGDLLSWTRKFKELLENRLGWEFQKKSPVDGIYFEEDDEYAPVVEMLDESHGEYMDKTT

SEQ ID NO: 20648 - protein, 399 aa, Arabidopsis thaliana
  peptide (1)..(399): Ceres Seq. ID no. 14310170
  misc_feature (1)..(365): Pfam Name: AAR2 protein Pfam Description: AAR2 protein
  misc_feature (1)..(370): Homolog of NCBI NO: 24211598 NR Description: Protein c20orf4 homolog
  misc_feature (1)..(370): Homolog of NCBI NO: 12858611 NR Description: unnamed protein product [Mus musculus]
  misc_feature (1)..(370): Homolog of NCBI NO: 18034690 NR Description: chromosome 20 open reading frame 4 [Homo sapiens]
  misc_feature (1)..(370): Homolog of NCBI NO: 34860266 NR Description: similar to RIKEN cDNA 0610011L14 gene [Rattus
  misc_feature (1)..(390): Homolog of NCBI NO: 38346780 NR Description: OSJNBa0095H06.5 [Oryza sativa (japonica
  misc_feature (151)..(395): Homolog of NCBI NO: 6069471 NR Description: S-locus protein 3 [Brassica rapa]
  misc_feature (1)..(271): Homolog of NCBI NO: 15864559 NR Description: CePP putative protein [Brassica napus]
  misc_feature (1)..(392): Homolog of NCBI NO: 7657874 NR Description: CePP protein [Brassica napus var. napus]
  misc_feature (45)..(399): Homolog of NCBI NO: 30697362 NR Description: expressed protein [Arabidopsis thaliana]
  misc_feature (1)..(399): Homolog of NCBI NO: 18408532 NR Description: expressed protein [Arabidopsis thaliana]
MDSEKALELVKYGATLLFLDVPQYTLVGIDTQIFAVGPAFKGIKMIPPGIHFVFYSSSTRDGREFSPTIGFFIDVAPSQVIVRKWNQQDEWLTKVSEEEEGRYSQAVRSLEFDKNLGPYNLRQYGEWKHLSNYITKDVVEKFEPVGGEITVTYESAILKGGPKTAMEIALDTQMKKSKLMTSSTEQPKGNRFYYTSIPRIIKHKGMSGQELTSMNLDKTQLLESVLSKEYKDSEDLLLGELQFSFVAFLMGQSLESFMQWKSIVSLLLGCTSAPFQTRSQLFTKFIKVIYHQLKYGLQKENSGPETGIHALLDDSWLASDSFLHFLCKDFFALVEETSVVDGDLLSWTRKFKELLENRLGWEFQKKSPVDGIYFEEDDEYAPVVEMLDESHGEYMDKTT

SEQ ID NO: 20649 - protein, 355 aa, Arabidopsis thaliana
  peptide (1)..(355): Ceres Seq. ID no. 14310171
  misc_feature (1)..(321): Pfam Name: AAR2 protein Pfam Description: AAR2 protein
  misc_feature (1)..(326): Homolog of NCBI NO: 24211598 NR Description: Protein c20orf4 homolog
  misc_feature (1)..(326): Homolog of NCBI NO: 12858611 NR Description: unnamed protein product [Mus musculus]
  misc_feature (1)..(326): Homolog of NCBI NO: 18034690 NR Description: chromosome 20 open reading frame 4 [Homo sapiens]
  misc_feature (1)..(326): Homolog of NCBI NO: 34860266 NR Description: similar to RIKEN cDNA 0610011L14 gene [Rattus
  misc_feature (1)..(346): Homolog of NCBI NO: 38346780 NR Description: OSJNBa0095H06.5 [Oryza sativa (japonica
  misc_feature (107)..(351): Homolog of NCBI NO: 6069471 NR Description: S-locus protein 3 [Brassica rapa]
  misc_feature (1)..(227): Homolog of NCBI NO: 15864559 NR Description: CePP putative protein [Brassica napus]
  misc_feature (1)..(348): Homolog of NCBI NO: 7657874 NR Description: CePP protein [Brassica napus var. napus]
  misc_feature (1)..(355): Homolog of NCBI NO: 30697362 NR Description: expressed protein [Arabidopsis thaliana]
  misc_feature (1)..(355): Homolog of NCBI NO: 18408532 NR Description: expressed protein [Arabidopsis thaliana]
MIPPGIHFVFYSSSTRDGREFSPTIGFFIDVAPSQVIVRKWNQQDEWLTKVSEEEEGRYSQAVRSLEFDKNLGPYNLRQYGEWKHLSNYITKDVVEKFEPVGGEITVTYESAILKGGPKTAMEIALDTQMKKSKLMTSSTEQPKGNRFYYTSIPRIIKHKGMSGQELTSMNLDKTQLLESVLSKEYKDSEDLLLGELQFSFVAFLMGQSLESFMQWKSIVSLLLGCTSAPFQTRSQLFTKFIKVIYHQLKYGLQKENSGPETGIHALLDDSWLASDSFLHFLCKDFFALVEETSVVDGDLLSWTRKFKELLENRLGWEFQKKSPVDGIYFEEDDEYAPVVEMLDESHGEYMDKTT

SEQ ID NO: 20650 - DNA, 2894 bp, Arabidopsis thaliana
  misc_feature (1)..(2894): Ceres Seq. ID no. 14310206
gaattacttttatccattttctctgtatatatatagaaagcaaaagaaagcattttcatcacctaccatcctctgttttcatttcctctgtttttcaaacttcctctgttctctcatggctccacttcacgaatctctgtcatcaatcaacgatgtaatcgaatccaaacctctttttgttccaataactaagccaatcttgcagccaaactcatttaacctatccgaagggtctctctgtgccaaagactctactccaatcctctttgatgttcctcaaaacgtaactttcacaccattctcatctcactccatatccactgatgctcctctcccaatcctcctccgagttcaagccaacgctcacaaaggagggtttctcggattcaccaaagaatcaccctctgatcgtctcacaaactccttgggaagattcgaagacagagagtttctcagtcttttccggttcaaaatgtggtggtcgacggcttggatcgggaaatcagggtcggatcttcaagccgagactcagtgggtgatgctaaagattcctgagatcgattcctacgtggccatcataccaaccattgaaggagcttttagggcttcacttactcctggtgagaaaggtaatgtcttgatttgtgcagagagtggctcaactaaagtaaaagagtcatctttcaaatccattgcctacattcacatttgtgacaacccctataacctcatgaaagaggcttttagtgcacttcgtgttcatatgaacactttcaagcatctagaagagaagaagcttccgaaaatcgtcgataagtttggatggtgcacttgggatgcttgctacttgaccgttgatcctgcaaccatttggactggagttaaggagtttgaagatggtggggtgtgtccgaagtttgtcatcattgatgatggatggcaaagtattaactttgatggtgatgagctagacaaagacgctgagaatcttgttcttggtggggagcaaatgactgcgaggcttaccagcttcaaggagtgtaagaagtttagaaactataaaggtggatcctttataacatctgatgcatctcacttcaatcctctcaagccgaagatgcttatctacaaagcgaccgagcgaattcaggcgattatattgagacggaagttggttaaggagtctggggaacaagatctgaccgaacttgatgaaaagatcaagattttgagtgaagaactcaatgcaatgtttgatgaggttgagaaagaagagtctttgggttctgatgatgtttctggctcaggtatggcggctttcacaaaggatttgaggttaaggtttaagagtttagatgatatatatgtgtggcatgctctttgtggtgcttggaatggtgttaggcctgaaaccatgatggatttgaaggccaaggttgctccttttgagctttcacctagtctaggcgctacgatggctgatctcgcagtcgacaaggttgtagaagctgggattggtcttgttcatccttctaaagctcatgaattctacgactcgatgcactcttatcttgctagtgttggtgttacaggagccaagattgatgttttccaaaccttggagtcactagcagaagaacatggaggacgagtggagcttgctaaagcttactacgatggtctgaccgaatccatgatcaagaattttaatggaactgatgtcattgcgagtatgcaacagtgcaatgagttcttcttccttgccacaaagcaaatctctattggcagagttggtgatgatttttggtgacaagacccatatggtgacccacaaggagtatattggctacaaggagttcacatgattcactgttcttacaacagtatttggatgggtcaaatgattcaaccagattgggacatgttccaatcagaccatgtctgtgccgagtaccacgccgcatctcgagccatttgcggtgggcctgtctatctcaatgaccatcttggcaaagcctcacataactttgatctcatcaagaaacttgctttctttgatggtaccatcccaaggtgtgtccactatgctcttcccactagagattcgctcttcaagaaccctttgtttgacaaagagtcaatcctcaagatcttcaacttcaacaagtttggaggagtgattggaacatttaactgtcaaggtgctgggtggagcccagaggagcataggttcaaaggatacaaagaatgttacacgacagtttcgggaacagttcatgtctcggacattgaatgggatcagaatccagaagctgcaggctctcaggtgacctacactggagattacttggtttacaagcaacaatctgaagaaatccttttcatgaactcgaaatcagaagcgatgaagataacccttgagccatccgcgtttgacctgttgagtttcgtgccagtcacggaacttgtaagttcaggggttagattcgcacctctagggttgatcaacatgttcaactgcgtcggaacagtccaagacatgaaggttactggtgataacagcataagagtggacgtgaaaggcgaaggaagattcatggcgtattcgagttcagctccggtgaagtgttacttgaacgacaaggaagctgagtttaagtgggaagaagaaactggtaaactcagtttctttgttccttgggttgaagaatctggtggcatctctcatctgtctttcaccttttaataatttgtttggatttttgtttttcgttttccttttcttgcattttgttatcagaagttgggttgtcaatttctgtttggtgttttacttttcaatttggagacttctcaaacaaattttaatatcaaatggattttctttgtcggtt

SEQ ID NO: 20651 - protein, 602 aa, Arabidopsis thaliana
  peptide (1)..(602): Ceres Seq. ID no. 14310207
  misc_feature (61)..(602): Homolog of NCBI NO: 6634701 NR Description: galactinol-raffinose galactosyltransferase [Vigna
  misc_feature (50)..(602): Homolog of NCBI NO: 19571727 NR Description: stachyose synthase [Stachys affinis]
  misc_feature (536)..(602): Homolog of NCBI NO: 34896196 NR Description: putative raffinose synthase
  misc_feature (76)..(353): Homolog of NCBI NO: 4106395 NR Description: raffinose synthase [Cucumis sativus]
  misc_feature (391)..(602): Homolog of NCBI NO: 4106395 NR Description: raffinose synthase [Cucumis sativus]
  misc_feature (72)..(353): Homolog of NCBI NO: 15242680 NR Description: glycosyl hydrolase family 36 [Arabidopsis
  misc_feature (418)..(602): Homolog of NCBI NO: 15242680 NR Description: glycosyl hydrolase family 36 [Arabidopsis
  misc_feature (63)..(602): Homolog of NCBI NO: 24412857 NR Description: stachyose synthase [Pisum sativum]
  misc_feature (63)..(602): Homolog of NCBI NO: 13992585 NR Description: stachyose synthase [Pisum sativum]
  misc_feature (67)..(602): Homolog of NCBI NO: 21038869 NR Description: putative stachyose synthase [Alonsoa meridionalis]
NYFYPFSLYIYRKQKKAFSSPTILCFHFLCFSNFLCSLMAPLHESLSSINDVIESKPLFVPITKPILQPNSFNLSEGSLCAKDSTPILFDVPQNVTFTPFSSHSISTDAPLPILLRVQANAHKGGFLGFTKESPSDRLTNSLGRFEDREFLSLFRFKMWWSTAWIGKSGSDLQAETQWVMLKIPEIDSYVAIIPTIEGAFRASLTPGEKGNVLICAESGSTKVKESSFKSIAYIHICDNPYNLMKEAFSALRVHMNTFKHLEEKKLPKIVDKFGWCTWDACYLTVDPATIWTGVKEFEDGGVCPKFVIIDDGWQSINFDGDELDKDAENLVLGGEQMTARLTSFKECKKFRNYKGGSFITSDASHFNPLKPKMLIYKATERIQAIILRRKLVKESGEQDLTELDEKIKILSEELNAMFDEVEKEESLGSDDVSGSGMAAFTKDLRLRFKSLDDIYVWHALCGAWNGVRPETMMDLKAKVAPFELSPSLGATMADLAVDKVVEAGIGLVHPSKAHEFYDSMHSYLASVGVTGAKIDVFQTLESLAEEHGGRVELAKAYYDGLTESMIKNFNGTDVIASMQQCNEFFFLATKQISIGRVGDDFW

SEQ ID NO: 20652 - protein, 564 aa, Arabidopsis thaliana
  peptide (1)..(564): Ceres Seq. ID no. 14310208
  misc_feature (498)..(564): Homolog of NCBI NO: 34896196 NR Description: putative raffinose synthase
  misc_feature (38)..(315): Homolog of NCBI NO: 4106395 NR Description: raffinose synthase [Cucumis sativus]
  misc_feature (353)..(564): Homolog of NCBI NO: 4106395 NR Description: raffinose synthase [Cucumis sativus]
  misc_feature (34)..(315): Homolog of NCBI NO: 15242680 NR Description: glycosyl hydrolase family 36 [Arabidopsis
  misc_feature (380)..(564): Homolog of NCBI NO: 15242680 NR Description: glycosyl hydrolase family 36 [Arabidopsis
  misc_feature (25)..(564): Homolog of NCBI NO: 24412857 NR Description: stachyose synthase [Pisum sativum]
  misc_feature (25)..(564): Homolog of NCBI NO: 13992585 NR Description: stachyose synthase [Pisum sativum]
  misc_feature (29)..(564): Homolog of NCBI NO: 21038869 NR Description: putative stachyose synthase [Alonsoa meridionalis]
  misc_feature (23)..(564): Homolog of NCBI NO: 6634701 NR Description: galactinol-raffinose galactosyltransferase [Vigna
  misc_feature (12)..(564): Homolog of NCBI NO: 19571727 NR Description: stachyose synthase [Stachys affinis]
MAPLHESLSSINDVIESKPLFVPITKPILQPNSFNLSEGSLCAKDSTPILFDVPQNVTFTPFSSHSISTDAPLPILLRVQANAHKGGFLGFTKESPSDRLTNSLGRFEDREFLSLFRFKMWWSTAWIGKSGSDLQAETQWVMLKIPEIDSYVAIIPTIEGAFRASLTPGEKGNVLICAESGSTKVKESSFKSIAYIHICDNPYNLMKEAFSALRVHMNTFKHLEEKKLPKIVDKFGWCTWDACYLTVDPATIWTGVKEFEDGGVCPKFVIIDDGWQSINFDGDELDKDAENLVLGGEQMTARLTSFKECKKFRNYKGGSFITSDASHFNPLKPKMLIYKATERIQAIILRRKLVKESGEQDLTELDEKIKILSEELNAMFDEVEKEESLGSDDVSGSGMAAFTKDLRLRFKSLDDIYVWHALCGAWNGVRPETMMDLKAKVAPFELSPSLGATMADLAVDKVVEAGIGLVHPSKAHEFYDSMHSYLASVGVTGAKIDVFQTLESLAEEHGGRVELAKAYYDGLTESMIKNFNGTDVIASMQQCNEFFFLATKQISIGRVGDDFW

SEQ ID NO: 20653 - protein, 445 aa, Arabidopsis thaliana
  peptide (1)..(445): Ceres Seq. ID no. 14310209
  misc_feature (379)..(445): Homolog of NCBI NO: 34896196 NR Description: putative raffinose synthase
  misc_feature (1)..(196): Homolog of NCBI NO: 4106395 NR Description: raffinose synthase [Cucumis sativus]
  misc_feature (234)..(445): Homolog of NCBI NO: 4106395 NR Description: raffinose synthase [Cucumis sativus]
  misc_feature (1)..(196): Homolog of NCBI NO: 15242680 NR Description: glycosyl hydrolase family 36 [Arabidopsis
  misc_feature (261)..(445): Homolog of NCBI NO: 15242680 NR Description: glycosyl hydrolase family 36 [Arabidopsis
  misc_feature (1)..(445): Homolog of NCBI NO: 24412857 NR Description: stachyose synthase [Pisum sativum]
  misc_feature (1)..(445): Homolog of NCBI NO: 13992585 NR Description: stachyose synthase [Pisum sativum]
  misc_feature (1)..(445): Homolog of NCBI NO: 21038869 NR Description: putative stachyose synthase [Alonsoa meridionalis]
  misc_feature (1)..(445): Homolog of NCBI NO: 6634701 NR Description: galactinol-raffinose galactosyltransferase [Vigna
  misc_feature (1)..(445): Homolog of NCBI NO: 19571727 NR Description: stachyose synthase [Stachys affinis]
MWWSTAWIGKSGSDLQAETQWVMLKIPEIDSYVAIIPTIEGAFRASLTPGEKGNVLICAESGSTKVKESSFKSIAYIHICDNPYNLMKEAFSALRVHMNTFKHLEEKKLPKIVDKFGWCTWDACYLTVDPATIWTGVKEFEDGGVCPKFVIIDDGWQSINFDGDELDKDAENLVLGGEQMTARLTSFKECKKFRNYKGGSFITSDASHFNPLKPKMLIYKATERIQAIILRRKLVKESGEQDLTELDEKIKILSEELNAMFDEVEKEESLGSDDVSGSGMAAFTKDLRLRFKSLDDIYVWHALCGAWNGVRPETMMDLKAKVAPFELSPSLGATMADLAVDKVVEAGIGLVHPSKAHEFYDSMHSYLASVGVTGAKIDVFQTLESLAEEHGGRVELAKAYYDGLTESMIKNFNGTDVIASMQQCNEFFFLATKQISIGRVGDDFW

SEQ ID NO: 20654 - DNA, 2728 bp, Arabidopsis thaliana
  misc_feature (1)..(2728): Ceres Seq. ID no. 13646955
  misc_feature: MA Experiment ID: 20000173 Result: Down-regulated in Transcription
  misc_feature: MA Experiment 20000173 PARAMETER Experiment Name: At_42deg_Heat_P Parameter: Age (day) Value: 14
  misc_feature: MA Experiment 20000173 PARAMETER Experiment Name: At_42deg_Heat_P Parameter: Organism Value: A. thaliana
  misc_feature: MA Experiment 20000173 PARAMETER Experiment Name: At_42deg_Heat_P Parameter: Plant Line Value: WS
  misc_feature: MA Experiment 20000173 PARAMETER Experiment Name: At_42deg_Heat_P Parameter: Temperature (deg C) Value: 42 vs. 22
  misc_feature: MA Experiment 20000173 PARAMETER Experiment Name: At_42deg_Heat_P Parameter: Timepoint (hr) Value: 6
  misc_feature: MA Experiment 20000173 PARAMETER Experiment Name: At_42deg_Heat_P Parameter: Tissue Value: Aerial
  misc_feature: MA Experiment ID: 20000184 Result: Down-regulated in Transcription
  misc_feature: MA Experiment 20000184 PARAMETER Experiment Name: At_Shoots__P Parameter: Age (day) Value: 7
  misc_feature: MA Experiment 20000184 PARAMETER Experiment Name: At_Shoots__P Parameter: Tissue Value: Shoots vs. Whole Plant
  misc_feature: MA Experiment ID: 20000265 Result: Up-regulated in Transcription
  misc_feature: MA Experiment 20000265 PARAMETER Experiment Name: At_Open_Flower_P Parameter: Age (day) Value: 21
  misc_feature: MA Experiment 20000265 PARAMETER Experiment Name: At_Open_Flower_P Parameter: Plant Line Value: WS
  misc_feature: MA Experiment 20000265 PARAMETER Experiment Name: At_Open_Flower_P Parameter: Tissue Value: Closed Flower vs. Whole Plant
  misc_feature (1261)..(1261): n is a, c, t, g, unknown, or other
  misc_feature (1262)..(1262): n is a, c, t, g, unknown, or other
  misc_feature (1818)..(1818): n is a, c, t, g, unknown, or other
  misc_feature (1819)..(1819): n is a, c, t, g, unknown, or other
  misc_feature (2676)..(2676): n is a, c, t, g, unknown, or other
  misc_feature (2677)..(2677): n is a, c, t, g, unknown, or other
  misc_feature (2678)..(2678): n is a, c, t, g, unknown, or other
  misc_feature (2679)..(2679): n is a, c, t, g, unknown, or other
gagctcactagtccccccccccccgaaagtcataataaccttgacttggaccagtcgcctgaaagtcttgagtttttttcccttaagatcccgccgggctccggtgctggcggttaaacccttccaaaacctgaaattcgtttagcttaggacaaacaagtgaagcccaccatacagaaatgtctaacagaagcctccatttgaagaaaatatcatggctttcttctcggattctctcagacaatgttcacggtcgatttcgccgatcaatcactactccagccacttgtttagctccttcactcgatggagacatgaacattggatccaagacattggtcgaacaacgtttctctcgcggatttgcatcagtacgacgagtatctcgagcttcttcttcttcttctccttcctctccacatgttgatttgctctcttttattaaagcttcacttgataaacttgaaggtccttcccatcattggttgaatcgagactttgggaataaacagcttttcaaggacaaaggaacttatgtagttctagctggacatttgctagacggaacaagtgatctgagtggtttctttgagaaactaaagttgcttcagcagaggtctccgggtgtctgtttcatgggcatccacttcagtgatcaagctcgaatcgctgatgatcgaactgctctagctgagttgattttgaaggaatacctcacttttcctgtgctactttccgaaaaagaatttcccaagacaagtggggaagtacgttacatcgtgtttaaagattttaagaatcctctaatctacgaagagaaggatcttgatattgcttctgtagttaaagctcttgacagcctcctcactcaagatactgagaaatccaagtctgtcagacttttcacgaacacttggtcaaaacaagcagaggctatcaaggaatcacatttcccttctttctttcaggaattgttactttactttccaggttgtatctctgcagacgaagttggagaccgtctgtttctttctgataccaaccatcatcgtattattattttcgaaaacagtgggaagattgtagacagtattggttgtttcccaggttttgaggatggagattttgaatctgcaaagatgttacgtcctacagggaccctttacgacgaagcggaggattgtctttacattgtagattctgagaatcacgccattagaagagcaaatataaatagccgggtcctggaaacagtatatcnnaaggttattaagaaaactggtggcttatggtcttggataatggagaaaatgggtcttggaaaagatgacgatacaacagttgatgctgataccaaatcagaagaatttgatgcacgctctcttttgtttccatggcatatactgaagcgtgacgatgagagtcttttagtcattaacaaaagcttttcgaagttatggataataaatttagcttcaggagagatcgaagaagttgtggaagggttttcgaagataattgagatctgcggtcaatcaatcacagagaagctatcagtgttggaacatatgccttctaactggttgcaacagcaaactgcggctatcgcctcatttaaggagcagccaagtgcttcccttttgtcttmtwwyactaaacttggagacgacattgtcatgacagatatagcttgtcagagggtgttgaagctaaatagagattctggagcatgctctagcattcaattctcaaacagtgggatccttgggttgccctattggttgttcattccactggagagagtttttaatctagctnntggagttcaggaagcacatctcagtcatactcaggaattccggttattgccaggtaaaattagcatacggttgaacatagagattcctccatgcacggagcttgttgadccgatacaagaaagctgcatatggcgacagacaagaggcgcaatcagtgaattctcgagtgctggaagtgcagttgaaccttcagaaaaggttggagtttcacaacaatggtatgatgaattagacagcctcgccaaagaaatagccaaccctgaagcagctgaggaagaggaagaagaagatgttaacccctctgaggttgacagagaagaagatggacgtatccacattgattgtcctgtcaaaacaagtcctggctcaagtgagcttattgtttatgcagctttgtatttaagactagcgagaaacgaagagacagaaagtgcgacccaggaagaactggcgagaaaaatagcaaagattttaaagccagtacggaacattacaactatgaaggaagatttgtttgtgaatttgttgtccaagtcaaagagagaattgagagacattgtcttcataaagccgatgcatgtgcggataaggttagactcgaaggatcatccaaaagccgataactcaagagacgtaatcttgactgactcctctgttgaggttgatgtctctctctgacaacgaataacgatgcttttgcagtccattctttctcaaaagtaccaaatggctactctaattctttttgaggtggtaaaaatgagctcaataagacttgtataagtagtttatgacattatattaacgatggtccaagtttcatttggatttctatattttagtgtttcttctattnnnnaaaaaaaagaaaaaaaaaaaaaaaaaaaactcgagggggggcccggtac

SEQ ID NO: 20655 - protein, 772 aa, Arabidopsis thaliana
  peptide (1)..(772): Ceres Seq. ID no. 15219260
  misc_feature (267)..(359): Homolog of NCBI NO: 12835819 NR Description: unnamed protein product [Mus musculus]
  misc_feature (267)..(359): Homolog of NCBI NO: 29789158 NR Description: RIKEN cDNA 1200003G01 [Mus musculus]
  misc_feature (267)..(359): Homolog of NCBI NO: 27552887 NR Description: 1200003G01Rik protein [Mus musculus]
  misc_feature (267)..(359): Homolog of NCBI NO: 23126366 NR Description: hypothetical protein [Nostoc punctiforme]
  misc_feature (140)..(359): Homolog of NCBI NO: 17228508 NR Description: hypothetical protein [Nostoc sp. PCC 7120]
  misc_feature (267)..(355): Homolog of NCBI NO: 30696124 NR Description: haloacid dehalogenase-like hydrolase family
  misc_feature (267)..(355): Homolog of NCBI NO: 25404123 NR Description: hypothetical protein F13N6.21 [imported] -
  misc_feature (68)..(190): Homolog of NCBI NO: 18481710 NR Description: hypothetical protein [Sorghum bicolor]
  misc_feature (193)..(434): Homolog of NCBI NO: 18481710 NR Description: hypothetical protein [Sorghum bicolor]
  misc_feature (422)..(772): Homolog of NCBI NO: 18481710 NR Description: hypothetical protein [Sorghum bicolor]
  misc_feature (361)..(361): Xaa is any aa, unknown or other
  misc_feature (490)..(490): Xaa is any aa, unknown or other
  misc_feature (491)..(491): Xaa is any aa, unknown or other
  misc_feature (547)..(547): Xaa is any aa, unknown or other
  misc_feature (583)..(583): Xaa is any aa, unknown or other
MSNRSLHLKKISWLSSRILSDNVHGRFRRSITTPATCLAPSLDGDMNIGSKTLVEQRFSRGFASVRRVSRASSSSSPSSPHVDLLSFIKASLDKLEGPSHHWLNRDFGNKQLFKDKGTYVVLAGHLLDGTSDLSGFFEKLKLLQQRSPGVCFMGIHFSDQARIADDRTALAELILKEYLTFPVLLSEKEFPKTSGEVRYIVFKDFKNPLIYEEKDLDIASVVKALDSLLTQDTEKSKSVRLFTNTWSKQAEAIKESHFPSFFQELLLYFPGCISADEVGDRLFLSDTNHHRIIIFENSGKIVDSIGCFPGFEDGDFESAKMLRPTGTLYDEAEDCLYIVDSENHAIRRANINSRVLETVYXKVIKKTGGLWSWIMEKMGLGKDDDTTVDADTKSEEFDARSLLFPWHILKRDDESLLVINKSFSKLWIINLASGEIEEVVEGFSKIIEICGQSITEKLSVLEHMPSNWLQQQTAAIASFKEQPSASLLSXXTKLGDDIVMTDIACQRVLKLNRDSGACSSIQFSNSGILGLPYWLFIPLERVFNLAXGVQEAHLSHTQEFRLLPGKISIRLNIEIPPCTELVXPIQESCIWRQTRGAISEFSSAGSAVEPSEKVGVSQQWYDELDSLAKEIANPEAAEEEEEEDVNPSEVDREEDGRIHIDCPVKTSPGSSELIVYAALYLRLARNEETESATQEELARKIAKILKPVRNITTMKEDLFVNLLSKSKRELRDIVFIKPMHVRIRLDSKDHPKADNSRDVILTDSSVEVDVSL

SEQ ID NO: 20656 - protein, 727 aa, Arabidopsis thaliana
  peptide (1)..(727): Ceres Seq. ID no. 15219261
  misc_feature (222)..(314): Homolog of NCBI NO: 12835819 NR Description: unnamed protein product [Mus musculus]
  misc_feature (222)..(314): Homolog of NCBI NO: 29789158 NR Description: RIKEN cDNA 1200003G01 [Mus musculus]
  misc_feature (222)..(314): Homolog of NCBI NO: 27552887 NR Description: 1200003G01Rik protein [Mus musculus]
  misc_feature (222)..(314): Homolog of NCBI NO: 23126366 NR Description: hypothetical protein [Nostoc punctiforme]
  misc_feature (95)..(314): Homolog of NCBI NO: 17228508 NR Description: hypothetical protein [Nostoc sp. PCC 7120]
  misc_feature (222)..(310): Homolog of NCBI NO: 30696124 NR Description: haloacid dehalogenase-like hydrolase family
  misc_feature (222)..(310): Homolog of NCBI NO: 25404123 NR Description: hypothetical protein F13N6.21 [imported] -
  misc_feature (23)..(145): Homolog of NCBI NO: 18481710 NR Description: hypothetical protein [Sorghum bicolor]
  misc_feature (148)..(389): Homolog of NCBI NO: 18481710 NR Description: hypothetical protein [Sorghum bicolor]
  misc_feature (377)..(727): Homolog of NCBI NO: 18481710 NR Description: hypothetical protein [Sorghum bicolor]
  misc_feature (316)..(316): Xaa is any aa, unknown or other
  misc_feature (445)..(445): Xaa is any aa, unknown or other
  misc_feature (446)..(446): Xaa is any aa, unknown or other
  misc_feature (502)..(502): Xaa is any aa, unknown or other
  misc_feature (538)..(538): Xaa is any aa, unknown or other
MNIGSKTLVEQRFSRGFASVRRVSRASSSSSPSSPHVDLLSFIKASLDKLEGPSHHWLNRDFGNKQLFKDKGTYVVLAGHLLDGTSDLSGFFEKLKLLQQRSPGVCFMGIHFSDQARIADDRTALAELILKEYLTFPVLLSEKEFPKTSGEVRYIVFKDFKNPLIYEEKDLDIASVVKALDSLLTQDTEKSKSVRLFTNTWSKQAEAIKESHFPSFFQELLLYFPGCISADEVGDRLFLSDTNHHRIIIFENSGKIVDSIGCFPGFEDGDFESAKMLRPTGTLYDEAEDCLYIVDSENHAIRRANINSRVLETVYXKVIKKTGGLWSWIMEKMGLGKDDDTTVDADTKSEEFDARSLLFPWHILKRDDESLLVINKSFSKLWIINLASGEIEEVVEGFSKIIEICGQSITEKLSVLEHMPSNWLQQQTAAIASFKEQPSASLLSXXTKLGDDIVMTDIACQRVLKLNRDSGACSSIQFSNSGILGLPYWLFIPLERVFNLAXGVQEAHLSHTQEFRLLPGKISIRLNIEIPPCTELVXPIQESCIWRQTRGAISEFSSAGSAVEPSEKVGVSQQWYDELDSLAKEIANPEAAEEEEEEDVNPSEVDREEDGRIHIDCPVKTSPGSSELIVYAALYLRLARNEETESATQEELARKIAKILKPVRNITTMKEDLFVNLLSKSKRELRDIVFIKPMHVRIRLDSKDHPKADNSRDVILTDSSVEVDVSL

SEQ ID NO: 20657 - protein, 620 aa, Arabidopsis thaliana
  peptide (1)..(620): Ceres Seq. ID no. 15219262
  misc_feature (115)..(207): Homolog of NCBI NO: 12835819 NR Description: unnamed protein product [Mus musculus]
  misc_feature (115)..(207): Homolog of NCBI NO: 29789158 NR Description: RIKEN cDNA 1200003G01 [Mus musculus]
  misc_feature (115)..(207): Homolog of NCBI NO: 27552887 NR Description: 1200003G01Rik protein [Mus musculus]
  misc_feature (115)..(207): Homolog of NCBI NO: 23126366 NR Description: hypothetical protein [Nostoc punctiforme]
  misc_feature (1)..(207): Homolog of NCBI NO: 17228508 NR Description: hypothetical protein [Nostoc sp. PCC 7120]
  misc_feature (115)..(203): Homolog of NCBI NO: 30696124 NR Description: haloacid dehalogenase-like hydrolase family
  misc_feature (115)..(203): Homolog of NCBI NO: 25404123 NR Description: hypothetical protein F13N6.21 [imported] -
  misc_feature (1)..(38): Homolog of NCBI NO: 18481710 NR Description: hypothetical protein [Sorghum bicolor]
  misc_feature (41)..(282): Homolog of NCBI NO: 18481710 NR Description: hypothetical protein [Sorghum bicolor]
  misc_feature (270)..(620): Homolog of NCBI NO: 18481710 NR Description: hypothetical protein [Sorghum bicolor]
  misc_feature (209)..(209): Xaa is any aa, unknown or other
  misc_feature (338)..(338): Xaa is any aa, unknown or other
  misc_feature (339)..(339): Xaa is any aa, unknown or other
  misc_feature (395)..(395): Xaa is any aa, unknown or other
  misc_feature (431)..(431): Xaa is any aa, unknown or other
MGIHFSDQARIADDRTALAELILKEYLTFPVLLSEKEFPKTSGEVRYIVFKDFKNPLIYEEKDLDIASVVKALDSLLTQDTEKSKSVRLFTNTWSKQAEAIKESHFPSFFQELLLYFPGCISADEVGDRLFLSDTNHHRIIIFENSGKIVDSIGCFPGFEDGDFESAKMLRPTGTLYDEAEDCLYIVDSENHAIRRANINSRVLETVYXKVIKKTGGLWSWIMEKMGLGKDDDTTVDADTKSEEFDARSLLFPWHILKRDDESLLVINKSFSKLWIINLASGEIEEVVEGFSKIIEICGQSITEKLSVLEHMPSNWLQQQTAAIASFKEQPSASLLSXXTKLGDDIVMTDIACQRVLKLNRDSGACSSIQFSNSGILGLPYWLFIPLERVFNLAXGVQEAHLSHTQEFRLLPGKISIRLNIEIPPCTELVXPIQESCIWRQTRGAISEFSSAGSAVEPSEKVGVSQQWYDELDSLAKEIANPEAAEEEEEEDVNPSEVDREEDGRIHIDCPVKTSPGSSELIVYAALYLRLARNEETESATQEELARKIAKILKPVRNITTMKEDLFVNLLSKSKRELRDIVFIKPMHVRIRLDSKDHPKADNSRDVILTDSSVEVDVSL

SEQ ID NO: 20658 - DNA, 1184 bp, Arabidopsis thaliana
  misc_feature (1)..(1184): Ceres Seq. ID no. 13646963
  misc_feature: MA Experiment ID: 20000307 Result: Up-regulated in Transcription
  misc_feature: MA Experiment 20000307 PARAMETER Experiment Name: At_Germinating_Seeds_Sub_P Parameter: Age (hr) Value: 24 vs. 0
  misc_feature: MA Experiment 20000307 PARAMETER Experiment Name: At_Germinating_Seeds_Sub_P Parameter: Organism Value: A. thaliana
  misc_feature: MA Experiment 20000307 PARAMETER Experiment Name: At_Germinating_Seeds_Sub_P Parameter: Plant Line Value: WS
  misc_feature: MA Experiment 20000307 PARAMETER Experiment Name: At_Germinating_Seeds_Sub_P Parameter: Tissue Value: Germinating Seeds
  misc_feature: MA Experiment ID: 20000355 Result: Up-regulated in Transcription
  misc_feature: MA Experiment 20000355 PARAMETER Experiment Name: At_Siliques_Sub_P Parameter: Age (day) Value: 21
  misc_feature: MA Experiment 20000355 PARAMETER Experiment Name: At_Siliques_Sub_P Parameter: Organism Value: A. thaliana
  misc_feature: MA Experiment 20000355 PARAMETER Experiment Name: At_Siliques_Sub_P Parameter: Plant Line Value: WS
  misc_feature: MA Experiment 20000355 PARAMETER Experiment Name: At_Siliques_Sub_P Parameter: Tissue Value: Less Than 5mm Siliques vs. Whole Plant
  misc_feature: MA Experiment ID: 20000440 Result: Up-regulated in Transcription
  misc_feature: MA Experiment 20000440 PARAMETER Experiment Name: At_Closed-Flower__Sub_P Parameter: Tissue Value: Closed Flower vs. Whole Plant
atctcactgccttcactcacactacaacttccagttaaagaaatggcgaattcagcgtcactactgtatgatcagctcaaggttgctgagccgtttttcttattggctggtccaaatgtgatcgaatccgaagagcatgttcttcgtatggctaaaagcatcaaagatatttcgacaaagcttgggttgcctctggttttcaagtcaagtttcgataaagctaacagaacttcatcaaagtccttccgaggtcctggcatggctgaggggctcaagattcttgagaaggtgaaagtagcatttgatctaccaatcgttactgacgttcatgagtcgagtcagtgtgaagcagttggcaaggttgcagatataattcagataccggcgttcttatgtcgacagacagatcttctggtcgcggcagcccaaagtgggaaaattatcaacataaagaaaggacaattttgtggtcactctgtcatgagaaactcggctgagaaggttagactcgcagggaatccaaatgtgatggtttgtgaaagaggaaccatgtttggatacaatgatttaatagtagatccacgaaatttggaatggatgagggaagctgattgtcccgttgttgctgatataactcattcattacaacaacctgcaggcaagaagttagatggtgggggtgttgctagtggtggccttcgcgaattaataccatgcatagcaagaaccgccgtagctgttggtgtcgatggaattttcatggaggtgcatgatgatcctttaaatgcaccggtcgatggtccaacacaatggcctctgcgtcatctagaagaactgctagaagagctcattgcaatcgcgagtgtcacaaaggggaaacaacagttccaaatcgatctcacgccttatcgtgattagaatcaaagggtccgtacgtcactttgggtgcaactacatcttcttgataatatttcaatcttgtcggagcaataagcattatttggcaaaacacatctctccacagtgactaatgtatattcaaagtagctgatgttgcctgatatgatatcaaatgtctaagtttgttttatttttgaagaaataaacaacaattagaagttaaattacttttttatgtcaacataaagcactttttctatacctgatcnnntagtcttttcttt

SEQ ID NO: 20659 - protein, 305 aa, Arabidopsis thaliana
  peptide (1)..(305): Ceres Seq. ID no. 15218701
  misc_feature (6)..(296): Homolog of NCBI NO: 22996333 NR Description: hypothetical protein [Xylella fastidiosa Ann-1]
  misc_feature (69)..(251): Homolog of NCBI NO: 32169731 NR Description: 3-deoxy-D-manno-2-octulosonic acid-8-phosphate
  misc_feature (15)..(305): Homolog of NCBI NO: 29367487 NR Description: putative 2-dehydro-3-deoxyphosphooctonate
  misc_feature (18)..(305): Homolog of NCBI NO: 13509333 NR Description: 3-desoxy-D-manno octulosonic acid-8-phosphate
  misc_feature (21)..(305): Homolog of NCBI NO: 6647535 NR Description: 2-dehydro-3-deoxyphosphooctonate aldolase aldolase) (3-deoxy-D-manno-octulosonic acid 8-phosphate
  misc_feature (18)..(305): Homolog of NCBI NO: 13620976 NR Description: 2-dehydro-3-deoxyphosphooctonate aldolase
  misc_feature (18)..(305): Homolog of NCBI NO: 21360537 NR Description: AT5g09730/F17I14_80 [Arabidopsis thaliana]
  misc_feature (18)..(305): Homolog of NCBI NO: 15219400 NR Description: 2-dehydro-3-deoxyphosphooctonate aldolase
  misc_feature (15)..(305): Homolog of NCBI NO: 25291179 NR Description: hypothetical protein F3O9.14 [imported] -
  misc_feature (15)..(305): Homolog of NCBI NO: 15219214 NR Description: 3-deoxy-D-manno-2-octulosonate-8-phosphate
ISLPSLTLQLPVKEMANSASLLYDQLKVAEPFFLLAGPNVIESEEHVLRMAKSIKDISTKLGLPLVFKSSFDKANRTSSKSFRGPGMAEGLKILEKVKVAFDLPIVTDVHESSQCEAVGKVADIIQIPAFLCRQTDLLVAAAQSGKIINIKKGQFCGHSVMRNSAEKVRLAGNPNVMVCERGTMFGYNDLIVDPRNLEWMREADCPVVADITHSLQQPAGKKLDGGGVASGGLRELIPCIARTAVAVGVDGIFMEVHDDPLNAPVDGPTQWPLRHLEELLEELIAIASVTKGKQQFQIDLTPYRD

SEQ ID NO: 20660 - protein, 291 aa, Arabidopsis thaliana
  peptide (1)..(291): Ceres Seq. ID no. 15218702
  misc_feature (1)..(282): Homolog of NCBI NO: 22996333 NR Description: hypothetical protein [Xylella fastidiosa Ann-1]
  misc_feature (55)..(237): Homolog of NCBI NO: 32169731 NR Description: 3-deoxy-D-manno-2-octulosonic acid-8-phosphate
  misc_feature (1)..(291): Homolog of NCBI NO: 29367487 NR Description: putative 2-dehydro-3-deoxyphosphooctonate
  misc_feature (4)..(291): Homolog of NCBI NO: 13509333 NR Description: 3-desoxy-D-manno octulosonic acid-8-phosphate
  misc_feature (7)..(291): Homolog of NCBI NO: 6647535 NR Description: 2-dehydro-3-deoxyphosphooctonate aldolase aldolase) (3-deoxy-D-manno-octulosonic acid 8-phosphate
  misc_feature (4)..(291): Homolog of NCBI NO: 13620976 NR Description: 2-dehydro-3-deoxyphosphooctonate aldolase
  misc_feature (4)..(291): Homolog of NCBI NO: 21360537 NR Description: AT5g09730/F17I14_80 [Arabidopsis thaliana]
  misc_feature (4)..(291): Homolog of NCBI NO: 15219400 NR Description: 2-dehydro-3-deoxyphosphooctonate aldolase
  misc_feature (1)..(291): Homolog of NCBI NO: 25291179 NR Description: hypothetical protein F3O9.14 [imported] -
  misc_feature (1)..(291): Homolog of NCBI NO: 15219214 NR Description: 3-deoxy-D-manno-2-octulosonate-8-phosphate
MANSASLLYDQLKVAEPFFLLAGPNVIESEEHVLRMAKSIKDISTKLGLPLVFKSSFDKANRTSSKSFRGPGMAEGLKILEKVKVAFDLPIVTDVHESSQCEAVGKVADIIQIPAFLCRQTDLLVAAAQSGKIINIKKGQFCGHSVMRNSAEKVRLAGNPNVMVCERGTMFGYNDLIVDPRNLEWMREADCPVVADITHSLQQPAGKKLDGGGVASGGLRELIPCIARTAVAVGVDGIFMEVHDDPLNAPVDGPTQWPLRHLEELLEELIAIASVTKGKQQFQIDLTPYRD

SEQ ID NO: 20661 - protein, 256 aa, Arabidopsis thaliana
  peptide (1)..(256): Ceres Seq. ID no. 15218703
  misc_feature (1)..(247): Homolog of NCBI NO: 22996333 NR Description: hypothetical protein [Xylella fastidiosa Ann-1]
  misc_feature (20)..(202): Homolog of NCBI NO: 32169731 NR Description: 3-deoxy-D-manno-2-octulosonic acid-8-phosphate
  misc_feature (1)..(256): Homolog of NCBI NO: 29367487 NR Description: putative 2-dehydro-3-deoxyphosphooctonate
  misc_feature (1)..(256): Homolog of NCBI NO: 13509333 NR Description: 3-desoxy-D-manno octulosonic acid-8-phosphate
  misc_feature (1)..(256): Homolog of NCBI NO: 6647535 NR Description: 2-dehydro-3-deoxyphosphooctonate aldolase aldolase) (3-deoxy-D-manno-octulosonic acid 8-phosphate
  misc_feature (1)..(256): Homolog of NCBI NO: 13620976 NR Description: 2-dehydro-3-deoxyphosphooctonate aldolase
  misc_feature (1)..(256): Homolog of NCBI NO: 21360537 NR Description: AT5g09730/F17I14_80 [Arabidopsis thaliana]
  misc_feature (1)..(256): Homolog of NCBI NO: 15219400 NR Description: 2-dehydro-3-deoxyphosphooctonate aldolase
  misc_feature (1)..(256): Homolog of NCBI NO: 25291179 NR Description: hypothetical protein F3O9.14 [imported] -
  misc_feature (1)..(256): Homolog of NCBI NO: 15219214 NR Description: 3-deoxy-D-manno-2-octulosonate-8-phosphate
MAKSIKDISTKLGLPLVFKSSFDKANRTSSKSFRGPGMAEGLKILEKVKVAFDLPIVTDVHESSQCEAVGKVADIIQIPAFLCRQTDLLVAAAQSGKIINIKKGQFCGHSVMRNSAEKVRLAGNPNVMVCERGTMFGYNDLIVDPRNLEWMREADCPVVADITHSLQQPAGKKLDGGGVASGGLRELIPCIARTAVAVGVDGIFMEVHDDPLNAPVDGPTQWPLRHLEELLEELIAIASVTKGKQQFQIDLTPYRD

SEQ ID NO: 20662 - DNA, 1426 bp, Arabidopsis thaliana
  misc_feature (1)..(1426): Ceres Seq. ID no. 14310259
  misc_feature: MA Experiment ID: 20000227 Result: Up-regulated in Transcription
  misc_feature: MA Experiment 20000227 PARAMETER Experiment Name: At_Root-Tips-vs-Tops_P Parameter: Tissue Value: Root Tips vs. Root Tops
  misc_feature: MA Experiment ID: 20000794 Result: Down-regulated in Transcription
  misc_feature: MA Experiment 20000794 PARAMETER Experiment Name: At_Petals_P Parameter: Age (day) Value: 23-25 days
  misc_feature: MA Experiment 20000794 PARAMETER Experiment Name: At_Petals_P Parameter: Plant Line Value: WS
  misc_feature: MA Experiment 20000794 PARAMETER Experiment Name: At_Petals_P Parameter: Tissue Value: Petals vs. Whole plant
  misc_feature: MA Experiment ID: 20001451 Result: Down-regulated in Transcription
  misc_feature: MA Experiment 20001451 PARAMETER Experiment Name: At_Far-red-induction_P Parameter: Age (day) Value: 7
  misc_feature: MA Experiment 20001451 PARAMETER Experiment Name: At_Far-red-induction_P Parameter: Light Value: Far-red vs. White
  misc_feature: MA Experiment 20001451 PARAMETER Experiment Name: At_Far-red-induction_P Parameter: Organism Value: A. thaliana
  misc_feature: MA Experiment 20001451 PARAMETER Experiment Name: At_Far-red-induction_P Parameter: Plant Line Value: Columbia
  misc_feature: MA Experiment 20001451 PARAMETER Experiment Name: At_Far-red-induction_P Parameter: Timepoint (hr) Value: 24
  misc_feature: MA Experiment 20001451 PARAMETER Experiment Name: At_Far-red-induction_P Parameter: Tissue Value: Whole Plant
  misc_feature: MA Experiment ID: 20001905 Result: Down-regulated in Transcription
  misc_feature: MA Experiment 20001905 PARAMETER Experiment Name: At_Drought_Reproduction_P Parameter: Age (day) Value: 40
  misc_feature: MA Experiment 20001905 PARAMETER Experiment Name: At_Drought_Reproduction_P Parameter: Organism Value: A. thaliana
  misc_feature: MA Experiment 20001905 PARAMETER Experiment Name: At_Drought_Reproduction_P Parameter: Plant Line Value: WS
  misc_feature: MA Experiment 20001905 PARAMETER Experiment Name: At_Drought_Reproduction_P Parameter: Timepoint (day) Value: 10
  misc_feature: MA Experiment 20001905 PARAMETER Experiment Name: At_Drought_Reproduction_P Parameter: Tissue Value: Rosettes
  misc_feature: MA Experiment 20001905 PARAMETER Experiment Name: At_Drought_Reproduction_P Parameter: Treatment Value: Drought vs. No Drought
  misc_feature: MA Experiment ID: 20001911 Result: Down-regulated in Transcription
  misc_feature: MA Experiment 20001911 PARAMETER Experiment Name: At_Drought_Reproduction_P Parameter: Age (day) Value: 40
  misc_feature: MA Experiment 20001911 PARAMETER Experiment Name: At_Drought_Reproduction_P Parameter: Organism Value: A. thaliana
  misc_feature: MA Experiment 20001911 PARAMETER Experiment Name: At_Drought_Reproduction_P Parameter: Plant Line Value: WS
  misc_feature: MA Experiment 20001911 PARAMETER Experiment Name: At_Drought_Reproduction_P Parameter: Timepoint (day) Value: 10
  misc_feature: MA Experiment 20001911 PARAMETER Experiment Name: At_Drought_Reproduction_P Parameter: Tissue Value: Flowers
  misc_feature: MA Experiment 20001911 PARAMETER Experiment Name: At_Drought_Reproduction_P Parameter: Treatment Value: Drought vs. No Drought
ggatgtgatcgaaacaaaaagctctttgcttcttcttcgtccatttctcgtagcacacttttcacaaagaagatgggttcttcacaatctacgcaaatggcagacgaagaagaagaagaagaggaaactgacaatgaagaagaagaagaagaagataatggcagatcaaacacaagacaattagacaatctcctagtaaagaaagttctagaacaagagcctgagatgttaccatgtcacgcttcagcttcaccactctcaccacaactatcatctctcggtactccaaggcttggaccatcgattaaagtctgggatccttacaatgtcctttctccgccggcgcaaccgccgtctatcttctctcgaatcgtgtctggtgatgaagatcgagctgtgacagaggtttatctgattagccatggtgagtgtgatcttaatcttagaactgatttgattggtgggagatgtcatgtagctgctcttactgctaatggtaaacgtcaagctagggctcttgctgttttcttcaaatctcaaggtgttcggtttaattcggtttattcgtcacctctagatcgagctagatccatggctgtttctgtttgtcaggaaatgagttttccggaggagcatgtacaatcctcagatgctattattgagatgagtttaggggattgggaaggttgtaatcaagcagagatttatagtcctgaaactttgagtttgattgaaaggtgtcagcctgatttcacagctccatctggagaatcactgaggcaagtagagtttcgaatggttcagtttctaaacgggacagtctcaggagttgcagagaagcttaggtcagattattcttccactacaaatcacaatgaaactcatgagcgtgatggtggtgtgtcacttccttcgactaactgggacttactacacaagcatcgtcccagtctcacaaggaagaaatctggtaaaagcaggcttcaagtgatgactaatcacgaacctgacgatggaaactccccaagggaagaagttaatcataatcacaatgacctaagtgattcgtcttccttaatcttgaattgtgtcggggttttcacgcattctttgcctataaagtgtcttttaaccggaatccttggttgcagtccggtaatgactcataagatctgtgtagaagactcttcagtgactgtgttacaacattcatggagaaacgggtggcagatcaaacgaatgaatgatactgctcatcttcgattgttgtaactttatttaccgataaattatttggaaaaacgaggattcatatatgtttacaccatgaatctgcagaagctcaagaacaaaggttctgcagataatgaaatgccacggcctctttgtactgttttgtttgtgaaatgaggaaaaaaagataaac

SEQ ID NO: 20663 - protein, 423 aa, Arabidopsis thaliana
  peptide (1)..(423): Ceres Seq. ID no. 14310260
  misc_feature (134)..(315): Pfam Name: Phosphoglycerate mutase family Pfam Description: Phosphoglycerate mutase family
  misc_feature (75)..(423): Homolog of NCBI NO: 21386798 NR Description: X4 protein [Silene dioica]
  misc_feature (70)..(423): Homolog of NCBI NO: 17902572 NR Description: putative fructose-2,6-bisphosphatase [Silene
  misc_feature (25)..(423): Homolog of NCBI NO: 17902576 NR Description: putative fructose-2,6-bisphosphatase [Silene
  misc_feature (25)..(423): Homolog of NCBI NO: 17902574 NR Description: putative Fructose-2,6-bisphosphatase [Silene
  misc_feature (25)..(423): Homolog of NCBI NO: 17902578 NR Description: putative fructose-2,6-bisphosphatase [Silene
  misc_feature (25)..(410): Homolog of NCBI NO: 25518294 NR Description: hypothetical protein F13K23.10 [imported] -
  misc_feature (25)..(423): Homolog of NCBI NO: 21554168 NR Description: putative fructose-2,6-bisphosphatase [Arabidopsis
  misc_feature (25)..(423): Homolog of NCBI NO: 18391446 NR Description: expressed protein [Arabidopsis thaliana]
  misc_feature (25)..(422): Homolog of NCBI NO: 15231617 NR Description: expressed protein [Arabidopsis thaliana]
  misc_feature (25)..(423): Homolog of NCBI NO: 9279667 NR Description: gene_id:MDJ14.7~similar to unknown
GCDRNKKLFASSSSISRSTLFTKKMGSSQSTQMADEEEEEEETDNEEEEEEDNGRSNTRQLDNLLVKKVLEQEPEMLPCHASASPLSPQLSSLGTPRLGPSIKVWDPYNVLSPPAQPPSIFSRIVSGDEDRAVTEVYLISHGECDLNLRTDLIGGRCHVAALTANGKRQARALAVFFKSQGVRFNSVYSSPLDRARSMAVSVCQEMSFPEEHVQSSDAIIEMSLGDWEGCNQAEIYSPETLSLIERCQPDFTAPSGESLRQVEFRMVQFLNGTVSGVAEKLRSDYSSTTNHNETHERDGGVSLPSTNWDLLHKHRPSLTRKKSGKSRLQVMTNHEPDDGNSPREEVNHNHNDLSDSSSLILNCVGVFTHSLPIKCLLTGILGCSPVMTHKICVEDSSVTVLQHSWRNGWQIKRMNDTAHLRLL

SEQ ID NO: 20664 - protein, 399 aa, Arabidopsis thaliana
  peptide (1)..(399): Ceres Seq. ID no. 14310261
  misc_feature (110)..(291): Pfam Name: Phosphoglycerate mutase family Pfam Description: Phosphoglycerate mutase family
  misc_feature (1)..(386): Homolog of NCBI NO: 25518294 NR Description: hypothetical protein F13K23.10 [imported] -
  misc_feature (1)..(399): Homolog of NCBI NO: 21554168 NR Description: putative fructose-2,6-bisphosphatase [Arabidopsis
  misc_feature (1)..(399): Homolog of NCBI NO: 18391446 NR Description: expressed protein [Arabidopsis thaliana]
  misc_feature (46)..(399): Homolog of NCBI NO: 17902572 NR Description: putative fructose-2,6-bisphosphatase [Silene
  misc_feature (1)..(399): Homolog of NCBI NO: 17902574 NR Description: putative Fructose-2,6-bisphosphatase [Silene
  misc_feature (1)..(399): Homolog of NCBI NO: 17902578 NR Description: putative fructose-2,6-bisphosphatase [Silene
  misc_feature (1)..(399): Homolog of NCBI NO: 17902576 NR Description: putative fructose-2,6-bisphosphatase [Silene
  misc_feature (51)..(399): Homolog of NCBI NO: 21386798 NR Description: X4 protein [Silene dioica]
  misc_feature (1)..(398): Homolog of NCBI NO: 15231617 NR Description: expressed protein [Arabidopsis thaliana]
  misc_feature (1)..(399): Homolog of NCBI NO: 9279667 NR Description: gene_id:MDJ14.7~similar to unknown
MGSSQSTQMADEEEEEEETDNEEEEEEDNGRSNTRQLDNLLVKKVLEQEPEMLPCHASASPLSPQLSSLGTPRLGPSIKVWDPYNVLSPPAQPPSIFSRIVSGDEDRAVTEVYLISHGECDLNLRTDLIGGRCHVAALTANGKRQARALAVFFKSQGVRFNSVYSSPLDRARSMAVSVCQEMSFPEEHVQSSDAIIEMSLGDWEGCNQAEIYSPETLSLIERCQPDFTAPSGESLRQVEFRMVQFLNGTVSGVAEKLRSDYSSTTNHNETHERDGGVSLPSTNWDLLHKHRPSLTRKKSGKSRLQVMTNHEPDDGNSPREEVNHNHNDLSDSSSLILNCVGVFTHSLPIKCLLTGILGCSPVMTHKICVEDSSVTVLQHSWRNGWQIKRMNDTAHLRLL

SEQ ID NO: 20665 - protein, 391 aa, Arabidopsis thaliana
  peptide (1)..(391): Ceres Seq. ID no. 14310262
  misc_feature (102)..(283): Pfam Name: Phosphoglycerate mutase family Pfam Description: Phosphoglycerate mutase family
  misc_feature (43)..(391): Homolog of NCBI NO: 21386798 NR Description: X4 protein [Silene dioica]
  misc_feature (38)..(391): Homolog of NCBI NO: 17902572 NR Description: putative fructose-2,6-bisphosphatase [Silene
  misc_feature (1)..(391): Homolog of NCBI NO: 17902576 NR Description: putative fructose-2,6-bisphosphatase [Silene
  misc_feature (1)..(391): Homolog of NCBI NO: 17902574 NR Description: putative Fructose-2,6-bisphosphatase [Silene
  misc_feature (1)..(391): Homolog of NCBI NO: 17902578 NR Description: putative fructose-2,6-bisphosphatase [Silene
  misc_feature (1)..(378): Homolog of NCBI NO: 25518294 NR Description: hypothetical protein F13K23.10 [imported] -
  misc_feature (1)..(391): Homolog of NCBI NO: 21554168 NR Description: putative fructose-2,6-bisphosphatase [Arabidopsis
  misc_feature (1)..(391): Homolog of NCBI NO: 18391446 NR Description: expressed protein [Arabidopsis thaliana]
  misc_feature (1)..(390): Homolog of NCBI NO: 15231617 NR Description: expressed protein [Arabidopsis thaliana]
  misc_feature (1)..(391): Homolog of NCBI NO: 9279667 NR Description: gene_id:MDJ14.7~similar to unknown
MADEEEEEEETDNEEEEEEDNGRSNTRQLDNLLVKKVLEQEPEMLPCHASASPLSPQLSSLGTPRLGPSIKVWDPYNVLSPPAQPPSIFSRIVSGDEDRAVTEVYLISHGECDLNLRTDLIGGRCHVAALTANGKRQARALAVFFKSQGVRFNSVYSSPLDRARSMAVSVCQEMSFPEEHVQSSDAIIEMSLGDWEGCNQAEIYSPETLSLIERCQPDFTAPSGESLRQVEFRMVQFLNGTVSGVAEKLRSDYSSTTNHNETHERDGGVSLPSTNWDLLHKHRPSLTRKKSGKSRLQVMTNHEPDDGNSPREEVNHNHNDLSDSSSLILNCVGVFTHSLPIKCLLTGILGCSPVMTHKICVEDSSVTVLQHSWRNGWQIKRMNDTAHLRLL

SEQ ID NO: 20666 - DNA, 802 bp, Arabidopsis thaliana
  misc_feature (1)..(802): Ceres Seq. ID no. 14310243
  misc_feature: MA Experiment ID: 20000180 Result: Up-regulated in Transcription
  misc_feature: MA Experiment 20000180 PARAMETER Experiment Name: At_Germinating_Seeds_P Parameter: Age (hr) Value: 24 vs. 0
  misc_feature: MA Experiment 20000180 PARAMETER Experiment Name: At_Germinating_Seeds_P Parameter: Tissue Value: Germinating Seeds
  misc_feature: MA Experiment ID: 20000185 Result: Down-regulated in Transcription
  misc_feature: MA Experiment 20000185 PARAMETER Experiment Name: At_Roots__P Parameter: Age (day) Value: 7 vs. 21
  misc_feature: MA Experiment 20000185 PARAMETER Experiment Name: At_Roots__P Parameter: Organism Value: A. thaliana
  misc_feature: MA Experiment 20000185 PARAMETER Experiment Name: At_Roots__P Parameter: Tissue Value: Roots vs. Whole Plant
  misc_feature: MA Experiment ID: 20000265 Result: Up-regulated in Transcription
  misc_feature: MA Experiment 20000265 PARAMETER Experiment Name: At_Open_Flower_P Parameter: Age (day) Value: 21
  misc_feature: MA Experiment 20000265 PARAMETER Experiment Name: At_Open_Flower_P Parameter: Plant Line Value: WS
  misc_feature: MA Experiment 20000265 PARAMETER Experiment Name: At_Open_Flower_P Parameter: Tissue Value: Closed Flower vs. Whole Plant
  misc_feature: MA Experiment ID: 20000288 Result: Up-regulated in Transcription
  misc_feature: MA Experiment 20000288 PARAMETER Experiment Name: At_Drought_P Parameter: Age (day) Value: 7
  misc_feature: MA Experiment 20000288 PARAMETER Experiment Name: At_Drought_P Parameter: Organism Value: A. thaliana
  misc_feature: MA Experiment 20000288 PARAMETER Experiment Name: At_Drought_P Parameter: Plant Line Value: WS
  misc_feature: MA Experiment 20000288 PARAMETER Experiment Name: At_Drought_P Parameter: Timepoint (hr) Value: 1
  misc_feature: MA Experiment 20000288 PARAMETER Experiment Name: At_Drought_P Parameter: Tissue Value: Whole Plant
  misc_feature: MA Experiment 20000288 PARAMETER Experiment Name: At_Drought_P Parameter: Treatment Value: Drought vs. No Drought
  misc_feature: MA Experiment ID: 20000439 Result: Down-regulated in Transcription
  misc_feature: MA Experiment 20000439 PARAMETER Experiment Name: At_Roots__P Parameter: Age (day) Value: 14 vs. 21
  misc_feature: MA Experiment 20000439 PARAMETER Experiment Name: At_Roots__P Parameter: Organism Value: A. thaliana
  misc_feature: MA Experiment 20000439 PARAMETER Experiment Name: At_Roots__P Parameter: Tissue Value: Roots vs. Whole Plant
gatctgatcattcgttttctaacaccaaggcgaactgagagagattcgttaagcacaaaagagagaaaaaagatctaatgttttatccacatgatggaacactctgttctaaaaagagggatcatatgaaagtttttggagaatcgtttcatggttctttcaaaaggagcaaacaaggagatcaaaaacaaaccaaacttgagaagaacactactactctgttctttcaaagatcaaagtcagatagcgccatgttgataaagcctgatgttcagcttcacctagaggctaagacccaatcagagacatttgaagatcataggacagacctggaccttaatttgaacctttattcgtcatcaagttcctctgtgaaaaaaacaatcatggagaaagatgaatgctcaaaaggcggaactgtgatcatgagcccaagtaagaaggtgagttcaggtgatatagggttaagtcgatccccgtcttggctagcgtttgaaggtgatgatgatgatgataatcagaagaagcaagagatgataactacagtgtgcatgaagtgtcatatgctggttatgctctgcaaatcaactcttgtgtgtcctaactgcaaattcatgcaccatgatgatcatagctccacaaaacagtttaagactttaaatttgtttaagctcttatgctagacttttcagtgtatgttaatgagcccaagaatgtgaaactagatatgtatgagttatgtatatatacaagtactgattgttttattatatgctttgtatatgaataactttgatctgcg

SEQ ID NO: 20667 - protein, 201 aa, Arabidopsis thaliana
  peptide (1)..(201): Ceres Seq. ID no. 14310244
  misc_feature (6)..(121): Homolog of NCBI NO: 30699311 NR Description: expressed protein [Arabidopsis thaliana]
  misc_feature (31)..(187): Homolog of NCBI NO: 15236641 NR Description: hypothetical protein [Arabidopsis thaliana]
  misc_feature (78)..(201): Homolog of NCBI NO: 30699311 NR Description: expressed protein [Arabidopsis thaliana]
  misc_feature (6)..(201): Homolog of NCBI NO: 25372722 NR Description: unknown protein T11I11.11 [imported] -
  misc_feature (1)..(201): Homolog of NCBI NO: 30687784 NR Description: expressed protein [Arabidopsis thaliana]
MFYPHDGTLCSKKRDHMKVFGESFHGSFKRSKQGDQKQTKLEKNTTTLFFQRSKSDSAMLIKPDVQLHLEAKTQSETFEDHRTDLDLNLNLYSSSSSSVKKTIMEKDECSKGGTVIMSPSKKVSSGDIGLSRSPSWLAFEGDDDDDNQKKQEMITTVCMKCHMLVMLCKSTLVCPNCKFMHHDDHSSTKQFKTLNLFKLLC

SEQ ID NO: 20668 - protein, 185 aa, Arabidopsis thaliana
  peptide (1)..(185): Ceres Seq. ID no. 14310245
  misc_feature (1)..(105): Homolog of NCBI NO: 30699311 NR Description: expressed protein [Arabidopsis thaliana]
  misc_feature (15)..(171): Homolog of NCBI NO: 15236641 NR Description: hypothetical protein [Arabidopsis thaliana]
  misc_feature (62)..(185): Homolog of NCBI NO: 30699311 NR Description: expressed protein [Arabidopsis thaliana]
  misc_feature (1)..(185): Homolog of NCBI NO: 25372722 NR Description: unknown protein T11I11.11 [imported] -
  misc_feature (1)..(185): Homolog of NCBI NO: 30687784 NR Description: expressed protein [Arabidopsis thaliana]
MKVFGESFHGSFKRSKQGDQKQTKLEKNTTTLFFQRSKSDSAMLIKPDVQLHLEAKTQSETFEDHRTDLDLNLNLYSSSSSSVKKTIMEKDECSKGGTVIMSPSKKVSSGDIGLSRSPSWLAFEGDDDDDNQKKQEMITTVCMKCHMLVMLCKSTLVCPNCKFMHHDDHSSTKQFKTLNLFKLLC

SEQ ID NO: 20669 - protein, 143 aa, Arabidopsis thaliana
  peptide (1)..(143): Ceres Seq. ID no. 14310246
  misc_feature (1)..(63): Homolog of NCBI NO: 30699311 NR Description: expressed protein [Arabidopsis thaliana]
  misc_feature (1)..(129): Homolog of NCBI NO: 15236641 NR Description: hypothetical protein [Arabidopsis thaliana]
  misc_feature (20)..(143): Homolog of NCBI NO: 30699311 NR Description: expressed protein [Arabidopsis thaliana]
  misc_feature (1)..(143): Homolog of NCBI NO: 25372722 NR Description: unknown protein T11I11.11 [imported] -
  misc_feature (1)..(143): Homolog of NCBI NO: 30687784 NR Description: expressed protein [Arabidopsis thaliana]
MLIKPDVQLHLEAKTQSETFEDHRTDLDLNLNLYSSSSSSVKKTIMEKDECSKGGTVIMSPSKKVSSGDIGLSRSPSWLAFEGDDDDDNQKKQEMITTVCMKCHMLVMLCKSTLVCPNCKFMHHDDHSSTKQFKTLNLFKLLC

SEQ ID NO: 20670 - DNA, 1100 bp, Arabidopsis thaliana
  misc_feature (1)..(1100): Ceres Seq. ID no. 14310350
  misc_feature: MA Experiment ID: 20000166 Result: Down-regulated in Transcription
  misc_feature: MA Experiment 20000166 PARAMETER Experiment Name: At_100uM_ABA_P Parameter: Age (day) Value: 14
  misc_feature: MA Experiment 20000166 PARAMETER Experiment Name: At_100uM_ABA_P Parameter: Organism Value: A. thaliana
  misc_feature: MA Experiment 20000166 PARAMETER Experiment Name: At_100uM_ABA_P Parameter: Plant Line Value: WS
  misc_feature: MA Experiment 20000166 PARAMETER Experiment Name: At_100uM_ABA_P Parameter: Timepoint (hr) Value: 1
  misc_feature: MA Experiment 20000166 PARAMETER Experiment Name: At_100uM_ABA_P Parameter: Tissue Value: Aerial
  misc_feature: MA Experiment 20000166 PARAMETER Experiment Name: At_100uM_ABA_P Parameter: Treatment Value: 100uM ABA vs. No Treatment
  misc_feature: MA Experiment ID: 20000227 Result: Down-regulated in Transcription
  misc_feature: MA Experiment 20000227 PARAMETER Experiment Name: At_Root-Tips-vs-Tops_P Parameter: Tissue Value: Root Tips vs. Root Tops
  misc_feature: MA Experiment ID: 20000234 Result: Down-regulated in Transcription
  misc_feature: MA Experiment 20000234 PARAMETER Experiment Name: At_Siliques_P Parameter: Age (day) Value: 21
  misc_feature: MA Experiment 20000234 PARAMETER Experiment Name: At_Siliques_P Parameter: Organism Value: A. thaliana
  misc_feature: MA Experiment 20000234 PARAMETER Experiment Name: At_Siliques_P Parameter: Plant Line Value: WS
  misc_feature: MA Experiment 20000234 PARAMETER Experiment Name: At_Siliques_P Parameter: Tissue Value: Less Than 5mm Siliques vs. Whole Plant
  misc_feature: MA Experiment ID: 20000264 Result: Down-regulated in Transcription
  misc_feature: MA Experiment 20000264 PARAMETER Experiment Name: At_Open_Flower_P Parameter: Age (day) Value: 21
  misc_feature: MA Experiment 20000264 PARAMETER Experiment Name: At_Open_Flower_P Parameter: Plant Line Value: WS
  misc_feature: MA Experiment 20000264 PARAMETER Experiment Name: At_Open_Flower_P Parameter: Tissue Value: Open Flower vs. Whole Plant
  misc_feature: MA Experiment ID: 20000265 Result: Down-regulated in Transcription
  misc_feature: MA Experiment 20000265 PARAMETER Experiment Name: At_Open_Flower_P Parameter: Age (day) Value: 21
  misc_feature: MA Experiment 20000265 PARAMETER Experiment Name: At_Open_Flower_P Parameter: Plant Line Value: WS
  misc_feature: MA Experiment 20000265 PARAMETER Experiment Name: At_Open_Flower_P Parameter: Tissue Value: Closed Flower vs. Whole Plant
  misc_feature: MA Experiment ID: 20000267 Result: Down-regulated in Transcription
  misc_feature: MA Experiment 20000267 PARAMETER Experiment Name: At_Drought_P Parameter: Age (day) Value: 7
  misc_feature: MA Experiment 20000267 PARAMETER Experiment Name: At_Drought_P Parameter: Organism Value: A. thaliana
  misc_feature: MA Experiment 20000267 PARAMETER Experiment Name: At_Drought_P Parameter: Plant Line Value: WS
  misc_feature: MA Experiment 20000267 PARAMETER Experiment Name: At_Drought_P Parameter: Timepoint (hr) Value: 6
  misc_feature: MA Experiment 20000267 PARAMETER Experiment Name: At_Drought_P Parameter: Tissue Value: Whole Plant
  misc_feature: MA Experiment 20000267 PARAMETER Experiment Name: At_Drought_P Parameter: Treatment Value: Drought vs. No Drought
  misc_feature: MA Experiment ID: 20000268 Result: Down-regulated in Transcription
  misc_feature: MA Experiment 20000268 PARAMETER Experiment Name: At_100mM_NaCl__P Parameter: Age (day) Value: 14
  misc_feature: MA Experiment 20000268 PARAMETER Experiment Name: At_100mM_NaCl__P Parameter: Organism Value: A. thaliana
  misc_feature: MA Experiment 20000268 PARAMETER Experiment Name: At_100mM_NaCl__P Parameter: Plant Line Value: WS
  misc_feature: MA Experiment 20000268 PARAMETER Experiment Name: At_100mM_NaCl__P Parameter: Timepoint (hr) Value: 6
  misc_feature: MA Experiment 20000268 PARAMETER Experiment Name: At_100mM_NaCl__P Parameter: Tissue Value: Whole Plant
  misc_feature: MA Experiment 20000268 PARAMETER Experiment Name: At_100mM_NaCl__P Parameter: Treatment Value: 100mM NaCl vs. No Treatment
  misc_feature: MA Experiment ID: 20000308 Result: Down-regulated in Transcription
  misc_feature: MA Experiment 20000308 PARAMETER Experiment Name: At_100mM_NaCl__P Parameter: Age (day) Value: 17
  misc_feature: MA Experiment 20000308 PARAMETER Experiment Name: At_100mM_NaCl__P Parameter: Organism Value: A. thaliana
  misc_feature: MA Experiment 20000308 PARAMETER Experiment Name: At_100mM_NaCl__P Parameter: Plant Line Value: WS
  misc_feature: MA Experiment 20000308 PARAMETER Experiment Name: At_100mM_NaCl__P Parameter: Timepoint (hr) Value: 72
  misc_feature: MA Experiment 20000308 PARAMETER Experiment Name: At_100mM_NaCl__P Parameter: Tissue Value: Whole Plant
  misc_feature: MA Experiment 20000308 PARAMETER Experiment Name: At_100mM_NaCl__P Parameter: Treatment Value: 100mM NaCl vs. No Treatment
  misc_feature: MA Experiment ID: 20000436 Result: Down-regulated in Transcription
  misc_feature: MA Experiment 20000436 PARAMETER Experiment Name: At_Drought_P Parameter: Age (day) Value: 7
  misc_feature: MA Experiment 20000436 PARAMETER Experiment Name: At_Drought_P Parameter: Organism Value: A. thaliana
  misc_feature: MA Experiment 20000436 PARAMETER Experiment Name: At_Drought_P Parameter: Plant Line Value: WS
  misc_feature: MA Experiment 20000436 PARAMETER Experiment Name: At_Drought_P Parameter: Timepoint (hr) Value: 12
  misc_feature: MA Experiment 20000436 PARAMETER Experiment Name: At_Drought_P Parameter: Tissue Value: Whole Plant
  misc_feature: MA Experiment 20000436 PARAMETER Experiment Name: At_Drought_P Parameter: Treatment Value: Drought vs. No Drought
  misc_feature: MA Experiment ID: 20000437 Result: Down-regulated in Transcription
  misc_feature: MA Experiment 20000437 PARAMETER Experiment Name: At_Drought_P Parameter: Age (day) Value: 8
  misc_feature: MA Experiment 20000437 PARAMETER Experiment Name: At_Drought_P Parameter: Organism Value: A. thaliana
  misc_feature: MA Experiment 20000437 PARAMETER Experiment Name: At_Drought_P Parameter: Plant Line Value: WS
  misc_feature: MA Experiment 20000437 PARAMETER Experiment Name: At_Drought_P Parameter: Timepoint (hr) Value: 24
  misc_feature: MA Experiment 20000437 PARAMETER Experiment Name: At_Drought_P Parameter: Tissue Value: Whole Plant
  misc_feature: MA Experiment 20000437 PARAMETER Experiment Name: At_Drought_P Parameter: Treatment Value: Drought vs. No Drought
  misc_feature: MA Experiment ID: 20000439 Result: Down-regulated in Transcription
  misc_feature: MA Experiment 20000439 PARAMETER Experiment Name: At_Roots__P Parameter: Age (day) Value: 14 vs. 21
  misc_feature: MA Experiment 20000439 PARAMETER Experiment Name: At_Roots__P Parameter: Organism Value: A. thaliana
  misc_feature: MA Experiment 20000439 PARAMETER Experiment Name: At_Roots__P Parameter: Tissue Value: Roots vs. Whole Plant
  misc_feature: MA Experiment ID: 20000453 Result: Down-regulated in Transcription
  misc_feature: MA Experiment 20000453 PARAMETER Experiment Name: At_100uM_ABA_P Parameter: Age (day) Value: 15
  misc_feature: MA Experiment 20000453 PARAMETER Experiment Name: At_100uM_ABA_P Parameter: Organism Value: A. thaliana
  misc_feature: MA Experiment 20000453 PARAMETER Experiment Name: At_100uM_ABA_P Parameter: Plant Line Value: WS
  misc_feature: MA Experiment 20000453 PARAMETER Experiment Name: At_100uM_ABA_P Parameter: Timepoint (hr) Value: 24
  misc_feature: MA Experiment 20000453 PARAMETER Experiment Name: At_100uM_ABA_P Parameter: Tissue Value: Aerial
  misc_feature: MA Experiment 20000453 PARAMETER Experiment Name: At_100uM_ABA_P Parameter: Treatment Value: 100uM ABA vs. No Treatment
  misc_feature: MA Experiment ID: 20000455 Result: Down-regulated in Transcription
  misc_feature: MA Experiment 20000455 PARAMETER Experiment Name: At_100uM_ABA_P Parameter: Age (day) Value: 16
  misc_feature: MA Experiment 20000455 PARAMETER Experiment Name: At_100uM_ABA_P Parameter: Organism Value: A. thaliana
  misc_feature: MA Experiment 20000455 PARAMETER Experiment Name: At_100uM_ABA_P Parameter: Plant Line Value: WS
  misc_feature: MA Experiment 20000455 PARAMETER Experiment Name: At_100uM_ABA_P Parameter: Timepoint (hr) Value: 48
  misc_feature: MA Experiment 20000455 PARAMETER Experiment Name: At_100uM_ABA_P Parameter: Tissue Value: Aerial
  misc_feature: MA Experiment 20000455 PARAMETER Experiment Name: At_100uM_ABA_P Parameter: Treatment Value: 100uM ABA vs. No Treatment
  misc_feature: MA Experiment ID: 20001450 Result: Up-regulated in Transcription
  misc_feature: MA Experiment 20001450 PARAMETER Experiment Name: At_Far-red-induction_P Parameter: Age (day) Value: 7
  misc_feature: MA Experiment 20001450 PARAMETER Experiment Name: At_Far-red-induction_P Parameter: Light Value: Far-red vs. White
  misc_feature: MA Experiment 20001450 PARAMETER Experiment Name: At_Far-red-induction_P Parameter: Organism Value: A. thaliana
  misc_feature: MA Experiment 20001450 PARAMETER Experiment Name: At_Far-red-induction_P Parameter: Plant Line Value: Columbia
  misc_feature: MA Experiment 20001450 PARAMETER Experiment Name: At_Far-red-induction_P Parameter: Timepoint (hr) Value: 8
  misc_feature: MA Experiment 20001450 PARAMETER Experiment Name: At_Far-red-induction_P Parameter: Tissue Value: Whole Plant
  misc_feature: MA Experiment ID: 20001451 Result: Up-regulated in Transcription
  misc_feature: MA Experiment 20001451 PARAMETER Experiment Name: At_Far-red-induction_P Parameter: Age (day) Value: 7
  misc_feature: MA Experiment 20001451 PARAMETER Experiment Name: At_Far-red-induction_P Parameter: Light Value: Far-red vs. White
  misc_feature: MA Experiment 20001451 PARAMETER Experiment Name: At_Far-red-induction_P Parameter: Organism Value: A. thaliana
  misc_feature: MA Experiment 20001451 PARAMETER Experiment Name: At_Far-red-induction_P Parameter: Plant Line Value: Columbia
  misc_feature: MA Experiment 20001451 PARAMETER Experiment Name: At_Far-red-induction_P Parameter: Timepoint (hr) Value: 24
  misc_feature: MA Experiment 20001451 PARAMETER Experiment Name: At_Far-red-induction_P Parameter: Tissue Value: Whole Plant
  misc_feature: MA Experiment ID: 20001554 Result: Down-regulated in Transcription
  misc_feature: MA Experiment 20001554 PARAMETER Experiment Name: At_Drought_Soil_Dry_P Parameter: Age (day) Value: 21
  misc_feature: MA Experiment 20001554 PARAMETER Experiment Name: At_Drought_Soil_Dry_P Parameter: Organism Value: A. thaliana
  misc_feature: MA Experiment 20001554 PARAMETER Experiment Name: At_Drought_Soil_Dry_P Parameter: Plant Line Value: WS
  misc_feature: MA Experiment 20001554 PARAMETER Experiment Name: At_Drought_Soil_Dry_P Parameter: Post Timepoint (hr) Value: None
  misc_feature: MA Experiment 20001554 PARAMETER Experiment Name: At_Drought_Soil_Dry_P Parameter: Post-Treatment Value: None
  misc_feature: MA Experiment 20001554 PARAMETER Experiment Name: At_Drought_Soil_Dry_P Parameter: Timepoint (day) Value: 7
  misc_feature: MA Experiment 20001554 PARAMETER Experiment Name: At_Drought_Soil_Dry_P Parameter: Treatment Value: Drought vs. No Drought
  misc_feature: MA Experiment ID: 20001555 Result: Down-regulated in Transcription
  misc_feature: MA Experiment 20001555 PARAMETER Experiment Name: At_Drought_Soil_Dry_P Parameter: Age (day) Value: 24
  misc_feature: MA Experiment 20001555 PARAMETER Experiment Name: At_Drought_Soil_Dry_P Parameter: Organism Value: A. thaliana
  misc_feature: MA Experiment 20001555 PARAMETER Experiment Name: At_Drought_Soil_Dry_P Parameter: Plant Line Value: WS
  misc_feature: MA Experiment 20001555 PARAMETER Experiment Name: At_Drought_Soil_Dry_P Parameter: Post Timepoint (hr) Value: None
  misc_feature: MA Experiment 20001555 PARAMETER Experiment Name: At_Drought_Soil_Dry_P Parameter: Post-Treatment Value: None
  misc_feature: MA Experiment 20001555 PARAMETER Experiment Name: At_Drought_Soil_Dry_P Parameter: Timepoint (day) Value: 10
  misc_feature: MA Experiment 20001555 PARAMETER Experiment Name: At_Drought_Soil_Dry_P Parameter: Treatment Value: Drought vs. No Drought
  misc_feature: MA Experiment ID: 20001556 Result: Down-regulated in Transcription
  misc_feature: MA Experiment 20001556 PARAMETER Experiment Name: At_Drought_Soil_Dry_P Parameter: Age (day) Value: 26
  misc_feature: MA Experiment 20001556 PARAMETER Experiment Name: At_Drought_Soil_Dry_P Parameter: Organism Value: A. thaliana
  misc_feature: MA Experiment 20001556 PARAMETER Experiment Name: At_Drought_Soil_Dry_P Parameter: Plant Line Value: WS
  misc_feature: MA Experiment 20001556 PARAMETER Experiment Name: At_Drought_Soil_Dry_P Parameter: Post Timepoint (hr) Value: None
  misc_feature: MA Experiment 20001556 PARAMETER Experiment Name: At_Drought_Soil_Dry_P Parameter: Post-Treatment Value: None
  misc_feature: MA Experiment 20001556 PARAMETER Experiment Name: At_Drought_Soil_Dry_P Parameter: Timepoint (day) Value: 12
  misc_feature: MA Experiment 20001556 PARAMETER Experiment Name: At_Drought_Soil_Dry_P Parameter: Treatment Value: Drought vs. No Drought
  misc_feature: MA Experiment ID: 20001757 Result: Up-regulated in Transcription
  misc_feature: MA Experiment 20001757 PARAMETER Experiment Name: At_50mM_NH4NO3_L-to-H_P Parameter: Timepoint (hr) Value: 6
  misc_feature: MA Experiment 20001757 PARAMETER Experiment Name: At_50mM_NH4NO3_L-to-H_P Parameter: Tissue Value: Leaf
  misc_feature: MA Experiment 20001757 PARAMETER Experiment Name: At_50mM_NH4NO3_L-to-H_P Parameter: Treatment Value: 50mM NH4NO3 vs 100mM Mannitol
  misc_feature: MA Experiment ID: 20001904 Result: Down-regulated in Transcription
  misc_feature: MA Experiment 20001904 PARAMETER Experiment Name: At_Drought_Reproduction_P Parameter: Age (day) Value: 37
  misc_feature: MA Experiment 20001904 PARAMETER Experiment Name: At_Drought_Reproduction_P Parameter: Organism Value: A. thaliana
  misc_feature: MA Experiment 20001904 PARAMETER Experiment Name: At_Drought_Reproduction_P Parameter: Plant Line Value: WS
  misc_feature: MA Experiment 20001904 PARAMETER Experiment Name: At_Drought_Reproduction_P Parameter: Timepoint (day) Value: 7
  misc_feature: MA Experiment 20001904 PARAMETER Experiment Name: At_Drought_Reproduction_P Parameter: Tissue Value: Rosettes
  misc_feature: MA Experiment 20001904 PARAMETER Experiment Name: At_Drought_Reproduction_P Parameter: Treatment Value: Drought vs. No Drought
  misc_feature: MA Experiment ID: 20001906 Result: Down-regulated in Transcription
  misc_feature: MA Experiment 20001906 PARAMETER Experiment Name: At_Drought_Reproduction_P Parameter: Age (day) Value: 35
  misc_feature: MA Experiment 20001906 PARAMETER Experiment Name: At_Drought_Reproduction_P Parameter: Organism Value: A. thaliana
  misc_feature: MA Experiment 20001906 PARAMETER Experiment Name: At_Drought_Reproduction_P Parameter: Plant Line Value: WS
  misc_feature: MA Experiment 20001906 PARAMETER Experiment Name: At_Drought_Reproduction_P Parameter: Timepoint (day) Value: 5
  misc_feature: MA Experiment 20001906 PARAMETER Experiment Name: At_Drought_Reproduction_P Parameter: Tissue Value: Siliques
  misc_feature: MA Experiment 20001906 PARAMETER Experiment Name: At_Drought_Reproduction_P Parameter: Treatment Value: Drought vs. No Drought
tggtgccgattcggcacgaggagctcactagtccccccccccccccgatggaaaaagttttctccgacgaaaaaatctccggtaaccatcactggtcgtttaatggaacgacgtcgttgaatcgtagtgcatccgaatgggcattcaatcgcttcatacaagaatcctccgccgctgcagacgacggagaatctgcgacggcgtgtggtgtttccgtctcttctcctcctaatgttcctgtagattcagaggaatacagagcatttctcaagagtaaacttaatcttgcttgtgctgctgtcgccatgaaaaggggaactttcatcaaacctcaggatacttctggtagatctgacaatggtggagccaatgcatcagaacaaggctctcttgcttcttccaaagctacaccaatgatgagcagtgctataacaagtggttctgagctctctggtgatgaagaagaagctgatggtgaaactaatatgaaccctactaatgttaaacgcgtgaaaaggatgctctctaatagagaatcagctagacgatccagaagaagaaagcaagcacacttgagtgagctagagacacaagtttcgcagcttcgtgtagagaattcaaaactcatgaagggtctcactgatgtaactcaaacattcaatgatgcatctgtagaaaacagagttttaaaagccaatattgagacactacgagcaaaggtgaaaatggctgaagagacagtgaagagactcactggctttaacccaatgttccacactatgcctcagattgtttcaactgtctctcttccttcagagacatcaaattctctagacactacaagcagccaagtgactacaccagagatcatcagctcggggaacaaaagcaaggccttgatagggtgcaagatgaacagaacagcttcgatgcgtagagttgagagcttggaacatctgcagaaacgtattcgaagcgttggggatcagtagctgttaaagaagaatcttgatttgtaacattatcaagagagttattcgacaaatgttgtatgttttgtaaagaattgttttcagattattttaaactttttttttgtc

SEQ ID NO: 20671 - protein, 329 aa, Arabidopsis thaliana
  peptide (1)..(329): Ceres Seq. ID no. 14310351
  misc_feature (164)..(228): Pfam Name: bZIP transcription factor Pfam Description: bZIP transcription factor
  misc_feature (137)..(301): Homolog of NCBI NO: 542188 NR Description: OHP2 protein - maize
  misc_feature (73)..(329): Homolog of NCBI NO: 30694089 NR Description: bZIP transcription factor-related protein
  misc_feature (112)..(281): Homolog of NCBI NO: 2842757 NR Description: Light-inducible protein CPRF-2
  misc_feature (112)..(281): Homolog of NCBI NO: 100163 NR Description: light-induced protein CPRF-2 - parsley
  misc_feature (39)..(79): Homolog of NCBI NO: 16797791 NR Description: bZIP transcription factor [Nicotiana tabacum]
  misc_feature (129)..(287): Homolog of NCBI NO: 16797791 NR Description: bZIP transcription factor [Nicotiana tabacum]
  misc_feature (16)..(206): Homolog of NCBI NO: 10954099 NR Description: bZIP protein BZO2H3 [Arabidopsis thaliana]
  misc_feature (16)..(329): Homolog of NCBI NO: 30691973 NR Description: bZIP family transcription factor [Arabidopsis
  misc_feature (16)..(329): Homolog of NCBI NO: 7682779 NR Description: Hypothetical protein T32B20.c [Arabidopsis
  misc_feature (16)..(329): Homolog of NCBI NO: 30691978 NR Description: bZIP family transcription factor [Arabidopsis
VPIRHEELTSPPPPPMEKVFSDEKISGNHHWSFNGTTSLNRSASEWAFNRFIQESSAAADDGESATACGVSVSSPPNVPVDSEEYRAFLKSKLNLACAAVAMKRGTFIKPQDTSGRSDNGGANASEQGSLASSKATPMMSSAITSGSELSGDEEEADGETNMNPTNVKRVKRMLSNRESARRSRRRKQAHLSELETQVSQLRVENSKLMKGLTDVTQTFNDASVENRVLKANIETLRAKVKMAEETVKRLTGFNPMFHTMPQIVSTVSLPSETSNSLDTTSSQVTTPEIISSGNKSKALIGCKMNRTASMRRVESLEHLQKRIRSVGDQ

SEQ ID NO: 20672 - protein, 314 aa, Arabidopsis thaliana
  peptide (1)..(314): Ceres Seq. ID no. 14310352
  misc_feature (149)..(213): Pfam Name: bZIP transcription factor Pfam Description: bZIP transcription factor
  misc_feature (122)..(286): Homolog of NCBI NO: 542188 NR Description: OHP2 protein - maize
  misc_feature (58)..(314): Homolog of NCBI NO: 30694089 NR Description: bZIP transcription factor-related protein
  misc_feature (97)..(266): Homolog of NCBI NO: 2842757 NR Description: Light-inducible protein CPRF-2
  misc_feature (97)..(266): Homolog of NCBI NO: 100163 NR Description: light-induced protein CPRF-2 - parsley
  misc_feature (24)..(64): Homolog of NCBI NO: 16797791 NR Description: bZIP transcription factor [Nicotiana tabacum]
  misc_feature (114)..(272): Homolog of NCBI NO: 16797791 NR Description: bZIP transcription factor [Nicotiana tabacum]
  misc_feature (1)..(191): Homolog of NCBI NO: 10954099 NR Description: bZIP protein BZO2H3 [Arabidopsis thaliana]
  misc_feature (1)..(314): Homolog of NCBI NO: 30691973 NR Description: bZIP family transcription factor [Arabidopsis
  misc_feature (1)..(314): Homolog of NCBI NO: 7682779 NR Description: Hypothetical protein T32B20.c [Arabidopsis
  misc_feature (1)..(314): Homolog of NCBI NO: 30691978 NR Description: bZIP family transcription factor [Arabidopsis
MEKVFSDEKISGNHHWSFNGTTSLNRSASEWAFNRFIQESSAAADDGESATACGVSVSSPPNVPVDSEEYRAFLKSKLNLACAAVAMKRGTFIKPQDTSGRSDNGGANASEQGSLASSKATPMMSSAITSGSELSGDEEEADGETNMNPTNVKRVKRMLSNRESARRSRRRKQAHLSELETQVSQLRVENSKLMKGLTDVTQTFNDASVENRVLKANIETLRAKVKMAEETVKRLTGFNPMFHTMPQIVSTVSLPSETSNSLDTTSSQVTTPEIISSGNKSKALIGCKMNRTASMRRVESLEHLQKRIRSVGDQ

SEQ ID NO: 20673 - protein, 228 aa, Arabidopsis thaliana
  peptide (1)..(228): Ceres Seq. ID no. 14310353
  misc_feature (63)..(127): Pfam Name: bZIP transcription factor Pfam Description: bZIP transcription factor
  misc_feature (1)..(13): Homolog of NCBI NO: 542188 NR Description: OHP2 protein - maize
  misc_feature (36)..(200): Homolog of NCBI NO: 542188 NR Description: OHP2 protein - maize
  misc_feature (1)..(228): Homolog of NCBI NO: 30694089 NR Description: bZIP transcription factor-related protein
  misc_feature (11)..(180): Homolog of NCBI NO: 2842757 NR Description: Light-inducible protein CPRF-2
  misc_feature (11)..(180): Homolog of NCBI NO: 100163 NR Description: light-induced protein CPRF-2 - parsley
  misc_feature (28)..(186): Homolog of NCBI NO: 16797791 NR Description: bZIP transcription factor [Nicotiana tabacum]
  misc_feature (1)..(105): Homolog of NCBI NO: 10954099 NR Description: bZIP protein BZO2H3 [Arabidopsis thaliana]
  misc_feature (1)..(228): Homolog of NCBI NO: 30691973 NR Description: bZIP family transcription factor [Arabidopsis
  misc_feature (1)..(228): Homolog of NCBI NO: 7682779 NR Description: Hypothetical protein T32B20.c [Arabidopsis
  misc_feature (1)..(228): Homolog of NCBI NO: 30691978 NR Description: bZIP family transcription factor [Arabidopsis
MKRGTFIKPQDTSGRSDNGGANASEQGSLASSKATPMMSSAITSGSELSGDEEEADGETNMNPTNVKRVKRMLSNRESARRSRRRKQAHLSELETQVSQLRVENSKLMKGLTDVTQTFNDASVENRVLKANIETLRAKVKMAEETVKRLTGFNPMFHTMPQIVSTVSLPSETSNSLDTTSSQVTTPEIISSGNKSKALIGCKMNRTASMRRVESLEHLQKRIRSVGDQ

SEQ ID NO: 20674 - DNA, 990 bp, Arabidopsis thaliana
  misc_feature (1)..(990): Ceres Seq. ID no. 14313170
  misc_feature: MA Experiment ID: 20000171 Result: Down-regulated in Transcription
  misc_feature: MA Experiment 20000171 PARAMETER Experiment Name: At_42deg_Heat_P Parameter: Age (day) Value: 14
  misc_feature: MA Experiment 20000171 PARAMETER Experiment Name: At_42deg_Heat_P Parameter: Organism Value: A. thaliana
  misc_feature: MA Experiment 20000171 PARAMETER Experiment Name: At_42deg_Heat_P Parameter: Plant Line Value: WS
  misc_feature: MA Experiment 20000171 PARAMETER Experiment Name: At_42deg_Heat_P Parameter: Temperature (deg C) Value: 42 vs. 22
  misc_feature: MA Experiment 20000171 PARAMETER Experiment Name: At_42deg_Heat_P Parameter: Timepoint (hr) Value: 1
  misc_feature: MA Experiment 20000171 PARAMETER Experiment Name: At_42deg_Heat_P Parameter: Tissue Value: Aerial
  misc_feature: MA Experiment ID: 20000173 Result: Down-regulated in Transcription
  misc_feature: MA Experiment 20000173 PARAMETER Experiment Name: At_42deg_Heat_P Parameter: Age (day) Value: 14
  misc_feature: MA Experiment 20000173 PARAMETER Experiment Name: At_42deg_Heat_P Parameter: Organism Value: A. thaliana
  misc_feature: MA Experiment 20000173 PARAMETER Experiment Name: At_42deg_Heat_P Parameter: Plant Line Value: WS
  misc_feature: MA Experiment 20000173 PARAMETER Experiment Name: At_42deg_Heat_P Parameter: Temperature (deg C) Value: 42 vs. 22
  misc_feature: MA Experiment 20000173 PARAMETER Experiment Name: At_42deg_Heat_P Parameter: Timepoint (hr) Value: 6
  misc_feature: MA Experiment 20000173 PARAMETER Experiment Name: At_42deg_Heat_P Parameter: Tissue Value: Aerial
  misc_feature: MA Experiment ID: 20000184 Result: Up-regulated in Transcription
  misc_feature: MA Experiment 20000184 PARAMETER Experiment Name: At_Shoots__P Parameter: Age (day) Value: 7
  misc_feature: MA Experiment 20000184 PARAMETER Experiment Name: At_Shoots__P Parameter: Tissue Value: Shoots vs. Whole Plant
  misc_feature: MA Experiment ID: 20000227 Result: Up-regulated in Transcription
  misc_feature: MA Experiment 20000227 PARAMETER Experiment Name: At_Root-Tips-vs-Tops_P Parameter: Tissue Value: Root Tips vs. Root Tops
  misc_feature: MA Experiment ID: 20000264 Result: Down-regulated in Transcription
  misc_feature: MA Experiment 20000264 PARAMETER Experiment Name: At_Open_Flower_P Parameter: Age (day) Value: 21
  misc_feature: MA Experiment 20000264 PARAMETER Experiment Name: At_Open_Flower_P Parameter: Plant Line Value: WS
  misc_feature: MA Experiment 20000264 PARAMETER Experiment Name: At_Open_Flower_P Parameter: Tissue Value: Open Flower vs. Whole Plant
  misc_feature: MA Experiment ID: 20000437 Result: Down-regulated in Transcription
  misc_feature: MA Experiment 20000437 PARAMETER Experiment Name: At_Drought_P Parameter: Age (day) Value: 8
  misc_feature: MA Experiment 20000437 PARAMETER Experiment Name: At_Drought_P Parameter: Organism Value: A. thaliana
  misc_feature: MA Experiment 20000437 PARAMETER Experiment Name: At_Drought_P Parameter: Plant Line Value: WS
  misc_feature: MA Experiment 20000437 PARAMETER Experiment Name: At_Drought_P Parameter: Timepoint (hr) Value: 24
  misc_feature: MA Experiment 20000437 PARAMETER Experiment Name: At_Drought_P Parameter: Tissue Value: Whole Plant
  misc_feature: MA Experiment 20000437 PARAMETER Experiment Name: At_Drought_P Parameter: Treatment Value: Drought vs. No Drought
  misc_feature: MA Experiment ID: 20000438 Result: Up-regulated in Transcription
  misc_feature: MA Experiment 20000438 PARAMETER Experiment Name: At_Shoots__P Parameter: Age (day) Value: 14
  misc_feature: MA Experiment 20000438 PARAMETER Experiment Name: At_Shoots__P Parameter: Tissue Value: Shoots vs. Whole Plant
  misc_feature: MA Experiment ID: 20000439 Result: Down-regulated in Transcription
  misc_feature: MA Experiment 20000439 PARAMETER Experiment Name: At_Roots__P Parameter: Age (day) Value: 14 vs. 21
  misc_feature: MA Experiment 20000439 PARAMETER Experiment Name: At_Roots__P Parameter: Organism Value: A. thaliana
  misc_feature: MA Experiment 20000439 PARAMETER Experiment Name: At_Roots__P Parameter: Tissue Value: Roots vs. Whole Plant
  misc_feature: MA Experiment ID: 20000794 Result: Down-regulated in Transcription
  misc_feature: MA Experiment 20000794 PARAMETER Experiment Name: At_Petals_P Parameter: Age (day) Value: 23-25 days
  misc_feature: MA Experiment 20000794 PARAMETER Experiment Name: At_Petals_P Parameter: Plant Line Value: WS
  misc_feature: MA Experiment 20000794 PARAMETER Experiment Name: At_Petals_P Parameter: Tissue Value: Petals vs. Whole plant
  misc_feature: MA Experiment ID: 20001248 Result: Up-regulated in Transcription
  misc_feature: MA Experiment 20001248 PARAMETER Experiment Name: At_Far-red-induction_P Parameter: Age (day) Value: 7
  misc_feature: MA Experiment 20001248 PARAMETER Experiment Name: At_Far-red-induction_P Parameter: Light Value: Far-red vs. White
  misc_feature: MA Experiment 20001248 PARAMETER Experiment Name: At_Far-red-induction_P Parameter: Organism Value: A. thaliana
  misc_feature: MA Experiment 20001248 PARAMETER Experiment Name: At_Far-red-induction_P Parameter: Plant Line Value: Columbia
  misc_feature: MA Experiment 20001248 PARAMETER Experiment Name: At_Far-red-induction_P Parameter: Timepoint (hr) Value: 4
  misc_feature: MA Experiment 20001248 PARAMETER Experiment Name: At_Far-red-induction_P Parameter: Tissue Value: Whole Plant
  misc_feature: MA Experiment ID: 20001450 Result: Up-regulated in Transcription
  misc_feature: MA Experiment 20001450 PARAMETER Experiment Name: At_Far-red-induction_P Parameter: Age (day) Value: 7
  misc_feature: MA Experiment 20001450 PARAMETER Experiment Name: At_Far-red-induction_P Parameter: Light Value: Far-red vs. White
  misc_feature: MA Experiment 20001450 PARAMETER Experiment Name: At_Far-red-induction_P Parameter: Organism Value: A. thaliana
  misc_feature: MA Experiment 20001450 PARAMETER Experiment Name: At_Far-red-induction_P Parameter: Plant Line Value: Columbia
  misc_feature: MA Experiment 20001450 PARAMETER Experiment Name: At_Far-red-induction_P Parameter: Timepoint (hr) Value: 8
  misc_feature: MA Experiment 20001450 PARAMETER Experiment Name: At_Far-red-induction_P Parameter: Tissue Value: Whole Plant
  misc_feature: MA Experiment ID: 20001451 Result: Up-regulated in Transcription
  misc_feature: MA Experiment 20001451 PARAMETER Experiment Name: At_Far-red-induction_P Parameter: Age (day) Value: 7
  misc_feature: MA Experiment 20001451 PARAMETER Experiment Name: At_Far-red-induction_P Parameter: Light Value: Far-red vs. White
  misc_feature: MA Experiment 20001451 PARAMETER Experiment Name: At_Far-red-induction_P Parameter: Organism Value: A. thaliana
  misc_feature: MA Experiment 20001451 PARAMETER Experiment Name: At_Far-red-induction_P Parameter: Plant Line Value: Columbia
  misc_feature: MA Experiment 20001451 PARAMETER Experiment Name: At_Far-red-induction_P Parameter: Timepoint (hr) Value: 24
  misc_feature: MA Experiment 20001451 PARAMETER Experiment Name: At_Far-red-induction_P Parameter: Tissue Value: Whole Plant
  misc_feature: MA Experiment ID: 20001556 Result: Up-regulated in Transcription
  misc_feature: MA Experiment 20001556 PARAMETER Experiment Name: At_Drought_Soil_Dry_P Parameter: Age (day) Value: 26
  misc_feature: MA Experiment 20001556 PARAMETER Experiment Name: At_Drought_Soil_Dry_P Parameter: Organism Value: A. thaliana
  misc_feature: MA Experiment 20001556 PARAMETER Experiment Name: At_Drought_Soil_Dry_P Parameter: Plant Line Value: WS
  misc_feature: MA Experiment 20001556 PARAMETER Experiment Name: At_Drought_Soil_Dry_P Parameter: Post Timepoint (hr) Value: None
  misc_feature: MA Experiment 20001556 PARAMETER Experiment Name: At_Drought_Soil_Dry_P Parameter: Post-Treatment Value: None
  misc_feature: MA Experiment 20001556 PARAMETER Experiment Name: At_Drought_Soil_Dry_P Parameter: Timepoint (day) Value: 12
  misc_feature: MA Experiment 20001556 PARAMETER Experiment Name: At_Drought_Soil_Dry_P Parameter: Treatment Value: Drought vs. No Drought
  misc_feature: MA Experiment ID: 20001559 Result: Up-regulated in Transcription
  misc_feature: MA Experiment 20001559 PARAMETER Experiment Name: At_Drought_Soil_Dry_P Parameter: Age (day) Value: 28
  misc_feature: MA Experiment 20001559 PARAMETER Experiment Name: At_Drought_Soil_Dry_P Parameter: Organism Value: A. thaliana
  misc_feature: MA Experiment 20001559 PARAMETER Experiment Name: At_Drought_Soil_Dry_P Parameter: Plant Line Value: WS
  misc_feature: MA Experiment 20001559 PARAMETER Experiment Name: At_Drought_Soil_Dry_P Parameter: Post Timepoint (hr) Value: 29
  misc_feature: MA Experiment 20001559 PARAMETER Experiment Name: At_Drought_Soil_Dry_P Parameter: Post-Treatment Value: Re-Water vs. No Drought
  misc_feature: MA Experiment 20001559 PARAMETER Experiment Name: At_Drought_Soil_Dry_P Parameter: Timepoint (day) Value: 14
  misc_feature: MA Experiment 20001559 PARAMETER Experiment Name: At_Drought_Soil_Dry_P Parameter: Treatment Value: Drought vs. No Drought
atactcagtaagcgagtccgagtcaacaatggacgtctacggcatgtcttcaccggacttgcttcgtatcgacgaccttctcgatttctccaacgacgaaatcttctcttcctcttccaccgtcacttcctccgctgcttcctccgccgcttcttctgaaaaccctttcagctttccttcttccgcctacacttctcctactctcctcaccgacttcactcaggatctctgcgttcccagtgacgacgcagctcatctcgaatggttatcgcgattcgttgacgattcattctctgacttcccagcgaatcctttaaccacgaacgttagacctgagatttcattcaccggaaaacctagaagtcgccgatcaagagcaccagcaccatccgtagctggaacttgggctccgatgtctgaatccgagctttgtcactccgtcgctaaacttaaaccgaagaaagtctacaacgctgaatcagttacggcggatggagcgaggcggtgcacgcactgtgcctcggagaaaacgccacagtggagaactggaccgcttggacctaaaacgctttgtaacgcttgtggagttcgttacaaatcagggaggcttgtaccggaatacagaccggcgtcgagtcctacgtttgtgttgactcagcattcgaactctcaccggaaagttatggagctccggcgacagaaggaacaacaagaatcttgcgttcgaattccgccgtttcagccgcagtaaatttgggggttttcttttcaaggggttttgtgatttggtgacgtgtcgtaatcttaacggtgatgatcacgtgaccgaagggaggggttaaggacttaattatcagtattagtttaaagtttgcaaatctctgctaattaatttgttggtaatttctattgattttttttttcttgcttttgttttttggtttcacggctctccttaaagttatatcattaaatgatttcattggcggc

SEQ ID NO: 20675 - protein, 249 aa, Arabidopsis thaliana
  peptide (1)..(249): Ceres Seq. ID no. 14313171
  misc_feature (71)..(141): Homolog of NCBI NO: 34909448 NR Description: OSJNBa0014K08.18 [Oryza sativa (japonica
  misc_feature (157)..(238): Homolog of NCBI NO: 34909448 NR Description: OSJNBa0014K08.18 [Oryza sativa (japonica
  misc_feature (10)..(177): Homolog of NCBI NO: 15225399 NR Description: GATA zinc finger protein [Arabidopsis thaliana]
  misc_feature (19)..(100): Homolog of NCBI NO: 37572449 NR Description: AG-motif binding protein-4 [Nicotiana tabacum]
  misc_feature (126)..(238): Homolog of NCBI NO: 37572449 NR Description: AG-motif binding protein-4 [Nicotiana tabacum]
  misc_feature (92)..(235): Homolog of NCBI NO: 15225399 NR Description: GATA zinc finger protein [Arabidopsis thaliana]
  misc_feature (165)..(235): Homolog of NCBI NO: 37536778 NR Description: putative transcription factor
  misc_feature (13)..(101): Homolog of NCBI NO: 37536778 NR Description: putative transcription factor
  misc_feature (10)..(249): Homolog of NCBI NO: 37572447 NR Description: AG-motif binding protein-3 [Nicotiana tabacum]
  misc_feature (10)..(249): Homolog of NCBI NO: 15232355 NR Description: GATA zinc finger protein [Arabidopsis thaliana]
YSVSESESTMDVYGMSSPDLLRIDDLLDFSNDEIFSSSSTVTSSAASSAASSENPFSFPSSAYTSPTLLTDFTQDLCVPSDDAAHLEWLSRFVDDSFSDFPANPLTTNVRPEISFTGKPRSRRSRAPAPSVAGTWAPMSESELCHSVAKLKPKKVYNAESVTADGARRCTHCASEKTPQWRTGPLGPKTLCNACGVRYKSGRLVPEYRPASSPTFVLTQHSNSHRKVMELRRQKEQQESCVRIPPFQPQ

SEQ ID NO: 20676 - protein, 240 aa, Arabidopsis thaliana
  peptide (1)..(240): Ceres Seq. ID no. 14313172
  misc_feature (62)..(132): Homolog of NCBI NO: 34909448 NR Description: OSJNBa0014K08.18 [Oryza sativa (japonica
  misc_feature (148)..(229): Homolog of NCBI NO: 34909448 NR Description: OSJNBa0014K08.18 [Oryza sativa (japonica
  misc_feature (1)..(168): Homolog of NCBI NO: 15225399 NR Description: GATA zinc finger protein [Arabidopsis thaliana]
  misc_feature (10)..(91): Homolog of NCBI NO: 37572449 NR Description: AG-motif binding protein-4 [Nicotiana tabacum]
  misc_feature (117)..(229): Homolog of NCBI NO: 37572449 NR Description: AG-motif binding protein-4 [Nicotiana tabacum]
  misc_feature (83)..(226): Homolog of NCBI NO: 15225399 NR Description: GATA zinc finger protein [Arabidopsis thaliana]
  misc_feature (156)..(226): Homolog of NCBI NO: 37536778 NR Description: putative transcription factor
  misc_feature (4)..(92): Homolog of NCBI NO: 37536778 NR Description: putative transcription factor
  misc_feature (1)..(240): Homolog of NCBI NO: 37572447 NR Description: AG-motif binding protein-3 [Nicotiana tabacum]
  misc_feature (1)..(240): Homolog of NCBI NO: 15232355 NR Description: GATA zinc finger protein [Arabidopsis thaliana]
MDVYGMSSPDLLRIDDLLDFSNDEIFSSSSTVTSSAASSAASSENPFSFPSSAYTSPTLLTDFTQDLCVPSDDAAHLEWLSRFVDDSFSDFPANPLTTNVRPEISFTGKPRSRRSRAPAPSVAGTWAPMSESELCHSVAKLKPKKVYNAESVTADGARRCTHCASEKTPQWRTGPLGPKTLCNACGVRYKSGRLVPEYRPASSPTFVLTQHSNSHRKVMELRRQKEQQESCVRIPPFQPQ

SEQ ID NO: 20677 - protein, 235 aa, Arabidopsis thaliana
  peptide (1)..(235): Ceres Seq. ID no. 14313173
  misc_feature (78)..(221): Homolog of NCBI NO: 15225399 NR Description: GATA zinc finger protein [Arabidopsis thaliana]
  misc_feature (151)..(221): Homolog of NCBI NO: 37536778 NR Description: putative transcription factor
  misc_feature (1)..(87): Homolog of NCBI NO: 37536778 NR Description: putative transcription factor
  misc_feature (1)..(235): Homolog of NCBI NO: 37572447 NR Description: AG-motif binding protein-3 [Nicotiana tabacum]
  misc_feature (1)..(235): Homolog of NCBI NO: 15232355 NR Description: GATA zinc finger protein [Arabidopsis thaliana]
  misc_feature (57)..(127): Homolog of NCBI NO: 34909448 NR Description: OSJNBa0014K08.18 [Oryza sativa (japonica
  misc_feature (143)..(224): Homolog of NCBI NO: 34909448 NR Description: OSJNBa0014K08.18 [Oryza sativa (japonica
  misc_feature (1)..(163): Homolog of NCBI NO: 15225399 NR Description: GATA zinc finger protein [Arabidopsis thaliana]
  misc_feature (5)..(86): Homolog of NCBI NO: 37572449 NR Description: AG-motif binding protein-4 [Nicotiana tabacum]
  misc_feature (112)..(224): Homolog of NCBI NO: 37572449 NR Description: AG-motif binding protein-4 [Nicotiana tabacum]
MSSPDLLRIDDLLDFSNDEIFSSSSTVTSSAASSAASSENPFSFPSSAYTSPTLLTDFTQDLCVPSDDAAHLEWLSRFVDDSFSDFPANPLTTNVRPEISFTGKPRSRRSRAPAPSVAGTWAPMSESELCHSVAKLKPKKVYNAESVTADGARRCTHCASEKTPQWRTGPLGPKTLCNACGVRYKSGRLVPEYRPASSPTFVLTQHSNSHRKVMELRRQKEQQESCVRIPPFQPQ

SEQ ID NO: 20678 - DNA, 2062 bp, Arabidopsis thaliana
  misc_feature (1)..(2062): Ceres Seq. ID no. 14310235
  misc_feature: MA Experiment ID: 20000184 Result: Down-regulated in Transcription
  misc_feature: MA Experiment 20000184 PARAMETER Experiment Name: At_Shoots__P Parameter: Age (day) Value: 7
  misc_feature: MA Experiment 20000184 PARAMETER Experiment Name: At_Shoots__P Parameter: Tissue Value: Shoots vs. Whole Plant
  misc_feature: MA Experiment ID: 20000234 Result: Up-regulated in Transcription
  misc_feature: MA Experiment 20000234 PARAMETER Experiment Name: At_Siliques_P Parameter: Age (day) Value: 21
  misc_feature: MA Experiment 20000234 PARAMETER Experiment Name: At_Siliques_P Parameter: Organism Value: A. thaliana
  misc_feature: MA Experiment 20000234 PARAMETER Experiment Name: At_Siliques_P Parameter: Plant Line Value: WS
  misc_feature: MA Experiment 20000234 PARAMETER Experiment Name: At_Siliques_P Parameter: Tissue Value: Less Than 5mm Siliques vs. Whole Plant
  misc_feature: MA Experiment ID: 20000286 Result: Up-regulated in Transcription
  misc_feature: MA Experiment 20000286 PARAMETER Experiment Name: At_Open_Flower_P Parameter: Age (day) Value: 21
  misc_feature: MA Experiment 20000286 PARAMETER Experiment Name: At_Open_Flower_P Parameter: Plant Line Value: WS
  misc_feature: MA Experiment 20000286 PARAMETER Experiment Name: At_Open_Flower_P Parameter: Tissue Value: Half Open vs. Whole Plant
  misc_feature: MA Experiment ID: 20000439 Result: Up-regulated in Transcription
  misc_feature: MA Experiment 20000439 PARAMETER Experiment Name: At_Roots__P Parameter: Age (day) Value: 14 vs. 21
  misc_feature: MA Experiment 20000439 PARAMETER Experiment Name: At_Roots__P Parameter: Organism Value: A. thaliana
  misc_feature: MA Experiment 20000439 PARAMETER Experiment Name: At_Roots__P Parameter: Tissue Value: Roots vs. Whole Plant
  misc_feature: MA Experiment ID: 20000496 Result: Up-regulated in Transcription
  misc_feature: MA Experiment 20000496 PARAMETER Experiment Name: At_Guard_Cells_P Parameter: Harvest Date Value: 7/19/2002
  misc_feature: MA Experiment 20000496 PARAMETER Experiment Name: At_Guard_Cells_P Parameter: Organism Value: Canola
  misc_feature: MA Experiment 20000496 PARAMETER Experiment Name: At_Guard_Cells_P Parameter: Tissue Value: Guard Cells vs. Leaves
  misc_feature: MA Experiment ID: 20000794 Result: Up-regulated in Transcription
  misc_feature: MA Experiment 20000794 PARAMETER Experiment Name: At_Petals_P Parameter: Age (day) Value: 23-25 days
  misc_feature: MA Experiment 20000794 PARAMETER Experiment Name: At_Petals_P Parameter: Plant Line Value: WS
  misc_feature: MA Experiment 20000794 PARAMETER Experiment Name: At_Petals_P Parameter: Tissue Value: Petals vs. Whole plant
ggtcagttttctttgattctgggtagtaaataatcgggatcaattgtagaagagctcatcgagaaaagagagaacctaaactttaaattcaattctgtattgttctcaaactcgaacccgaaactttaaatccttccttatttgttttctggagttcttgtttagaactgttttggatttgttttttttgaggagatgctttagttaactaggtttgcttcgagctgatcgctgtgtggcataaaccctaatttcgtggaaactgtgctcttttagaaccggtccagtgagtaagggaatccaattggtgaagatgccgcaagttaagatcattgctaaaaatttcatggacatggtggcgtcacttccagccatcaagcttgacaaactctacaacaatgtctttatctgcgaagccattctcaggtctttgccgcctcttgccaagaagtatgtattgcagatgttgtacattgatgttcctgtacctgctacgatgatggaggagtgggtgctcgcagatggcacctctaaacatagagttgctattgatcgactgattcaattaaggattttttcagaaattagtgataggaaaaggggaaccagctacagcctaaatcctacatttcagaacaatcttcagaaacatattatttccggtggagttttgcctagagagcctatgaactccgacaatgccattaaacttccaagcctacaagaactcgaaacctatgcacttaagcaatgggagtgtttcttgctacaacttataaattcgggtcaaggtgaaaaactaactggcatcagttcatccatgatgaaaatttttcagcgaggtttattgagtcagagagacaaagatggcccgagattaactgagagtggctttcagtttttgctgatggatacaaatgcccagctttggtacattattcgagaatacatattgaatgccgaggagcgagatgtagatccagcagacttgatttcgtttttgttggagcttagttttcatgttactggtcaggcatataacttaaataccttgacagaggttcaaaacaataccctcaaggaccttgcagacttgggattagtcaagcttcaacagggaaggaaagacagttggtttattcctactaaactggctacaaatttatcagtcagtctggcagattcatcagcgcgaaaagagggatttgtcgtgatggaaacaaacttcagaatgtatgcgtactccacatctaagttacagtgtgaaattttacgactatttgcgaggatagagtaccaacttccaaaccttattgcttgtgccattacaaaggaaagtttgtacaatgcatttgacaatggcatcacatcagatcagattataactttcctccagcagaattctcatccacgatgtgctgatcgagtcccatctattccagaaaatgtcactgatcagattcggctttgggagacagatctgcagagaattgagatgacccaggctcacttctatgatgaatttccttcaaaagatttgtttgaggcagcttgtgactttgctcgggaatggagaggccttctttgggaagactctaagagaatgcgacttgttgtgaaatccgaagttcacaatcagatgcgtgagtttcttcatacccaaagcaagtaacaagaagaaactcacattttcttctcgtattaaaacaaaacatcatgcttcgattctacaaactatgtctttcgtgaggtttcagcagaaagagaaaaaagagtagccatttgatgtcttgttactctattagttaccatcgttcttatcctgctaacacatgcgcaccccaaacgtaggaaaagtacttggtgttggtacccacgaagttgaaagttgaaacctttaagctgtaagaccgatccattgtaaatcacaatatactttattaggcgaagttaagtttgaaacaacatatattgacaaaacgtggtcgttggggatggtccaaccagggtcacctctataatttcttgtacgctagacagaacacaatctcggttttgattc

SEQ ID NO: 20679 - protein, 452 aa, Arabidopsis thaliana
  peptide (1)..(452): Ceres Seq. ID no. 14310236
  misc_feature (23)..(366): Pfam Name: Transcription factor Tfb2 Pfam Description: Transcription factor Tfb2
  misc_feature (366)..(452): Homolog of NCBI NO: 6325135 NR Description: Transcription/repair factor TFIIH subunit; Tfb2p
  misc_feature (18)..(285): Homolog of NCBI NO: 6325135 NR Description: Transcription/repair factor TFIIH subunit; Tfb2p
  misc_feature (13)..(431): Homolog of NCBI NO: 19113355 NR Description: putative transcription factor TFIIH
  misc_feature (23)..(452): Homolog of NCBI NO: 21357821 NR Description: CG7764-PA [Drosophila melanogaster]
  misc_feature (1)..(452): Homolog of NCBI NO: 31201525 NR Description: ENSANGP00000012658 [Anopheles gambiae]
  misc_feature (9)..(450): Homolog of NCBI NO: 6754094 NR Description: general transcription factor II H, polypeptide 4
  misc_feature (9)..(450): Homolog of NCBI NO: 34852067 NR Description: similar to TFIIH transcription/DNA repair factor
  misc_feature (3)..(450): Homolog of NCBI NO: 4504201 NR Description: general transcription factor IIH, polypeptide 4,
  misc_feature (3)..(450): Homolog of NCBI NO: 39794736 NR Description: Unknown (protein for MGC:77721) [Danio rerio]
  misc_feature (1)..(447): Homolog of NCBI NO: 32487401 NR Description: OSJNBb0017I01.15 [Oryza sativa (japonica
MPQVKIIAKNFMDMVASLPAIKLDKLYNNVFICEAILRSLPPLAKKYVLQMLYIDVPVPATMMEEWVLADGTSKHRVAIDRLIQLRIFSEISDRKRGTSYSLNPTFQNNLQKHIISGGVLPREPMNSDNAIKLPSLQELETYALKQWECFLLQLINSGQGEKLTGISSSMMKIFQRGLLSQRDKDGPRLTESGFQFLLMDTNAQLWYIIREYILNAEERDVDPADLISFLLELSFHVTGQAYNLNTLTEVQNNTLKDLADLGLVKLQQGRKDSWFIPTKLATNLSVSLADSSARKEGFVVMETNFRMYAYSTSKLQCEILRLFARIEYQLPNLIACAITKESLYNAFDNGITSDQIITFLQQNSHPRCADRVPSIPENVTDQIRLWETDLQRIEMTQAHFYDEFPSKDLFEAACDFAREWRGLLWEDSKRMRLVVKSEVHNQMREFLHTQSK

SEQ ID NO: 20680 - protein, 441 aa, Arabidopsis thaliana
  peptide (1)..(441): Ceres Seq. ID no. 14310237
  misc_feature (12)..(355): Pfam Name: Transcription factor Tfb2 Pfam Description: Transcription factor Tfb2
  misc_feature (355)..(441): Homolog of NCBI NO: 6325135 NR Description: Transcription/repair factor TFIIH subunit; Tfb2p
  misc_feature (7)..(274): Homolog of NCBI NO: 6325135 NR Description: Transcription/repair factor TFIIH subunit; Tfb2p
  misc_feature (2)..(420): Homolog of NCBI NO: 19113355 NR Description: putative transcription factor TFIIH
  misc_feature (12)..(441): Homolog of NCBI NO: 21357821 NR Description: CG7764-PA [Drosophila melanogaster]
  misc_feature (1)..(441): Homolog of NCBI NO: 31201525 NR Description: ENSANGP00000012658 [Anopheles gambiae]
  misc_feature (1)..(439): Homolog of NCBI NO: 6754094 NR Description: general transcription factor II H, polypeptide 4
  misc_feature (1)..(439): Homolog of NCBI NO: 34852067 NR Description: similar to TFIIH transcription/DNA repair factor
  misc_feature (1)..(439): Homolog of NCBI NO: 4504201 NR Description: general transcription factor IIH, polypeptide 4,
  misc_feature (1)..(439): Homolog of NCBI NO: 39794736 NR Description: Unknown (protein for MGC:77721) [Danio rerio]
  misc_feature (1)..(436): Homolog of NCBI NO: 32487401 NR Description: OSJNBb0017I01.15 [Oryza sativa (japonica
MDMVASLPAIKLDKLYNNVFICEAILRSLPPLAKKYVLQMLYIDVPVPATMMEEWVLADGTSKHRVAIDRLIQLRIFSEISDRKRGTSYSLNPTFQNNLQKHIISGGVLPREPMNSDNAIKLPSLQELETYALKQWECFLLQLINSGQGEKLTGISSSMMKIFQRGLLSQRDKDGPRLTESGFQFLLMDTNAQLWYIIREYILNAEERDVDPADLISFLLELSFHVTGQAYNLNTLTEVQNNTLKDLADLGLVKLQQGRKDSWFIPTKLATNLSVSLADSSARKEGFVVMETNFRMYAYSTSKLQCEILRLFARIEYQLPNLIACAITKESLYNAFDNGITSDQIITFLQQNSHPRCADRVPSIPENVTDQIRLWETDLQRIEMTQAHFYDEFPSKDLFEAACDFAREWRGLLWEDSKRMRLVVKSEVHNQMREFLHTQSK

SEQ ID NO: 20681 - protein, 439 aa, Arabidopsis thaliana
  peptide (1)..(439): Ceres Seq. ID no. 14310238
  misc_feature (10)..(353): Pfam Name: Transcription factor Tfb2 Pfam Description: Transcription factor Tfb2
  misc_feature (353)..(439): Homolog of NCBI NO: 6325135 NR Description: Transcription/repair factor TFIIH subunit; Tfb2p
  misc_feature (5)..(272): Homolog of NCBI NO: 6325135 NR Description: Transcription/repair factor TFIIH subunit; Tfb2p
  misc_feature (1)..(418): Homolog of NCBI NO: 19113355 NR Description: putative transcription factor TFIIH
  misc_feature (10)..(439): Homolog of NCBI NO: 21357821 NR Description: CG7764-PA [Drosophila melanogaster]
  misc_feature (1)..(439): Homolog of NCBI NO: 31201525 NR Description: ENSANGP00000012658 [Anopheles gambiae]
  misc_feature (1)..(437): Homolog of NCBI NO: 6754094 NR Description: general transcription factor II H, polypeptide 4
  misc_feature (1)..(437): Homolog of NCBI NO: 34852067 NR Description: similar to TFIIH transcription/DNA repair factor
  misc_feature (1)..(437): Homolog of NCBI NO: 4504201 NR Description: general transcription factor IIH, polypeptide 4,
  misc_feature (1)..(437): Homolog of NCBI NO: 39794736 NR Description: Unknown (protein for MGC:77721) [Danio rerio]
  misc_feature (1)..(434): Homolog of NCBI NO: 32487401 NR Description: OSJNBb0017I01.15 [Oryza sativa (japonica
MVASLPAIKLDKLYNNVFICEAILRSLPPLAKKYVLQMLYIDVPVPATMMEEWVLADGTSKHRVAIDRLIQLRIFSEISDRKRGTSYSLNPTFQNNLQKHIISGGVLPREPMNSDNAIKLPSLQELETYALKQWECFLLQLINSGQGEKLTGISSSMMKIFQRGLLSQRDKDGPRLTESGFQFLLMDTNAQLWYIIREYILNAEERDVDPADLISFLLELSFHVTGQAYNLNTLTEVQNNTLKDLADLGLVKLQQGRKDSWFIPTKLATNLSVSLADSSARKEGFVVMETNFRMYAYSTSKLQCEILRLFARIEYQLPNLIACAITKESLYNAFDNGITSDQIITFLQQNSHPRCADRVPSIPENVTDQIRLWETDLQRIEMTQAHFYDEFPSKDLFEAACDFAREWRGLLWEDSKRMRLVVKSEVHNQMREFLHTQSK

SEQ ID NO: 20682 - DNA, 1152 bp, Arabidopsis thaliana
  misc_feature (1)..(1152): Ceres Seq. ID no. 14310291
tcactagtcccccccccccccccggattagaacgaaaccctaattggtcgacgaaatgaaagggattgcgaggcttgtaacttctctatcgcgaatcggaggtcgtatgattgtttctggaacaagtactgtatcttcttcttcgtcttcctctcttctgctatctcgtcgctcgcttttcatctctatcaccaatttacttaattctcggaccaaggattctgctcttccttcattgaattcttcttcacttgttcagaaatggaacttcctcggagggcagagaagaacaatgtttatccaaacacaatcaactccaaatccttcttctctcatgttttatcctggcaaatcagtcatggaagttggaagtgctgattttccaaatgttcgttctgctctgggttcgccattagccaaatctatttactccattgatggtgtggttcgagttttctttgggtcagattttgtcactgtaactaagtcagatgatgtatcatgggatattctcaagcctgagatatttgcagcagtcatggatttctattcttctggcgagcctttgtttctcgactcacaagctgctgctgccaaggatactgccatcagcgaggatgactctgaaacagtagcaatgatcaaggaactcttagaaacacgcatcagaccagcagttcaagatgatggtggggacattgagtattgtgggtttgatccggaaagcggtatagtgaagctgaggatgcaaggagcttgtagtggttgtccgagctcatctgttactttgaaatcgggaattgaaaatatgctgatgcattatgtatccgaggtgaaaggtgtagaacaagagtttgatggggaagatgaagagggaacgttgtctggagagatgagagtagagtaggagacctcctctttgctctttagtgtacagaaaaataaatcccagtgagtgcacttttttcttcaatccttggtgttgtttctgggcttttgaatcacactcaaggatctgtttactgagagatctgagttgttgtttttttgtagcttttgttgacttacacttgttttgattatttgaggttaagcaacgaaagatgtaccagaatatttgaaatttccgagtattataacacgatttacaag

SEQ ID NO: 20683 - protein, 283 aa, Arabidopsis thaliana
  peptide (1)..(283): Ceres Seq. ID no. 14310292
  misc_feature (196)..(266): Pfam Name: NifU-like domain Pfam Description: NifU-like domain
  misc_feature (78)..(273): Homolog of NCBI NO: 12834577 NR Description: unnamed protein product [Mus musculus]
  misc_feature (80)..(273): Homolog of NCBI NO: 26324295 NR Description: unnamed protein product [Mus musculus]
  misc_feature (78)..(273): Homolog of NCBI NO: 37681825 NR Description: HIRA interacting protein 5 [Danio rerio]
  misc_feature (77)..(271): Homolog of NCBI NO: 24643765 NR Description: CG32857-PA [Drosophila melanogaster]
  misc_feature (77)..(271): Homolog of NCBI NO: 6554171 NR Description: TO42 [Drosophila melanogaster]
  misc_feature (73)..(272): Homolog of NCBI NO: 31203061 NR Description: ENSANGP00000019230 [Anopheles gambiae]
  misc_feature (62)..(280): Homolog of NCBI NO: 15223842 NR Description: expressed protein [Arabidopsis thaliana]
  misc_feature (62)..(280): Homolog of NCBI NO: 34897632 NR Description: hypothetical protein [Oryza sativa]
  misc_feature (1)..(280): Homolog of NCBI NO: 25405462 NR Description: unknown protein, 90320-88994 [imported] -
  misc_feature (1)..(283): Homolog of NCBI NO: 18402817 NR Description: expressed protein [Arabidopsis thaliana]
MKGIARLVTSLSRIGGRMIVSGTSTVSSSSSSSLLLSRRSLFISITNLLNSRTKDSALPSLNSSSLVQKWNFLGGQRRTMFIQTQSTPNPSSLMFYPGKSVMEVGSADFPNVRSALGSPLAKSIYSIDGVVRVFFGSDFVTVTKSDDVSWDILKPEIFAAVMDFYSSGEPLFLDSQAAAAKDTAISEDDSETVAMIKELLETRIRPAVQDDGGDIEYCGFDPESGIVKLRMQGACSGCPSSSVTLKSGIENMLMHYVSEVKGVEQEFDGEDEEGTLSGEMRVE

SEQ ID NO: 20684 - protein, 266 aa, Arabidopsis thaliana
  peptide (1)..(266): Ceres Seq. ID no. 14310293
  misc_feature (179)..(249): Pfam Name: NifU-like domain Pfam Description: NifU-like domain
  misc_feature (61)..(256): Homolog of NCBI NO: 12834577 NR Description: unnamed protein product [Mus musculus]
  misc_feature (63)..(256): Homolog of NCBI NO: 26324295 NR Description: unnamed protein product [Mus musculus]
  misc_feature (61)..(256): Homolog of NCBI NO: 37681825 NR Description: HIRA interacting protein 5 [Danio rerio]
  misc_feature (60)..(254): Homolog of NCBI NO: 24643765 NR Description: CG32857-PA [Drosophila melanogaster]
  misc_feature (60)..(254): Homolog of NCBI NO: 6554171 NR Description: TO42 [Drosophila melanogaster]
  misc_feature (56)..(255): Homolog of NCBI NO: 31203061 NR Description: ENSANGP00000019230 [Anopheles gambiae]
  misc_feature (45)..(263): Homolog of NCBI NO: 15223842 NR Description: expressed protein [Arabidopsis thaliana]
  misc_feature (45)..(263): Homolog of NCBI NO: 34897632 NR Description: hypothetical protein [Oryza sativa]
  misc_feature (1)..(263): Homolog of NCBI NO: 25405462 NR Description: unknown protein, 90320-88994 [imported] -
  misc_feature (1)..(266): Homolog of NCBI NO: 18402817 NR Description: expressed protein [Arabidopsis thaliana]
MIVSGTSTVSSSSSSSLLLSRRSLFISITNLLNSRTKDSALPSLNSSSLVQKWNFLGGQRRTMFIQTQSTPNPSSLMFYPGKSVMEVGSADFPNVRSALGSPLAKSIYSIDGVVRVFFGSDFVTVTKSDDVSWDILKPEIFAAVMDFYSSGEPLFLDSQAAAAKDTAISEDDSETVAMIKELLETRIRPAVQDDGGDIEYCGFDPESGIVKLRMQGACSGCPSSSVTLKSGIENMLMHYVSEVKGVEQEFDGEDEEGTLSGEMRVE

SEQ ID NO: 20685 - protein, 204 aa, Arabidopsis thaliana
  peptide (1)..(204): Ceres Seq. ID no. 14310294
  misc_feature (117)..(187): Pfam Name: NifU-like domain Pfam Description: NifU-like domain
  misc_feature (1)..(194): Homolog of NCBI NO: 12834577 NR Description: unnamed protein product [Mus musculus]
  misc_feature (1)..(194): Homolog of NCBI NO: 26324295 NR Description: unnamed protein product [Mus musculus]
  misc_feature (1)..(194): Homolog of NCBI NO: 37681825 NR Description: HIRA interacting protein 5 [Danio rerio]
  misc_feature (1)..(192): Homolog of NCBI NO: 24643765 NR Description: CG32857-PA [Drosophila melanogaster]
  misc_feature (1)..(192): Homolog of NCBI NO: 6554171 NR Description: TO42 [Drosophila melanogaster]
  misc_feature (1)..(193): Homolog of NCBI NO: 31203061 NR Description: ENSANGP00000019230 [Anopheles gambiae]
  misc_feature (1)..(201): Homolog of NCBI NO: 15223842 NR Description: expressed protein [Arabidopsis thaliana]
  misc_feature (1)..(201): Homolog of NCBI NO: 34897632 NR Description: hypothetical protein [Oryza sativa]
  misc_feature (1)..(201): Homolog of NCBI NO: 25405462 NR Description: unknown protein, 90320-88994 [imported] -
  misc_feature (1)..(204): Homolog of NCBI NO: 18402817 NR Description: expressed protein [Arabidopsis thaliana]
MFIQTQSTPNPSSLMFYPGKSVMEVGSADFPNVRSALGSPLAKSIYSIDGVVRVFFGSDFVTVTKSDDVSWDILKPEIFAAVMDFYSSGEPLFLDSQAAAAKDTAISEDDSETVAMIKELLETRIRPAVQDDGGDIEYCGFDPESGIVKLRMQGACSGCPSSSVTLKSGIENMLMHYVSEVKGVEQEFDGEDEEGTLSGEMRVE

SEQ ID NO: 20686 - DNA, 2606 bp, Arabidopsis thaliana
  misc_feature (1)..(2606): Ceres Seq. ID no. 15168832
tctctctctctctcacattcattgcttttaaattaaaactcccccaaaactgaaactgttactacttctctccttccttctctaaaaacctaaaaaaaaaaaaacccaacacacacacatggattctcaggaccactgcagcaactctccaggaggaggtaagaaccatgtctgtactaaatgtggttggagttattcaaatccacatcctagtgctaaaaaccgtcgtgctcacaagaaaatctgtggaaccatcaaaggatttgagatctttgactctgaaatgaagaaagagaatcttgatttgcaggaagaacactccttggaagatgagcaaaaaaccccaagtccaacagttgtcgaaaaatctgctccaacagttgtcgaaaaagctgctgatgagagaattggggatgtttctgaagaggatgtgtttactgatgctgtttgtgagttttcgagatctgattctttcaaggaagagacagctacaaacttcccggcaaagggtactgagaatcccggtgaaactcagcactgcaacaattcatctacggcctgtgagatgaaaagttctgaagtggttcaagacagctgtgaagttccacctgtggaagttgaatcagcttcagagaatcgacaaggtgcacagcattctactgaaggacactctatgtcatctgaaactgtgattgagtcatcacaggaagctcaggtcattgacggtggtgataccatatcaaatgatagattagagacagaatgcaaagggaagttaacgaaagaatctgaatctaagttagcatctgcattaggaaagagagaggatacttcagattcatcgtggaacgatgaagtgatttactcagatgtggagggtccctatggtttttcatcagaagcaactagtatgactcatcctgatgaagctagctgtatagtcagtgaggatgttccagtccatacttctccagtaaaagctgatgcaactcaggttatcagtgccagtaaatctgttcctgatgatatgccttttgttgagaatgctgatgtctatttgcatggaatcaaaggctttgaagaatttgaagtgagtcattctgtgaatccttttcttcctgagacatctaagggagaagaatgtgaaatagatacacttactgaggcagataatttaggaattaagcctgaaggcttaagtattggctcagaggttccttcatcagagaagcttctcgctggagacaaaactgaacctcaaggccaaaccgatttggttgcggtcaaggaatttcccagtgcagagaacatactgatatctaagattgactctgaagatatcggaatgaaagctgaagagggtgaatcatcattagagaatgcacaaactgttgaatcagaaaccttgagagtttctctacctgctgtagattctatagatgttgactcgaatgctgatatgagcagtgcagcgaacaaaactggtttagttgatctcgctggtaatgaaagtgaacttatgcaagcaaatgttgtagctgagaaggggaacaaaccaaaagacactttgagttctgaatcctcttgttatgcttctccggtgtctgttgtatttgagggatctgatgcaagtgatcagataaaaaattcaacagaaacatctaaagactccgccctccaaatcagcgctgaaagtaaagatgaagtttgcagagagagtaaaaacggaaggcttgtggaggaaagcagtttcataaacgaaccaaatacaactgaatatcctataagccattttggatcaacaggcacagcacctgacactgttaatacagctaatcagacgtcactggaaatcggaatgacagaattcaatagagttgttggtggcttgggggtaattcaagcaaatgaggtcgacggtaatgtcaaagcacacaacaattatgctgaggtcccagtgacaatagaatcaaacgatcatcgagattttgggagattgcagaatctttcagaagctcacattagatctctggtttctagtccgctagtcactagaaataatacatctaatgcttctgaatctaacttgggaccagtttcaggtctaagcgctggagttaacaaacaggaagacgcatctcagaaccaagagatcaccttggagaagacaacaagctggggcacagcaaaggagcaacacgtcactctaaagaaccttctgagtgaagcaagatcaccaaggctacaacaacaagcaaaggatcacgagagtaataacataccgagagtgagttcgatactgggacaggagacatcccctgaagatggtcactggccagagaaaagagaagtgagcgaggaatggaattcaccagcaaagtatccagtggacttaaagagagaggagaagaaagtgaaaggaagacccttttgggtgccatttgtttgctgctccaatgttaaatagaccaccactctattgtataatggtaggagatgatgaatggtttctgaagacttgctagtacaaagacttgttagtagtttggttcttgtaggagctactgttgcttaggctttgaatacttttatgcagaccacttttg

SEQ ID NO: 20687 - protein, 782 aa, Arabidopsis thaliana
  peptide (1)..(782): Ceres Seq. ID no. 15168833
  misc_feature (53)..(678): Homolog of NCBI NO: 4322670 NR Description: dentin phosphoryn [Homo sapiens]
  misc_feature (60)..(720): Homolog of NCBI NO: 27469167 NR Description: streptococcal hemagglutinin protein
  misc_feature (68)..(733): Homolog of NCBI NO: 15991793 NR Description: platelet binding protein GspB [Streptococcus
  misc_feature (68)..(686): Homolog of NCBI NO: 8885520 NR Description: streptococcal hemagglutinin [Streptococcus
  misc_feature (60)..(748): Homolog of NCBI NO: 18447198 NR Description: GH09355p [Drosophila melanogaster]
  misc_feature (60)..(748): Homolog of NCBI NO: 24662885 NR Description: CG6004-PB [Drosophila melanogaster]
  misc_feature (68)..(720): Homolog of NCBI NO: 8885520 NR Description: streptococcal hemagglutinin [Streptococcus
  misc_feature (50)..(696): Homolog of NCBI NO: 18447198 NR Description: GH09355p [Drosophila melanogaster]
  misc_feature (50)..(696): Homolog of NCBI NO: 24662885 NR Description: CG6004-PB [Drosophila melanogaster]
  misc_feature (661)..(780): Homolog of NCBI NO: 7488181 NR Description: probable salt-inducible protein - Arabidopsis
MDSQDHCSNSPGGGKNHVCTKCGWSYSNPHPSAKNRRAHKKICGTIKGFEIFDSEMKKENLDLQEEHSLEDEQKTPSPTVVEKSAPTVVEKAADERIGDVSEEDVFTDAVCEFSRSDSFKEETATNFPAKGTENPGETQHCNNSSTACEMKSSEVVQDSCEVPPVEVESASENRQGAQHSTEGHSMSSETVIESSQEAQVIDGGDTISNDRLETECKGKLTKESESKLASALGKREDTSDSSWNDEVIYSDVEGPYGFSSEATSMTHPDEASCIVSEDVPVHTSPVKADATQVISASKSVPDDMPFVENADVYLHGIKGFEEFEVSHSVNPFLPETSKGEECEIDTLTEADNLGIKPEGLSIGSEVPSSEKLLAGDKTEPQGQTDLVAVKEFPSAENILISKIDSEDIGMKAEEGESSLENAQTVESETLRVSLPAVDSIDVDSNADMSSAANKTGLVDLAGNESELMQANVVAEKGNKPKDTLSSESSCYASPVSVVFEGSDASDQIKNSTETSKDSALQISAESKDEVCRESKNGRLVEESSFINEPNTTEYPISHFGSTGTAPDTVNTANQTSLEIGMTEFNRVVGGLGVIQANEVDGNVKAHNNYAEVPVTIESNDHRDFGRLQNLSEAHIRSLVSSPLVTRNNTSNASESNLGPVSGLSAGVNKQEDASQNQEITLEKTTSWGTAKEQHVTLKNLLSEARSPRLQQQAKDHESNNIPRVSSILGQETSPEDGHWPEKREVSEEWNSPAKYPVDLKREEKKVKGRPFWVPFVCCSNVK

SEQ ID NO: 20688 - protein, 727 aa, Arabidopsis thaliana
  peptide (1)..(727): Ceres Seq. ID no. 15168834
  misc_feature (1)..(623): Homolog of NCBI NO: 4322670 NR Description: dentin phosphoryn [Homo sapiens]
  misc_feature (5)..(665): Homolog of NCBI NO: 27469167 NR Description: streptococcal hemagglutinin protein
  misc_feature (13)..(678): Homolog of NCBI NO: 15991793 NR Description: platelet binding protein GspB [Streptococcus
  misc_feature (13)..(631): Homolog of NCBI NO: 8885520 NR Description: streptococcal hemagglutinin [Streptococcus
  misc_feature (5)..(693): Homolog of NCBI NO: 18447198 NR Description: GH09355p [Drosophila melanogaster]
  misc_feature (5)..(693): Homolog of NCBI NO: 24662885 NR Description: CG6004-PB [Drosophila melanogaster]
  misc_feature (13)..(665): Homolog of NCBI NO: 8885520 NR Description: streptococcal hemagglutinin [Streptococcus
  misc_feature (1)..(641): Homolog of NCBI NO: 18447198 NR Description: GH09355p [Drosophila melanogaster]
  misc_feature (1)..(641): Homolog of NCBI NO: 24662885 NR Description: CG6004-PB [Drosophila melanogaster]
  misc_feature (606)..(725): Homolog of NCBI NO: 7488181 NR Description: probable salt-inducible protein - Arabidopsis
MKKENLDLQEEHSLEDEQKTPSPTVVEKSAPTVVEKAADERIGDVSEEDVFTDAVCEFSRSDSFKEETATNFPAKGTENPGETQHCNNSSTACEMKSSEVVQDSCEVPPVEVESASENRQGAQHSTEGHSMSSETVIESSQEAQVIDGGDTISNDRLETECKGKLTKESESKLASALGKREDTSDSSWNDEVIYSDVEGPYGFSSEATSMTHPDEASCIVSEDVPVHTSPVKADATQVISASKSVPDDMPFVENADVYLHGIKGFEEFEVSHSVNPFLPETSKGEECEIDTLTEADNLGIKPEGLSIGSEVPSSEKLLAGDKTEPQGQTDLVAVKEFPSAENILISKIDSEDIGMKAEEGESSLENAQTVESETLRVSLPAVDSIDVDSNADMSSAANKTGLVDLAGNESELMQANVVAEKGNKPKDTLSSESSCYASPVSVVFEGSDASDQIKNSTETSKDSALQISAESKDEVCRESKNGRLVEESSFINEPNTTEYPISHFGSTGTAPDTVNTANQTSLEIGMTEFNRVVGGLGVIQANEVDGNVKAHNNYAEVPVTIESNDHRDFGRLQNLSEAHIRSLVSSPLVTRNNTSNASESNLGPVSGLSAGVNKQEDASQNQEITLEKTTSWGTAKEQHVTLKNLLSEARSPRLQQQAKDHESNNIPRVSSILGQETSPEDGHWPEKREVSEEWNSPAKYPVDLKREEKKVKGRPFWVPFVCCSNVK

SEQ ID NO: 20689 - protein, 633 aa, Arabidopsis thaliana
  peptide (1)..(633): Ceres Seq. ID no. 15168835
  misc_feature (1)..(529): Homolog of NCBI NO: 4322670 NR Description: dentin phosphoryn [Homo sapiens]
  misc_feature (1)..(571): Homolog of NCBI NO: 27469167 NR Description: streptococcal hemagglutinin protein
  misc_feature (1)..(584): Homolog of NCBI NO: 15991793 NR Description: platelet binding protein GspB [Streptococcus
  misc_feature (1)..(537): Homolog of NCBI NO: 8885520 NR Description: streptococcal hemagglutinin [Streptococcus
  misc_feature (1)..(599): Homolog of NCBI NO: 18447198 NR Description: GH09355p [Drosophila melanogaster]
  misc_feature (1)..(599): Homolog of NCBI NO: 24662885 NR Description: CG6004-PB [Drosophila melanogaster]
  misc_feature (1)..(571): Homolog of NCBI NO: 8885520 NR Description: streptococcal hemagglutinin [Streptococcus
  misc_feature (1)..(547): Homolog of NCBI NO: 18447198 NR Description: GH09355p [Drosophila melanogaster]
  misc_feature (1)..(547): Homolog of NCBI NO: 24662885 NR Description: CG6004-PB [Drosophila melanogaster]
  misc_feature (512)..(631): Homolog of NCBI NO: 7488181 NR Description: probable salt-inducible protein - Arabidopsis
MKSSEVVQDSCEVPPVEVESASENRQGAQHSTEGHSMSSETVIESSQEAQVIDGGDTISNDRLETECKGKLTKESESKLASALGKREDTSDSSWNDEVIYSDVEGPYGFSSEATSMTHPDEASCIVSEDVPVHTSPVKADATQVISASKSVPDDMPFVENADVYLHGIKGFEEFEVSHSVNPFLPETSKGEECEIDTLTEADNLGIKPEGLSIGSEVPSSEKLLAGDKTEPQGQTDLVAVKEFPSAENILISKIDSEDIGMKAEEGESSLENAQTVESETLRVSLPAVDSIDVDSNADMSSAANKTGLVDLAGNESELMQANVVAEKGNKPKDTLSSESSCYASPVSVVFEGSDASDQIKNSTETSKDSALQISAESKDEVCRESKNGRLVEESSFINEPNTTEYPISHFGSTGTAPDTVNTANQTSLEIGMTEFNRVVGGLGVIQANEVDGNVKAHNNYAEVPVTIESNDHRDFGRLQNLSEAHIRSLVSSPLVTRNNTSNASESNLGPVSGLSAGVNKQEDASQNQEITLEKTTSWGTAKEQHVTLKNLLSEARSPRLQQQAKDHESNNIPRVSSILGQETSPEDGHWPEKREVSEEWNSPAKYPVDLKREEKKVKGRPFWVPFVCCSNVK

SEQ ID NO: 20690 - DNA, 560 bp, Arabidopsis thaliana
  misc_feature (1)..(560): Ceres Seq. ID no. 12562293
  misc_feature: MA Experiment ID: 108434 Result: Down-regulated in Transcription
  misc_feature: MA Experiment 108434 PARAMETER Experiment Name: At_Root_Tips_cDNA_P Parameter: Tissue Value: Root Tips
  misc_feature: MA Experiment ID: 108435 Result: Up-regulated in Transcription
  misc_feature: MA Experiment 108435 PARAMETER Experiment Name: At_stm_Mutants_cDNA_P Parameter: Plant Line Value: wt Landsburg vs stm
  misc_feature: MA Experiment 108435 PARAMETER Experiment Name: At_stm_Mutants_cDNA_P Parameter: Tissue Value: Shoot Apical Meristem Region
  misc_feature: MA Experiment ID: 108576 Result: Up-regulated in Transcription
  misc_feature: MA Experiment 108576 PARAMETER Experiment Name: At_42deg_Heat_cDNA_P Parameter: Temperature (deg C) Value: 42 vs. 22
  misc_feature: MA Experiment 108576 PARAMETER Experiment Name: At_42deg_Heat_cDNA_P Parameter: Timepoint (hr) Value: 1
  misc_feature: MA Experiment 108576 PARAMETER Experiment Name: At_42deg_Heat_cDNA_P Parameter: Tissue Value: Aerial
  misc_feature: MA Experiment ID: 108594 Result: Down-regulated in Transcription
  misc_feature: MA Experiment 108594 PARAMETER Experiment Name: At_Ler-rhl_Root_cDNA_P Parameter: Plant Line Value: null
  misc_feature: MA Experiment ID: 108609 Result: Up-regulated in Transcription
  misc_feature: MA Experiment 108609 PARAMETER Experiment Name: At_100uM_ABA_cDNA_P Parameter: Timepoint (hr) Value: 24
  misc_feature: MA Experiment 108609 PARAMETER Experiment Name: At_100uM_ABA_cDNA_P Parameter: Tissue Value: Aerial
  misc_feature: MA Experiment 108609 PARAMETER Experiment Name: At_100uM_ABA_cDNA_P Parameter: Treatment Value: 100uM ABA vs. No Treatment
  misc_feature: MA Experiment ID: 20000088 Result: Up-regulated in Transcription
  misc_feature: MA Experiment 20000088 PARAMETER Experiment Name: At_100uM_ABA_Mutants_cDNA_P Parameter: Plant Line Value: Landsberg
  misc_feature: MA Experiment 20000088 PARAMETER Experiment Name: At_100uM_ABA_Mutants_cDNA_P Parameter: Timepoint (hr) Value: 6
  misc_feature: MA Experiment 20000088 PARAMETER Experiment Name: At_100uM_ABA_Mutants_cDNA_P Parameter: Tissue Value: Aerial
  misc_feature: MA Experiment 20000088 PARAMETER Experiment Name: At_100uM_ABA_Mutants_cDNA_P Parameter: Treatment Value: 100uM ABA vs. No Treatment
  misc_feature: MA Experiment ID: 20000090 Result: Up-regulated in Transcription
  misc_feature: MA Experiment ID: 20000112 Result: Up-regulated in Transcription
  misc_feature: MA Experiment 20000112 PARAMETER Experiment Name: At_42deg_Heat_cDNA_P Parameter: Temperature (deg C) Value: 42 vs. 22
  misc_feature: MA Experiment 20000112 PARAMETER Experiment Name: At_42deg_Heat_cDNA_P Parameter: Timepoint (hr) Value: 2
  misc_feature: MA Experiment 20000112 PARAMETER Experiment Name: At_42deg_Heat_cDNA_P Parameter: Tissue Value: Aerial
  misc_feature: MA Experiment ID: 20000171 Result: Up-regulated in Transcription
  misc_feature: MA Experiment 20000171 PARAMETER Experiment Name: At_42deg_Heat_P Parameter: Age (day) Value: 14
  misc_feature: MA Experiment 20000171 PARAMETER Experiment Name: At_42deg_Heat_P Parameter: Organism Value: A. thaliana
  misc_feature: MA Experiment 20000171 PARAMETER Experiment Name: At_42deg_Heat_P Parameter: Plant Line Value: WS
  misc_feature: MA Experiment 20000171 PARAMETER Experiment Name: At_42deg_Heat_P Parameter: Temperature (deg C) Value: 42 vs. 22
  misc_feature: MA Experiment 20000171 PARAMETER Experiment Name: At_42deg_Heat_P Parameter: Timepoint (hr) Value: 1
  misc_feature: MA Experiment 20000171 PARAMETER Experiment Name: At_42deg_Heat_P Parameter: Tissue Value: Aerial
  misc_feature: MA Experiment ID: 20000184 Result: Up-regulated in Transcription
  misc_feature: MA Experiment 20000184 PARAMETER Experiment Name: At_Shoots__P Parameter: Age (day) Value: 7
  misc_feature: MA Experiment 20000184 PARAMETER Experiment Name: At_Shoots__P Parameter: Tissue Value: Shoots vs. Whole Plant
  misc_feature: MA Experiment ID: 20000185 Result: Up-regulated in Transcription
  misc_feature: MA Experiment 20000185 PARAMETER Experiment Name: At_Roots__P Parameter: Age (day) Value: 7 vs. 21
  misc_feature: MA Experiment 20000185 PARAMETER Experiment Name: At_Roots__P Parameter: Organism Value: A. thaliana
  misc_feature: MA Experiment 20000185 PARAMETER Experiment Name: At_Roots__P Parameter: Tissue Value: Roots vs. Whole Plant
  misc_feature: MA Experiment ID: 20000234 Result: Down-regulated in Transcription
  misc_feature: MA Experiment 20000234 PARAMETER Experiment Name: At_Siliques_P Parameter: Age (day) Value: 21
  misc_feature: MA Experiment 20000234 PARAMETER Experiment Name: At_Siliques_P Parameter: Organism Value: A. thaliana
  misc_feature: MA Experiment 20000234 PARAMETER Experiment Name: At_Siliques_P Parameter: Plant Line Value: WS
  misc_feature: MA Experiment 20000234 PARAMETER Experiment Name: At_Siliques_P Parameter: Tissue Value: Less Than 5mm Siliques vs. Whole Plant
  misc_feature: MA Experiment ID: 20000235 Result: Down-regulated in Transcription
  misc_feature: MA Experiment 20000235 PARAMETER Experiment Name: At_Siliques_P Parameter: Age (day) Value: 21
  misc_feature: MA Experiment 20000235 PARAMETER Experiment Name: At_Siliques_P Parameter: Organism Value: A. thaliana
  misc_feature: MA Experiment 20000235 PARAMETER Experiment Name: At_Siliques_P Parameter: Plant Line Value: WS
  misc_feature: MA Experiment 20000235 PARAMETER Experiment Name: At_Siliques_P Parameter: Tissue Value: 5-10mm Siliques vs. Whole Plant
  misc_feature: MA Experiment ID: 20000269 Result: Down-regulated in Transcription
  misc_feature: MA Experiment 20000269 PARAMETER Experiment Name: At_1mM_KNO3_L-vs-H_Roots_P Parameter: Age (day) Value: 7,10,12
  misc_feature: MA Experiment 20000269 PARAMETER Experiment Name: At_1mM_KNO3_L-vs-H_Roots_P Parameter: Organism Value: A. thaliana
  misc_feature: MA Experiment 20000269 PARAMETER Experiment Name: At_1mM_KNO3_L-vs-H_Roots_P Parameter: Plant Line Value: WS
  misc_feature: MA Experiment 20000269 PARAMETER Experiment Name: At_1mM_KNO3_L-vs-H_Roots_P Parameter: Timepoint (day) Value: 7,10,12
  misc_feature: MA Experiment 20000269 PARAMETER Experiment Name: At_1mM_KNO3_L-vs-H_Roots_P Parameter: Tissue Value: Roots
  misc_feature: MA Experiment 20000269 PARAMETER Experiment Name: At_1mM_KNO3_L-vs-H_Roots_P Parameter: Treatment Value: 1mM KNO3 vs. 50mM KNO3
  misc_feature: MA Experiment ID: 20000438 Result: Up-regulated in Transcription
  misc_feature: MA Experiment 20000438 PARAMETER Experiment Name: At_Shoots__P Parameter: Age (day) Value: 14
  misc_feature: MA Experiment 20000438 PARAMETER Experiment Name: At_Shoots__P Parameter: Tissue Value: Shoots vs. Whole Plant
  misc_feature: MA Experiment ID: 20000439 Result: Up-regulated in Transcription
  misc_feature: MA Experiment 20000439 PARAMETER Experiment Name: At_Roots__P Parameter: Age (day) Value: 14 vs. 21
  misc_feature: MA Experiment 20000439 PARAMETER Experiment Name: At_Roots__P Parameter: Organism Value: A. thaliana
  misc_feature: MA Experiment 20000439 PARAMETER Experiment Name: At_Roots__P Parameter: Tissue Value: Roots vs. Whole Plant
  misc_feature: MA Experiment ID: 20000451 Result: Down-regulated in Transcription
  misc_feature: MA Experiment 20000451 PARAMETER Experiment Name: At_CS6879_Shoots-Roots_P Parameter: Age (day) Value: 14
  misc_feature: MA Experiment 20000451 PARAMETER Experiment Name: At_CS6879_Shoots-Roots_P Parameter: Organism Value: A. thaliana
  misc_feature: MA Experiment 20000451 PARAMETER Experiment Name: At_CS6879_Shoots-Roots_P Parameter: Plant Line Value: CS6879 vs. WS
  misc_feature: MA Experiment 20000451 PARAMETER Experiment Name: At_CS6879_Shoots-Roots_P Parameter: Tissue Value: Roots
  misc_feature: MA Experiment ID: 20000452 Result: Down-regulated in Transcription
  misc_feature: MA Experiment 20000452 PARAMETER Experiment Name: At_CS6879_Shoots-Roots_P Parameter: Age (day) Value: 14
  misc_feature: MA Experiment 20000452 PARAMETER Experiment Name: At_CS6879_Shoots-Roots_P Parameter: Organism Value: A. thaliana
  misc_feature: MA Experiment 20000452 PARAMETER Experiment Name: At_CS6879_Shoots-Roots_P Parameter: Plant Line Value: CS6879 vs. WS
  misc_feature: MA Experiment 20000452 PARAMETER Experiment Name: At_CS6879_Shoots-Roots_P Parameter: Tissue Value: Shoots
  misc_feature: MA Experiment ID: 20000453 Result: Up-regulated in Transcription
  misc_feature: MA Experiment 20000453 PARAMETER Experiment Name: At_100uM_ABA_P Parameter: Age (day) Value: 15
  misc_feature: MA Experiment 20000453 PARAMETER Experiment Name: At_100uM_ABA_P Parameter: Organism Value: A. thaliana
  misc_feature: MA Experiment 20000453 PARAMETER Experiment Name: At_100uM_ABA_P Parameter: Plant Line Value: WS
  misc_feature: MA Experiment 20000453 PARAMETER Experiment Name: At_100uM_ABA_P Parameter: Timepoint (hr) Value: 24
  misc_feature: MA Experiment 20000453 PARAMETER Experiment Name: At_100uM_ABA_P Parameter: Tissue Value: Aerial
  misc_feature: MA Experiment 20000453 PARAMETER Experiment Name: At_100uM_ABA_P Parameter: Treatment Value: 100uM ABA vs. No Treatment
  misc_feature: MA Experiment ID: 20000455 Result: Up-regulated in Transcription
  misc_feature: MA Experiment 20000455 PARAMETER Experiment Name: At_100uM_ABA_P Parameter: Age (day) Value: 16
  misc_feature: MA Experiment 20000455 PARAMETER Experiment Name: At_100uM_ABA_P Parameter: Organism Value: A. thaliana
  misc_feature: MA Experiment 20000455 PARAMETER Experiment Name: At_100uM_ABA_P Parameter: Plant Line Value: WS
  misc_feature: MA Experiment 20000455 PARAMETER Experiment Name: At_100uM_ABA_P Parameter: Timepoint (hr) Value: 48
  misc_feature: MA Experiment 20000455 PARAMETER Experiment Name: At_100uM_ABA_P Parameter: Tissue Value: Aerial
  misc_feature: MA Experiment 20000455 PARAMETER Experiment Name: At_100uM_ABA_P Parameter: Treatment Value: 100uM ABA vs. No Treatment
  misc_feature: MA Experiment ID: 20000495 Result: Up-regulated in Transcription
  misc_feature: MA Experiment 20000495 PARAMETER Experiment Name: At_Guard_Cells_P Parameter: Harvest Date Value: 8/2/2002
  misc_feature: MA Experiment 20000495 PARAMETER Experiment Name: At_Guard_Cells_P Parameter: Organism Value: A. thaliana
  misc_feature: MA Experiment 20000495 PARAMETER Experiment Name: At_Guard_Cells_P Parameter: Tissue Value: Guard Cells vs. Leaves
  misc_feature: MA Experiment ID: 20000709 Result: Up-regulated in Transcription
  misc_feature: MA Experiment 20000709 PARAMETER Experiment Name: At_15mM_NH4NO3_L-to-H_P Parameter: Age (hr) Value: 14
  misc_feature: MA Experiment 20000709 PARAMETER Experiment Name: At_15mM_NH4NO3_L-to-H_P Parameter: Organism Value: A. thaliana
  misc_feature: MA Experiment 20000709 PARAMETER Experiment Name: At_15mM_NH4NO3_L-to-H_P Parameter: Plant Line Value: WS
  misc_feature: MA Experiment 20000709 PARAMETER Experiment Name: At_15mM_NH4NO3_L-to-H_P Parameter: Timepoint (hr) Value: 4
  misc_feature: MA Experiment 20000709 PARAMETER Experiment Name: At_15mM_NH4NO3_L-to-H_P Parameter: Tissue Value: Aerial
  misc_feature: MA Experiment 20000709 PARAMETER Experiment Name: At_15mM_NH4NO3_L-to-H_P Parameter: Treatment Value: 15mM NH4NO3 vs. 30mM Mannitol
  misc_feature: MA Experiment ID: 20001554 Result: Up-regulated in Transcription
  misc_feature: MA Experiment 20001554 PARAMETER Experiment Name: At_Drought_Soil_Dry_P Parameter: Age (day) Value: 21
  misc_feature: MA Experiment 20001554 PARAMETER Experiment Name: At_Drought_Soil_Dry_P Parameter: Organism Value: A. thaliana
  misc_feature: MA Experiment 20001554 PARAMETER Experiment Name: At_Drought_Soil_Dry_P Parameter: Plant Line Value: WS
  misc_feature: MA Experiment 20001554 PARAMETER Experiment Name: At_Drought_Soil_Dry_P Parameter: Post Timepoint (hr) Value: None
  misc_feature: MA Experiment 20001554 PARAMETER Experiment Name: At_Drought_Soil_Dry_P Parameter: Post-Treatment Value: None
  misc_feature: MA Experiment 20001554 PARAMETER Experiment Name: At_Drought_Soil_Dry_P Parameter: Timepoint (day) Value: 7
  misc_feature: MA Experiment 20001554 PARAMETER Experiment Name: At_Drought_Soil_Dry_P Parameter: Treatment Value: Drought vs. No Drought
  misc_feature: MA Experiment ID: 20001555 Result: Up-regulated in Transcription
  misc_feature: MA Experiment 20001555 PARAMETER Experiment Name: At_Drought_Soil_Dry_P Parameter: Age (day) Value: 24
  misc_feature: MA Experiment 20001555 PARAMETER Experiment Name: At_Drought_Soil_Dry_P Parameter: Organism Value: A. thaliana
  misc_feature: MA Experiment 20001555 PARAMETER Experiment Name: At_Drought_Soil_Dry_P Parameter: Plant Line Value: WS
  misc_feature: MA Experiment 20001555 PARAMETER Experiment Name: At_Drought_Soil_Dry_P Parameter: Post Timepoint (hr) Value: None
  misc_feature: MA Experiment 20001555 PARAMETER Experiment Name: At_Drought_Soil_Dry_P Parameter: Post-Treatment Value: None
  misc_feature: MA Experiment 20001555 PARAMETER Experiment Name: At_Drought_Soil_Dry_P Parameter: Timepoint (day) Value: 10
  misc_feature: MA Experiment 20001555 PARAMETER Experiment Name: At_Drought_Soil_Dry_P Parameter: Treatment Value: Drought vs. No Drought
  misc_feature: MA Experiment ID: 20001558 Result: Down-regulated in Transcription
  misc_feature: MA Experiment 20001558 PARAMETER Experiment Name: At_Drought_Soil_Dry_P Parameter: Age (day) Value: 27
  misc_feature: MA Experiment 20001558 PARAMETER Experiment Name: At_Drought_Soil_Dry_P Parameter: Organism Value: A. thaliana
  misc_feature: MA Experiment 20001558 PARAMETER Experiment Name: At_Drought_Soil_Dry_P Parameter: Plant Line Value: WS
  misc_feature: MA Experiment 20001558 PARAMETER Experiment Name: At_Drought_Soil_Dry_P Parameter: Post Timepoint (hr) Value: 6
  misc_feature: MA Experiment 20001558 PARAMETER Experiment Name: At_Drought_Soil_Dry_P Parameter: Post-Treatment Value: Re-Water vs. No Drought
  misc_feature: MA Experiment 20001558 PARAMETER Experiment Name: At_Drought_Soil_Dry_P Parameter: Timepoint (day) Value: 13
  misc_feature: MA Experiment 20001558 PARAMETER Experiment Name: At_Drought_Soil_Dry_P Parameter: Treatment Value: Drought vs. No Drought
gcaaaaaatggcttccaaggctttgattctgttaggtctcttctcagttcttctcgtcgtctccgaagtgtctgccgcaaggcaatcgggcatggtgaagccagagagtgaggaaactgtgcaacctgaaggttatggcggtggccacggaggacatggtggtcacggagggggaggaggccacggacatggaggacacaacggaggagggggccacggacttgacggatacggaggaggtggaggacactatggaggaggtggaggacactacggaggaggtggaggacactaccggaggaggtggaggacactacggaggaggtggtggaggaggatacggaggtggaggaggacaccacggaggaggaggccacgggctaaacgaacctgttcagactaagccgggtgtttaaaactatataatatcttcactaccatgcatgattgcatatatatatatacgcttatgtattatctatatgcctataaataaaccatggtgagtttgtaacgcagtgccttcagaaatgttcggaataaatttccataatattagt

SEQ ID NO: 20691 - protein, 133 aa, Arabidopsis thaliana
  peptide (1)..(133): Ceres Seq. ID no. 12562294
  misc_feature (40)..(95): Pfam Name: Herpesvirus latent membrane protein 1 (LMP1) Pfam Description: Herpesvirus latent membrane protein 1 (LMP1)
  misc_feature (3)..(97): Homolog of NCBI NO: 1405559 NR Description: GRPF1 [Fagus sylvatica]
  misc_feature (44)..(98): Homolog of NCBI NO: 121644 NR Description: Glycine-rich cell wall structural protein
  misc_feature (44)..(98): Homolog of NCBI NO: 121644 NR Description: Glycine-rich cell wall structural protein
  misc_feature (44)..(98): Homolog of NCBI NO: 33239465 NR Description: RNA-binding protein, RRM domain
  misc_feature (5)..(98): Homolog of NCBI NO: 121644 NR Description: Glycine-rich cell wall structural protein
  misc_feature (3)..(97): Homolog of NCBI NO: 9957568 NR Description: antimicrobial peptide shep-GRP [Capsella
  misc_feature (3)..(97): Homolog of NCBI NO: 15224547 NR Description: putative glycine-rich protein; protein id:
  misc_feature (3)..(98): Homolog of NCBI NO: 30678191 NR Description: glycine-rich protein [Arabidopsis thaliana]
  misc_feature (3)..(98): Homolog of NCBI NO: 21536606 NR Description: putative glycine-rich protein [Arabidopsis
  misc_feature (3)..(98): Homolog of NCBI NO: 15224540 NR Description: putative glycine-rich protein
QKMASKALILLGLFSVLLVVSEVSAARQSGMVKPESEETVQPEGYGGGHGGHGGHGGGGGHGHGGHNGGGGHGLDGYGGGGGHYGGGGGHYGGGGGHYRRRWRTLRRRWWRRIRRWRRTPRRRRPRAKRTCSD

SEQ ID NO: 20692 - protein, 131 aa, Arabidopsis thaliana
  peptide (1)..(131): Ceres Seq. ID no. 12562295
  misc_feature (38)..(93): Pfam Name: Herpesvirus latent membrane protein 1 (LMP1) Pfam Description: Herpesvirus latent membrane protein 1 (LMP1)
  misc_feature (1)..(95): Homolog of NCBI NO: 1405559 NR Description: GRPF1 [Fagus sylvatica]
  misc_feature (42)..(96): Homolog of NCBI NO: 121644 NR Description: Glycine-rich cell wall structural protein
  misc_feature (42)..(96): Homolog of NCBI NO: 121644 NR Description: Glycine-rich cell wall structural protein
  misc_feature (42)..(96): Homolog of NCBI NO: 33239465 NR Description: RNA-binding protein, RRM domain
  misc_feature (3)..(96): Homolog of NCBI NO: 121644 NR Description: Glycine-rich cell wall structural protein
  misc_feature (1)..(95): Homolog of NCBI NO: 9957568 NR Description: antimicrobial peptide shep-GRP [Capsella
  misc_feature (1)..(95): Homolog of NCBI NO: 15224547 NR Description: putative glycine-rich protein; protein id:
  misc_feature (1)..(96): Homolog of NCBI NO: 30678191 NR Description: glycine-rich protein [Arabidopsis thaliana]
  misc_feature (1)..(96): Homolog of NCBI NO: 21536606 NR Description: putative glycine-rich protein [Arabidopsis
  misc_feature (1)..(96): Homolog of NCBI NO: 15224540 NR Description: putative glycine-rich protein
MASKALILLGLFSVLLVVSEVSAARQSGMVKPESEETVQPEGYGGGHGGHGGHGGGGGHGHGGHNGGGGHGLDGYGGGGGHYGGGGGHYGGGGGHYRRRWRTLRRRWWRRIRRWRRTPRRRRPRAKRTCSD

SEQ ID NO: 20693 - protein, 103 aa, Arabidopsis thaliana
  peptide (1)..(103): Ceres Seq. ID no. 12562296
  misc_feature (10)..(65): Pfam Name: Herpesvirus latent membrane protein 1 (LMP1) Pfam Description: Herpesvirus latent membrane protein 1 (LMP1)
  misc_feature (1)..(67): Homolog of NCBI NO: 1405559 NR Description: GRPF1 [Fagus sylvatica]
  misc_feature (14)..(68): Homolog of NCBI NO: 121644 NR Description: Glycine-rich cell wall structural protein
  misc_feature (14)..(68): Homolog of NCBI NO: 121644 NR Description: Glycine-rich cell wall structural protein
  misc_feature (14)..(68): Homolog of NCBI NO: 33239465 NR Description: RNA-binding protein, RRM domain
  misc_feature (1)..(68): Homolog of NCBI NO: 121644 NR Description: Glycine-rich cell wall structural protein
  misc_feature (1)..(67): Homolog of NCBI NO: 9957568 NR Description: antimicrobial peptide shep-GRP [Capsella
  misc_feature (1)..(67): Homolog of NCBI NO: 15224547 NR Description: putative glycine-rich protein; protein id:
  misc_feature (1)..(68): Homolog of NCBI NO: 30678191 NR Description: glycine-rich protein [Arabidopsis thaliana]
  misc_feature (1)..(68): Homolog of NCBI NO: 21536606 NR Description: putative glycine-rich protein [Arabidopsis
  misc_feature (1)..(68): Homolog of NCBI NO: 15224540 NR Description: putative glycine-rich protein
MVKPESEETVQPEGYGGGHGGHGGHGGGGGHGHGGHNGGGGHGLDGYGGGGGHYGGGGGHYGGGGGHYRRRWRTLRRRWWRRIRRWRRTPRRRRPRAKRTCSD

SEQ ID NO: 20694 - protein, 93 aa, Arabidopsis thaliana
  peptide (1)..(93): Ceres Seq. ID no. 12562297
  misc_feature (55)..(82): Homolog of NCBI NO: 33239465 NR Description: RNA-binding protein, RRM domain
  misc_feature (55)..(82): Homolog of NCBI NO: 121644 NR Description: Glycine-rich cell wall structural protein
  misc_feature (55)..(82): Homolog of NCBI NO: 121644 NR Description: Glycine-rich cell wall structural protein
  misc_feature (55)..(82): Homolog of NCBI NO: 121644 NR Description: Glycine-rich cell wall structural protein
  misc_feature (55)..(82): Homolog of NCBI NO: 121644 NR Description: Glycine-rich cell wall structural protein
  misc_feature (55)..(81): Homolog of NCBI NO: 30678191 NR Description: glycine-rich protein [Arabidopsis thaliana]
  misc_feature (55)..(82): Homolog of NCBI NO: 30678191 NR Description: glycine-rich protein [Arabidopsis thaliana]
  misc_feature (56)..(93): Homolog of NCBI NO: 30678191 NR Description: glycine-rich protein [Arabidopsis thaliana]
  misc_feature (55)..(93): Homolog of NCBI NO: 21536606 NR Description: putative glycine-rich protein [Arabidopsis
  misc_feature (55)..(93): Homolog of NCBI NO: 15224540 NR Description: putative glycine-rich protein
MAVATEDMVVTEGEEATDMEDTTEEGATDLTDTEEVEDTMEEVEDTTEEVEDTTGGGGGHYGGGGGGGYGGGGGHHGGGGHGLNEPVQTKPGV

SEQ ID NO: 20695 - DNA, 558 bp, Arabidopsis thaliana
  misc_feature (1)..(558): Ceres Seq. ID no. 13591776
gataactcacactctctcttcaatcctttcctttcattgtagttaaacaaagattacgattatggccacatcagctatccaacaatcctccttcgccggccaaacggctctcaagccctccagcgacctcatccaaaaggtgggcgtcttgggcggtggccgtgtgaccatgcgtcgtaccgtcaagtctactccccaaagcatttggtatggaccagaccgtcccaagtacttgggaccattctcggagaacacaccgtcttacttaactggagaataccccggagactacggttgggacaccgctggactctcggctgacccggagacattcgctaagaaccgtgagcttgaagtaatccacagcagatgggctatgttgggtgctctcggatgcacattccctgagattctctccaagacggtgttaaattcggagaagccggtggttaaggcagctctaaattttctcaaangaggcttgatacctcggaaccctacttgtccacgcgcaaagatctanccattgggctgtcaagttggcctatgggtcattga

SEQ ID NO: 20696 - protein, 165 aa, Arabidopsis thaliana
  peptide (1)..(165): Ceres Seq. ID no. 13591777
  misc_feature (64)..(162): Pfam Name: Chlorophyll A-B binding protein Pfam Description: Chlorophyll A-B binding protein
  misc_feature (1)..(162): Homolog of NCBI NO: 29123378 NR Description: chlorophyll a/b binding protein [Nicotiana
  misc_feature (1)..(120): Homolog of NCBI NO: 16225450 NR Description: putative chlorophyll-A-B-binding protein
  misc_feature (1)..(140): Homolog of NCBI NO: 115811 NR Description: Chlorophyll A-B binding protein 37, chloroplast
  misc_feature (1)..(162): Homolog of NCBI NO: 1345698 NR Description: Chlorophyll A-B binding protein 151, chloroplast
  misc_feature (1)..(120): Homolog of NCBI NO: 3560529 NR Description: light harvesting chlorophyll A/B binding protein
  misc_feature (1)..(162): Homolog of NCBI NO: 15232249 NR Description: light harvesting chlorophyll A/B binding protein,
  misc_feature (1)..(120): Homolog of NCBI NO: 25299022 NR Description: chlorophyll a/b-binding protein Lhcb2
  misc_feature (1)..(120): Homolog of NCBI NO: 25299029 NR Description: chlorophyll a/b-binding protein Lhcb2
  misc_feature (1)..(120): Homolog of NCBI NO: 15224471 NR Description: light-harvesting chlorophyll a/b binding protein
  misc_feature (1)..(120): Homolog of NCBI NO: 15224465 NR Description: light-harvesting chlorophyll a/b binding protein
  misc_feature (139)..(139): Xaa is any aa, unknown or other
  misc_feature (154)..(154): Xaa is any aa, unknown or other
MATSAIQQSSFAGQTALKPSSDLIQKVGVLGGGRVTMRRTVKSTPQSIWYGPDRPKYLGPFSENTPSYLTGEYPGDYGWDTAGLSADPETFAKNRELEVIHSRWAMLGALGCTFPEILSKTVLNSEKPVVKAALNFLKXGLIPRNPTCPRAKIXPLGCQVGLWVI

SEQ ID NO: 20697 - protein, 129 aa, Arabidopsis thaliana
  peptide (1)..(129): Ceres Seq. ID no. 13591778
  misc_feature (28)..(126): Pfam Name: Chlorophyll A-B binding protein Pfam Description: Chlorophyll A-B binding protein
  misc_feature (1)..(126): Homolog of NCBI NO: 29123378 NR Description: chlorophyll a/b binding protein [Nicotiana
  misc_feature (1)..(84): Homolog of NCBI NO: 16225450 NR Description: putative chlorophyll-A-B-binding protein
  misc_feature (1)..(104): Homolog of NCBI NO: 115811 NR Description: Chlorophyll A-B binding protein 37, chloroplast
  misc_feature (1)..(126): Homolog of NCBI NO: 1345698 NR Description: Chlorophyll A-B binding protein 151, chloroplast
  misc_feature (1)..(84): Homolog of NCBI NO: 3560529 NR Description: light harvesting chlorophyll A/B binding protein
  misc_feature (1)..(126): Homolog of NCBI NO: 15232249 NR Description: light harvesting chlorophyll A/B binding protein,
  misc_feature (1)..(84): Homolog of NCBI NO: 25299022 NR Description: chlorophyll a/b-binding protein Lhcb2
  misc_feature (1)..(84): Homolog of NCBI NO: 25299029 NR Description: chlorophyll a/b-binding protein Lhcb2
  misc_feature (1)..(84): Homolog of NCBI NO: 15224471 NR Description: light-harvesting chlorophyll a/b binding protein
  misc_feature (1)..(84): Homolog of NCBI NO: 15224465 NR Description: light-harvesting chlorophyll a/b binding protein
  misc_feature (103)..(103): Xaa is any aa, unknown or other
  misc_feature (118)..(118): Xaa is any aa, unknown or other
MRRTVKSTPQSIWYGPDRPKYLGPFSENTPSYLTGEYPGDYGWDTAGLSADPETFAKNRELEVIHSRWAMLGALGCTFPEILSKTVLNSEKPVVKAALNFLKXGLIPRNPTCPRAKIXPLGCQVGLWVI

SEQ ID NO: 20698 - DNA, 1406 bp, Arabidopsis thaliana
  misc_feature (1)..(1406): Ceres Seq. ID no. 12466401
  misc_feature: MA Experiment ID: 108462 Result: Up-regulated in Transcription
  misc_feature: MA Experiment 108462 PARAMETER Experiment Name: At_Germinating_Seeds_cDNA_P Parameter: Age (day) Value: 2 vs. 0
  misc_feature: MA Experiment 108462 PARAMETER Experiment Name: At_Germinating_Seeds_cDNA_P Parameter: Tissue Value: Germinating Seeds
  misc_feature: MA Experiment ID: 108463 Result: Up-regulated in Transcription
  misc_feature: MA Experiment 108463 PARAMETER Experiment Name: At_Germinating_Seeds_cDNA_P Parameter: Age (day) Value: 3 vs. 0
  misc_feature: MA Experiment 108463 PARAMETER Experiment Name: At_Germinating_Seeds_cDNA_P Parameter: Tissue Value: Germinating Seeds
  misc_feature: MA Experiment ID: 108464 Result: Up-regulated in Transcription
  misc_feature: MA Experiment 108464 PARAMETER Experiment Name: At_Germinating_Seeds_cDNA_P Parameter: Age (day) Value: 4 vs. 0
  misc_feature: MA Experiment 108464 PARAMETER Experiment Name: At_Germinating_Seeds_cDNA_P Parameter: Tissue Value: Germinating Seeds
  misc_feature: MA Experiment ID: 108579 Result: Up-regulated in Transcription
  misc_feature: MA Experiment 108579 PARAMETER Experiment Name: At_4deg_Cold_cDNA_P Parameter: Temperature (deg C) Value: 4 vs. 22
  misc_feature: MA Experiment 108579 PARAMETER Experiment Name: At_4deg_Cold_cDNA_P Parameter: Timepoint (hr) Value: 6
  misc_feature: MA Experiment 108579 PARAMETER Experiment Name: At_4deg_Cold_cDNA_P Parameter: Tissue Value: Aerial
  misc_feature: MA Experiment ID: 20000117 Result: Down-regulated in Transcription
  misc_feature: MA Experiment 20000117 PARAMETER Experiment Name: At_100uM_ABA_Mutants_cDNA_P Parameter: Plant Line Value: Columbia
  misc_feature: MA Experiment 20000117 PARAMETER Experiment Name: At_100uM_ABA_Mutants_cDNA_P Parameter: Timepoint (hr) Value: 6
  misc_feature: MA Experiment 20000117 PARAMETER Experiment Name: At_100uM_ABA_Mutants_cDNA_P Parameter: Tissue Value: Aerial
  misc_feature: MA Experiment 20000117 PARAMETER Experiment Name: At_100uM_ABA_Mutants_cDNA_P Parameter: Treatment Value: 100uM ABA vs. No Treatment
  misc_feature: MA Experiment ID: 20000180 Result: Up-regulated in Transcription
  misc_feature: MA Experiment 20000180 PARAMETER Experiment Name: At_Germinating_Seeds_P Parameter: Age (hr) Value: 24 vs. 0
  misc_feature: MA Experiment 20000180 PARAMETER Experiment Name: At_Germinating_Seeds_P Parameter: Tissue Value: Germinating Seeds
  misc_feature: MA Experiment ID: 20000794 Result: Down-regulated in Transcription
  misc_feature: MA Experiment 20000794 PARAMETER Experiment Name: At_Petals_P Parameter: Age (day) Value: 23-25 days
  misc_feature: MA Experiment 20000794 PARAMETER Experiment Name: At_Petals_P Parameter: Plant Line Value: WS
  misc_feature: MA Experiment 20000794 PARAMETER Experiment Name: At_Petals_P Parameter: Tissue Value: Petals vs. Whole plant
  misc_feature: MA Experiment ID: 20001247 Result: Up-regulated in Transcription
  misc_feature: MA Experiment 20001247 PARAMETER Experiment Name: At_Far-red-induction_P Parameter: Age (day) Value: 7
  misc_feature: MA Experiment 20001247 PARAMETER Experiment Name: At_Far-red-induction_P Parameter: Light Value: Far-red vs. White
  misc_feature: MA Experiment 20001247 PARAMETER Experiment Name: At_Far-red-induction_P Parameter: Organism Value: A. thaliana
  misc_feature: MA Experiment 20001247 PARAMETER Experiment Name: At_Far-red-induction_P Parameter: Plant Line Value: Columbia
  misc_feature: MA Experiment 20001247 PARAMETER Experiment Name: At_Far-red-induction_P Parameter: Timepoint (hr) Value: 1
  misc_feature: MA Experiment 20001247 PARAMETER Experiment Name: At_Far-red-induction_P Parameter: Tissue Value: Whole Plant
  misc_feature: MA Experiment ID: 20001905 Result: Up-regulated in Transcription
  misc_feature: MA Experiment 20001905 PARAMETER Experiment Name: At_Drought_Reproduction_P Parameter: Age (day) Value: 40
  misc_feature: MA Experiment 20001905 PARAMETER Experiment Name: At_Drought_Reproduction_P Parameter: Organism Value: A. thaliana
  misc_feature: MA Experiment 20001905 PARAMETER Experiment Name: At_Drought_Reproduction_P Parameter: Plant Line Value: WS
  misc_feature: MA Experiment 20001905 PARAMETER Experiment Name: At_Drought_Reproduction_P Parameter: Timepoint (day) Value: 10
  misc_feature: MA Experiment 20001905 PARAMETER Experiment Name: At_Drought_Reproduction_P Parameter: Tissue Value: Rosettes
  misc_feature: MA Experiment 20001905 PARAMETER Experiment Name: At_Drought_Reproduction_P Parameter: Treatment Value: Drought vs. No Drought
tttcctcttctcccaccattttcagagctcagagaaaaagaaagaaagaaaaaaagcttcgtgctccttcaccttcccaaatcggaaaacaatgcacgccaaaaccgattccgaggtaacaagcctcgcagcatcatcaccagccagatctccacgtagaccagtctactacgtccaatcaccatcacgcgactctcacgacggagaaaaaacagcaacatcgtttcactcaactccagtactaagtccgatgggatctccaccgcattctcactcatctatgggtcgtcactcacgtgaatcatcttctagtcgattctctggctctttaaagcctggatctagaaaagtcaaccctaacgatggttctaaacggaaaggtcacggcggtgagaaacagtggaaagaatgtgcggttattgaagaagaaggtttgttagatgatggtgatagagacggtggtgttcctcgtcgttgctatgttttggcttttatcgttggattctttattctctttggtttcttctctttgattctctatggtgctgctaaacctatgaaacctaagatcactgtcaagagtataacatttgagacgcttaagatccaagctggtcaagatgctggtggtgtaggaactgatatgatcactatgaacgcgactttgagaatgttgtatcgaaacactggaactttctttggtgttcatgttacttcaactcctattgatctcagcttctctcaaatcaaaatcggttccggatccgttaagaaattttatcagggaaggaagagtgagagaacagtgttggtgcatgtgatcggagagaagattccattatatggaagtggttcgactttacttccaccggctcctccagcaccacttcctaaacccaagaagaagaaaggagctccagtccctattcccgacccgcccgcaccaccagcaccggtaccaatgacgctcagctttgtcgtccgatcacgagcatacgtgttggggaagttagtgcagccaaagttctataagaaaatcgagtgtgacatcaacttcgaacacaagaatcttaataagcatatagtcatcaccaagaattgcaccgtcactacagtttgaaggaaggaacaaaagaaaaagtaacaaactttttagtcggcgcaatacgatgtcgtatagagtaacgtgattttacagctcaacgggcagcattttgggttgttggggcagccacgtggaggtgcccgaagaaaagaagcattgtcggtggctttaatttacttgagtggttcatatttgtctgtggaaaatatataattttataattgtgtgtacgattggactgaaaaacacgaggaatcacattttatttatttgttttttaattcattgatcctttaatatg

SEQ ID NO: 20699 - protein, 372 aa, Arabidopsis thaliana
  peptide (1)..(372): Ceres Seq. ID no. 12466402
  misc_feature (317)..(367): Homolog of NCBI NO: 5777621 NR Description: CAA30379.1 protein [Oryza sativa]
  misc_feature (21)..(287): Homolog of NCBI NO: 5777621 NR Description: CAA30379.1 protein [Oryza sativa]
  misc_feature (59)..(372): Homolog of NCBI NO: 28416677 NR Description: At5g42860 [Arabidopsis thaliana]
  misc_feature (59)..(372): Homolog of NCBI NO: 15239097 NR Description: putative protein; protein id: At5g42860.1
  misc_feature (31)..(372): Homolog of NCBI NO: 18401556 NR Description: expressed protein
  misc_feature (31)..(193): Homolog of NCBI NO: 34898370 NR Description: ESTD24835(R2634) corresponds to a region of the gene.~Similar to Arabidopsis thaliana chromosome II BAC T06D20
  misc_feature (319)..(370): Homolog of NCBI NO: 34904260 NR Description: P0452F10.18 [Oryza sativa (japonica
  misc_feature (39)..(286): Homolog of NCBI NO: 34904260 NR Description: P0452F10.18 [Oryza sativa (japonica
  misc_feature (317)..(367): Homolog of NCBI NO: 38345517 NR Description: OSJNBa0039K24.20 [Oryza sativa (japonica
  misc_feature (31)..(287): Homolog of NCBI NO: 38345517 NR Description: OSJNBa0039K24.20 [Oryza sativa (japonica
FLFSHHFQSSEKKKERKKASCSFTFPNRKTMHAKTDSEVTSLAASSPARSPRRPVYYVQSPSRDSHDGEKTATSFHSTPVLSPMGSPPHSHSSMGRHSRESSSSRFSGSLKPGSRKVNPNDGSKRKGHGGEKQWKECAVIEEEGLLDDGDRDGGVPRRCYVLAFIVGFFILFGFFSLILYGAAKPMKPKITVKSITFETLKIQAGQDAGGVGTDMITMNATLRMLYRNTGTFFGVHVTSTPIDLSFSQIKIGSGSVKKFYQGRKSERTVLVHVIGEKIPLYGSGSTLLPPAPPAPLPKPKKKKGAPVPIPDPPAPPAPVPMTLSFVVRSRAYVLGKLVQPKFYKKIECDINFEHKNLNKHIVITKNCTVTTV

SEQ ID NO: 20700 - protein, 342 aa, Arabidopsis thaliana
  peptide (1)..(342): Ceres Seq. ID no. 12466403
  misc_feature (1)..(163): Homolog of NCBI NO: 34898370 NR Description: ESTD24835(R2634) corresponds to a region of the gene.~Similar to Arabidopsis thaliana chromosome II BAC T06D20
  misc_feature (289)..(340): Homolog of NCBI NO: 34904260 NR Description: P0452F10.18 [Oryza sativa (japonica
  misc_feature (9)..(256): Homolog of NCBI NO: 34904260 NR Description: P0452F10.18 [Oryza sativa (japonica
  misc_feature (287)..(337): Homolog of NCBI NO: 38345517 NR Description: OSJNBa0039K24.20 [Oryza sativa (japonica
  misc_feature (1)..(257): Homolog of NCBI NO: 38345517 NR Description: OSJNBa0039K24.20 [Oryza sativa (japonica
  misc_feature (287)..(337): Homolog of NCBI NO: 5777621 NR Description: CAA30379.1 protein [Oryza sativa]
  misc_feature (1)..(257): Homolog of NCBI NO: 5777621 NR Description: CAA30379.1 protein [Oryza sativa]
  misc_feature (29)..(342): Homolog of NCBI NO: 28416677 NR Description: At5g42860 [Arabidopsis thaliana]
  misc_feature (29)..(342): Homolog of NCBI NO: 15239097 NR Description: putative protein; protein id: At5g42860.1
  misc_feature (1)..(342): Homolog of NCBI NO: 18401556 NR Description: expressed protein
MHAKTDSEVTSLAASSPARSPRRPVYYVQSPSRDSHDGEKTATSFHSTPVLSPMGSPPHSHSSMGRHSRESSSSRFSGSLKPGSRKVNPNDGSKRKGHGGEKQWKECAVIEEEGLLDDGDRDGGVPRRCYVLAFIVGFFILFGFFSLILYGAAKPMKPKITVKSITFETLKIQAGQDAGGVGTDMITMNATLRMLYRNTGTFFGVHVTSTPIDLSFSQIKIGSGSVKKFYQGRKSERTVLVHVIGEKIPLYGSGSTLLPPAPPAPLPKPKKKKGAPVPIPDPPAPPAPVPMTLSFVVRSRAYVLGKLVQPKFYKKIECDINFEHKNLNKHIVITKNCTVTTV

SEQ ID NO: 20701 - protein, 289 aa, Arabidopsis thaliana
  peptide (1)..(289): Ceres Seq. ID no. 12466404
  misc_feature (1)..(110): Homolog of NCBI NO: 34898370 NR Description: ESTD24835(R2634) corresponds to a region of the gene.~Similar to Arabidopsis thaliana chromosome II BAC T06D20
  misc_feature (236)..(287): Homolog of NCBI NO: 34904260 NR Description: P0452F10.18 [Oryza sativa (japonica
  misc_feature (1)..(203): Homolog of NCBI NO: 34904260 NR Description: P0452F10.18 [Oryza sativa (japonica
  misc_feature (234)..(284): Homolog of NCBI NO: 38345517 NR Description: OSJNBa0039K24.20 [Oryza sativa (japonica
  misc_feature (1)..(204): Homolog of NCBI NO: 38345517 NR Description: OSJNBa0039K24.20 [Oryza sativa (japonica
  misc_feature (234)..(284): Homolog of NCBI NO: 5777621 NR Description: CAA30379.1 protein [Oryza sativa]
  misc_feature (1)..(204): Homolog of NCBI NO: 5777621 NR Description: CAA30379.1 protein [Oryza sativa]
  misc_feature (1)..(289): Homolog of NCBI NO: 28416677 NR Description: At5g42860 [Arabidopsis thaliana]
  misc_feature (1)..(289): Homolog of NCBI NO: 15239097 NR Description: putative protein; protein id: At5g42860.1
  misc_feature (1)..(289): Homolog of NCBI NO: 18401556 NR Description: expressed protein
MGSPPHSHSSMGRHSRESSSSRFSGSLKPGSRKVNPNDGSKRKGHGGEKQWKECAVIEEEGLLDDGDRDGGVPRRCYVLAFIVGFFILFGFFSLILYGAAKPMKPKITVKSITFETLKIQAGQDAGGVGTDMITMNATLRMLYRNTGTFFGVHVTSTPIDLSFSQIKIGSGSVKKFYQGRKSERTVLVHVIGEKIPLYGSGSTLLPPAPPAPLPKPKKKKGAPVPIPDPPAPPAPVPMTLSFVVRSRAYVLGKLVQPKFYKKIECDINFEHKNLNKHIVITKNCTVTTV

SEQ ID NO: 20702 - DNA, 663 bp, Arabidopsis thaliana
  misc_feature (1)..(663): Ceres Seq. ID no. 12603572
  misc_feature: MA Experiment ID: 20000171 Result: Up-regulated in Transcription
  misc_feature: MA Experiment 20000171 PARAMETER Experiment Name: At_42deg_Heat_P Parameter: Age (day) Value: 14
  misc_feature: MA Experiment 20000171 PARAMETER Experiment Name: At_42deg_Heat_P Parameter: Organism Value: A. thaliana
  misc_feature: MA Experiment 20000171 PARAMETER Experiment Name: At_42deg_Heat_P Parameter: Plant Line Value: WS
  misc_feature: MA Experiment 20000171 PARAMETER Experiment Name: At_42deg_Heat_P Parameter: Temperature (deg C) Value: 42 vs. 22
  misc_feature: MA Experiment 20000171 PARAMETER Experiment Name: At_42deg_Heat_P Parameter: Timepoint (hr) Value: 1
  misc_feature: MA Experiment 20000171 PARAMETER Experiment Name: At_42deg_Heat_P Parameter: Tissue Value: Aerial
  misc_feature: MA Experiment ID: 20000173 Result: Up-regulated in Transcription
  misc_feature: MA Experiment 20000173 PARAMETER Experiment Name: At_42deg_Heat_P Parameter: Age (day) Value: 14
  misc_feature: MA Experiment 20000173 PARAMETER Experiment Name: At_42deg_Heat_P Parameter: Organism Value: A. thaliana
  misc_feature: MA Experiment 20000173 PARAMETER Experiment Name: At_42deg_Heat_P Parameter: Plant Line Value: WS
  misc_feature: MA Experiment 20000173 PARAMETER Experiment Name: At_42deg_Heat_P Parameter: Temperature (deg C) Value: 42 vs. 22
  misc_feature: MA Experiment 20000173 PARAMETER Experiment Name: At_42deg_Heat_P Parameter: Timepoint (hr) Value: 6
  misc_feature: MA Experiment 20000173 PARAMETER Experiment Name: At_42deg_Heat_P Parameter: Tissue Value: Aerial
  misc_feature: MA Experiment ID: 20000214 Result: Down-regulated in Transcription
  misc_feature: MA Experiment 20000214 PARAMETER Experiment Name: At_4deg_Cold_P Parameter: Timepoint (hr) Value: 6
  misc_feature: MA Experiment ID: 20001450 Result: Up-regulated in Transcription
  misc_feature: MA Experiment 20001450 PARAMETER Experiment Name: At_Far-red-induction_P Parameter: Age (day) Value: 7
  misc_feature: MA Experiment 20001450 PARAMETER Experiment Name: At_Far-red-induction_P Parameter: Light Value: Far-red vs. White
  misc_feature: MA Experiment 20001450 PARAMETER Experiment Name: At_Far-red-induction_P Parameter: Organism Value: A. thaliana
  misc_feature: MA Experiment 20001450 PARAMETER Experiment Name: At_Far-red-induction_P Parameter: Plant Line Value: Columbia
  misc_feature: MA Experiment 20001450 PARAMETER Experiment Name: At_Far-red-induction_P Parameter: Timepoint (hr) Value: 8
  misc_feature: MA Experiment 20001450 PARAMETER Experiment Name: At_Far-red-induction_P Parameter: Tissue Value: Whole Plant
ataccgatttccgaacacaaccctaaagaggcttcttcgacgacgttggttcttcttcctttgtcctgcgccgcgatctctccttctccaacttccctcgtcctgtccaaagaaaatgccaaaggttaaaactaaccgagtcaagtacccagaaggatgggagttgatcgagcctactcttcgagagcttgatgccaagatgagagaagctgagactgattcacatgatggtaagagaaagtgtgaaactttatggccaatcttcaaagtttctcatcagaggagtcggtatgtatatgacctttattaccgaagggaagaaatatctaaagagctctatgaattctgcttggaccagggctatgcagatcgcagtctgattgccaaatggaaaaagtcgggatacgaacgtttatgctgcttgcgctgcatacagccaagagaccacaactatggaacaacatgtgtatgccgtgttcccaaacacttgcgtgaagagaaagtggtcgaatgcgttcactgcggctgtcaaggatgcgcgagtggcgattaaattcaacatagctttattcgctatctctgactgtttgttacaatcttgtcacttgttaaatctggattatgtattattccataaaggctaaaaaccctgactaaaaatct

SEQ ID NO: 20703 - protein, 183 aa, Arabidopsis thaliana
  peptide (1)..(183): Ceres Seq. ID no. 12603573
  misc_feature (39)..(181): Pfam Name: G10 protein Pfam Description: G10 protein
  misc_feature (39)..(180): Homolog of NCBI NO: 17737310 NR Description: lethal (1) 10Bb CG1639-PA
  misc_feature (39)..(180): Homolog of NCBI NO: 32171175 NR Description: maternal G10 transcript [Homo sapiens]
  misc_feature (39)..(180): Homolog of NCBI NO: 120625 NR Description: G10 PROTEIN
  misc_feature (39)..(180): Homolog of NCBI NO: 31207407 NR Description: ENSANGP00000020650 [Anopheles gambiae]
  misc_feature (40)..(180): Homolog of NCBI NO: 15128111 NR Description: G10-like protein [Branchiostoma belcheri]
  misc_feature (39)..(180): Homolog of NCBI NO: 15029378 NR Description: G10 protein [Branchiostoma belcheri]
  misc_feature (39)..(182): Homolog of NCBI NO: 544359 NR Description: G10 PROTEIN HOMOLOG
  misc_feature (39)..(182): Homolog of NCBI NO: 5852181 NR Description: zhb0011.1 [Oryza sativa (indica cultivar-group)]
  misc_feature (39)..(183): Homolog of NCBI NO: 34908438 NR Description: putative G10 protein [Oryza sativa (japonica
  misc_feature (39)..(183): Homolog of NCBI NO: 15233517 NR Description: G10 - like protein
YRFPNTTLKRLLRRRWFFFLCPAPRSLLLQLPSSCPKKMPKVKTNRVKYPEGWELIEPTLRELDAKMREAETDSHDGKRKCETLWPIFKVSHQRSRYVYDLYYRREEISKELYEFCLDQGYADRSLIAKWKKSGYERLCCLRCIQPRDHNYGTTCVCRVPKHLREEKVVECVHCGCQGCASGD

SEQ ID NO: 20704 - protein, 145 aa, Arabidopsis thaliana
  peptide (1)..(145): Ceres Seq. ID no. 12603574
  misc_feature (1)..(143): Pfam Name: G10 protein Pfam Description: G10 protein
  misc_feature (1)..(142): Homolog of NCBI NO: 17737310 NR Description: lethal (1) 10Bb CG1639-PA
  misc_feature (1)..(142): Homolog of NCBI NO: 32171175 NR Description: maternal G10 transcript [Homo sapiens]
  misc_feature (1)..(142): Homolog of NCBI NO: 120625 NR Description: G10 PROTEIN
  misc_feature (1)..(142): Homolog of NCBI NO: 31207407 NR Description: ENSANGP00000020650 [Anopheles gambiae]
  misc_feature (2)..(142): Homolog of NCBI NO: 15128111 NR Description: G10-like protein [Branchiostoma belcheri]
  misc_feature (1)..(142): Homolog of NCBI NO: 15029378 NR Description: G10 protein [Branchiostoma belcheri]
  misc_feature (1)..(144): Homolog of NCBI NO: 544359 NR Description: G10 PROTEIN HOMOLOG
  misc_feature (1)..(144): Homolog of NCBI NO: 5852181 NR Description: zhb0011.1 [Oryza sativa (indica cultivar-group)]
  misc_feature (1)..(145): Homolog of NCBI NO: 34908438 NR Description: putative G10 protein [Oryza sativa (japonica
  misc_feature (1)..(145): Homolog of NCBI NO: 15233517 NR Description: G10 - like protein
MPKVKTNRVKYPEGWELIEPTLRELDAKMREAETDSHDGKRKCETLWPIFKVSHQRSRYVYDLYYRREEISKELYEFCLDQGYADRSLIAKWKKSGYERLCCLRCIQPRDHNYGTTCVCRVPKHLREEKVVECVHCGCQGCASGD

SEQ ID NO: 20705 - protein, 117 aa, Arabidopsis thaliana
  peptide (1)..(117): Ceres Seq. ID no. 12603575
  misc_feature (1)..(115): Pfam Name: G10 protein Pfam Description: G10 protein
  misc_feature (1)..(114): Homolog of NCBI NO: 17737310 NR Description: lethal (1) 10Bb CG1639-PA
  misc_feature (1)..(114): Homolog of NCBI NO: 32171175 NR Description: maternal G10 transcript [Homo sapiens]
  misc_feature (1)..(114): Homolog of NCBI NO: 120625 NR Description: G10 PROTEIN
  misc_feature (1)..(114): Homolog of NCBI NO: 31207407 NR Description: ENSANGP00000020650 [Anopheles gambiae]
  misc_feature (1)..(114): Homolog of NCBI NO: 15128111 NR Description: G10-like protein [Branchiostoma belcheri]
  misc_feature (1)..(114): Homolog of NCBI NO: 15029378 NR Description: G10 protein [Branchiostoma belcheri]
  misc_feature (1)..(116): Homolog of NCBI NO: 544359 NR Description: G10 PROTEIN HOMOLOG
  misc_feature (1)..(116): Homolog of NCBI NO: 5852181 NR Description: zhb0011.1 [Oryza sativa (indica cultivar-group)]
  misc_feature (1)..(117): Homolog of NCBI NO: 34908438 NR Description: putative G10 protein [Oryza sativa (japonica
  misc_feature (1)..(117): Homolog of NCBI NO: 15233517 NR Description: G10 - like protein
MREAETDSHDGKRKCETLWPIFKVSHQRSRYVYDLYYRREEISKELYEFCLDQGYADRSLIAKWKKSGYERLCCLRCIQPRDHNYGTTCVCRVPKHLREEKVVECVHCGCQGCASGD

SEQ ID NO: 20706 - DNA, 1066 bp, Arabidopsis thaliana
  misc_feature (1)..(1066): Ceres Seq. ID no. 13645959
  misc_feature: MA Experiment ID: 20000171 Result: Down-regulated in Transcription
  misc_feature: MA Experiment 20000171 PARAMETER Experiment Name: At_42deg_Heat_P Parameter: Age (day) Value: 14
  misc_feature: MA Experiment 20000171 PARAMETER Experiment Name: At_42deg_Heat_P Parameter: Organism Value: A. thaliana
  misc_feature: MA Experiment 20000171 PARAMETER Experiment Name: At_42deg_Heat_P Parameter: Plant Line Value: WS
  misc_feature: MA Experiment 20000171 PARAMETER Experiment Name: At_42deg_Heat_P Parameter: Temperature (deg C) Value: 42 vs. 22
  misc_feature: MA Experiment 20000171 PARAMETER Experiment Name: At_42deg_Heat_P Parameter: Timepoint (hr) Value: 1
  misc_feature: MA Experiment 20000171 PARAMETER Experiment Name: At_42deg_Heat_P Parameter: Tissue Value: Aerial
  misc_feature: MA Experiment ID: 20000573 Result: Up-regulated in Transcription
  misc_feature: MA Experiment 20000573 PARAMETER Experiment Name: At_100uM_ABA_Mutants__P Parameter: Organism Value: A. thaliana
  misc_feature: MA Experiment 20000573 PARAMETER Experiment Name: At_100uM_ABA_Mutants__P Parameter: Plant Line Value: CS22 vs. Ler wt
  misc_feature: MA Experiment 20000573 PARAMETER Experiment Name: At_100uM_ABA_Mutants__P Parameter: Timepoint (hr) Value: N/A
  misc_feature: MA Experiment 20000573 PARAMETER Experiment Name: At_100uM_ABA_Mutants__P Parameter: Tissue Value: Whole Plant
  misc_feature: MA Experiment 20000573 PARAMETER Experiment Name: At_100uM_ABA_Mutants__P Parameter: Treatment Value: None
  misc_feature: MA Experiment ID: 20000574 Result: Up-regulated in Transcription
  misc_feature: MA Experiment 20000574 PARAMETER Experiment Name: At_100uM_ABA_Mutants__P Parameter: Organism Value: A. thaliana
  misc_feature: MA Experiment 20000574 PARAMETER Experiment Name: At_100uM_ABA_Mutants__P Parameter: Plant Line Value: CS23 vs. Ler wt
  misc_feature: MA Experiment 20000574 PARAMETER Experiment Name: At_100uM_ABA_Mutants__P Parameter: Timepoint (hr) Value: N/A
  misc_feature: MA Experiment 20000574 PARAMETER Experiment Name: At_100uM_ABA_Mutants__P Parameter: Tissue Value: Whole Plant
  misc_feature: MA Experiment 20000574 PARAMETER Experiment Name: At_100uM_ABA_Mutants__P Parameter: Treatment Value: None
gatttttcgatttgagcacgacgattcactaatttcgttcttgtttccattttgaaaatttgatgaagaagaaatggacaatcacaatgaagaaccaaacatcgcaccagaacctaatcgttggtacaacattacgttaggaccatctctactcaacaacaatcactcatactctcccaaattctgcactttacgatatgagtttaaacctgcttcaattgacagtactaaaccaggattgttacataagagtaaagacaataaggttacgttagagtttcaaaacaatcaacttaataaacccaaagttagatttgatggtgttagtgaggattacaatgacagagataaagatgcagttctcttctttgatggcgaaaatttccgattggagaagcttcaccgctctgttaagcgtttgaaatatttacgtgttcctgatgaatctgcttcagctagtagagtagtatcaaaggttgttcctccagttgcaaacacagttaaaccggttaagatggcacaaattgatattaacaatcctgttgactttgaggaggatgtgaacattgatgatgatggtgaagatgacaatgatggacaagaatcagtaaaagaagaaactttattgagaaaggaatttcaaacgggtggtcttgacattgacattaaccttccgcatcctgctgaaatggaagatgatgagattgcagttgtagacattaatgatgacgaatcttacagaggtcttaacgcggcagaagcactcagagcgcaagtaaatgcagaagcgagagaggagtctcgaaagagttcgagttcaggcagcggaagagaaagtgagagcagtgaaagtggagttgagagtagtggtagcggaagtagtagtagcagtgaaagcagaaacagaggtagtgaaggtggaaccgctagcgagagcggaagccgagatagtctctaggtcagcagctatgtatgtattttctagtttttgtcctgttaatgttaagtcttcttgtgaacaacatagtgaaaaatacagagatatagtaaaaatgttaactacctc

SEQ ID NO: 20707 - protein, 294 aa, Arabidopsis thaliana
  peptide (1)..(294): Ceres Seq. ID no. 13645960
  misc_feature (105)..(287): Homolog of NCBI NO: 18409756 NR Description: expressed protein [Arabidopsis thaliana]
  misc_feature (140)..(292): Homolog of NCBI NO: 34914534 NR Description: OSJNBa0094H06.13 [Oryza sativa (japonica
  misc_feature (1)..(293): Homolog of NCBI NO: 18409756 NR Description: expressed protein [Arabidopsis thaliana]
  misc_feature (7)..(292): Homolog of NCBI NO: 34914534 NR Description: OSJNBa0094H06.13 [Oryza sativa (japonica
  misc_feature (1)..(294): Homolog of NCBI NO: 15240826 NR Description: hypothetical protein [Arabidopsis thaliana]
MDNHNEEPNIAPEPNRWYNITLGPSLLNNNHSYSPKFCTLRYEFKPASIDSTKPGLLHKSKDNKVTLEFQNNQLNKPKVRFDGVSEDYNDRDKDAVLFFDGENFRLEKLHRSVKRLKYLRVPDESASASRVVSKVVPPVANTVKPVKMAQIDINNPVDFEEDVNIDDDGEDDNDGQESVKEETLLRKEFQTGGLDIDINLPHPAEMEDDEIAVVDINDDESYRGLNAAEALRAQVNAEAREESRKSSSSGSGRESESSESGVESSGSGSSSSSESRNRGSEGGTASESGSRDSL

SEQ ID NO: 20708 - protein, 147 aa, Arabidopsis thaliana
  peptide (1)..(147): Ceres Seq. ID no. 13645961
  misc_feature (1)..(140): Homolog of NCBI NO: 18409756 NR Description: expressed protein [Arabidopsis thaliana]
  misc_feature (1)..(145): Homolog of NCBI NO: 34914534 NR Description: OSJNBa0094H06.13 [Oryza sativa (japonica
  misc_feature (1)..(146): Homolog of NCBI NO: 18409756 NR Description: expressed protein [Arabidopsis thaliana]
  misc_feature (1)..(145): Homolog of NCBI NO: 34914534 NR Description: OSJNBa0094H06.13 [Oryza sativa (japonica
  misc_feature (1)..(147): Homolog of NCBI NO: 15240826 NR Description: hypothetical protein [Arabidopsis thaliana]
MAQIDINNPVDFEEDVNIDDDGEDDNDGQESVKEETLLRKEFQTGGLDIDINLPHPAEMEDDEIAVVDINDDESYRGLNAAEALRAQVNAEAREESRKSSSSGSGRESESSESGVESSGSGSSSSSESRNRGSEGGTASESGSRDSL

SEQ ID NO: 20709 - DNA, 1573 bp, Arabidopsis thaliana
  misc_feature (1)..(1573): Ceres Seq. ID no. 13592852
tcttcttcttcctcttcccctaacattccattccccgtatgggtctcaccacttcctaactcttctctctctcttatctcttcttgttttagctatgaagaagcaatctcaattcagatccagtcacacacttctcttctttcttctctgatcatcaacaacaacgattcgggttctgtaattttactaattggagagaaaatggcgatgttagttgagccaccaaatgggattaagcaacaagggaaacattactactctatgtggcaaacattgttcgaaatcgatactaagtatgttccgattaaacccattggaagaggagcttatggtgtggtttgttcttctatcaatcgtgagactaatgagagagttgctattaaaaagattcacaatgtgtttgagaatcgtgttgatgctttgagaacgttgagggaacttaagcttcttaggcatgtgaggcatgagaatgtgatcgcgcttaaagatgttatgttgcctgctaatagatccagtttcaaggatgtttatttggtttatgagctaatggatactgatcttcatcagattattaaatcctctcagtctctttctgatgatcactgcaagtacttcttgtttcagttgcttagaggattgaagtatcttcactctgcaaacatacttcaccgggatttgaagcccgggaacctcttagttaacgcgaattgcgatctcaagatttgtgatttcgggttagcgagaacgagccaaggtaatgaacagttcatgactgagtatgtggttacacgttggtacagagcacctgagcttcttctttgttgtgataactatggaacctccattgatgtatggtcggttggttgcatattcgcggagattcttggtaggaaaccgatttttccaggaacagaatgcttgaatcagcttaagctaatcatcaacgttgttggtagccaacaagaatctgatattcggttcatagacaacccgaaagctcgaaggtttataaagtctcttccttactcaagaggaactcatctctccaatctttatccacaagccaatcctctagctatagatttgttacagaggatgcttgtgtttgatccaaccaagagaatctctgtaaccgatgcactcttacacccgtacatggcggggttgtttgatcctggatccaatccgcctgcacatgtcccaatctctttggacatagatgaaaacatggaggaaccaatgatcagagagatgatgtggaatgagatgctttattaccaccctgaagctgaaatctcaaacgcctaaatcatcatcaatgatcatcaagagtaagctttttccagttttttttgttttgctttctaaaatgcagcttcgatgttatgttatatatagcgagtccacaaacgcgggaacagatcgattaaaaccccggtgctttgatctcgtctggtttgatttagttgcagtgagtgagtagtagtaacagagtttgaaaagtggctctcagtatctttaccactttgtaaatgtggctgtttgttactaagttaaggcttgtttttgttac

SEQ ID NO: 20710 - protein, 435 aa, Arabidopsis thaliana
  peptide (1)..(435): Ceres Seq. ID no. 15221173
  misc_feature (99)..(386): Pfam Name: Protein kinase domain Pfam Description: Protein kinase domain
  misc_feature (68)..(434): Homolog of NCBI NO: 15218451 NR Description: mitogen-activated protein kinase (MAPK), putative
  misc_feature (68)..(429): Homolog of NCBI NO: 11869994 NR Description: MAP kinase 2 [Oryza sativa]
  misc_feature (68)..(435): Homolog of NCBI NO: 8132347 NR Description: MAP kinase PsMAPK2 [Pisum sativum]
  misc_feature (68)..(429): Homolog of NCBI NO: 7341300 NR Description: MAP kinase MAPK2 [Oryza sativa]
  misc_feature (68)..(430): Homolog of NCBI NO: 2499614 NR Description: MITOGEN-ACTIVATED PROTEIN KINASE HOMOLOG NTF3
  misc_feature (68)..(433): Homolog of NCBI NO: 2499612 NR Description: MITOGEN-ACTIVATED PROTEIN KINASE HOMOLOG 1
  misc_feature (68)..(430): Homolog of NCBI NO: 15234397 NR Description: mitogen-activated protein kinase (MAPK), putative
  misc_feature (68)..(435): Homolog of NCBI NO: 4887127 NR Description: putative mitogen-activated protein kinase MAPK
  misc_feature (68)..(435): Homolog of NCBI NO: 629548 NR Description: mitogen-activated protein kinase 7 (EC 2.7.1.-) -
  misc_feature (68)..(435): Homolog of NCBI NO: 15224120 NR Description: mitogen-activated protein kinase (MAPK), putative
SSSSSSPNIPFPVWVSPLPNSSLSLISSCFSYEEAISIQIQSHTSLLSSLIINNNDSGSVILLIGEKMAMLVEPPNGIKQQGKHYYSMWQTLFEIDTKYVPIKPIGRGAYGVVCSSINRETNERVAIKKIHNVFENRVDALRTLRELKLLRHVRHENVIALKDVMLPANRSSFKDVYLVYELMDTDLHQIIKSSQSLSDDHCKYFLFQLLRGLKYLHSANILHRDLKPGNLLVNANCDLKICDFGLARTSQGNEQFMTEYVVTRWYRAPELLLCCDNYGTSIDVWSVGCIFAEILGRKPIFPGTECLNQLKLIINVVGSQQESDIRFIDNPKARRFIKSLPYSRGTHLSNLYPQANPLAIDLLQRMLVFDPTKRISVTDALLHPYMAGLFDPGSNPPAHVPISLDIDENMEEPMIREMMWNEMLYYHPEAEISNA

SEQ ID NO: 20711 - protein, 368 aa, Arabidopsis thaliana
  peptide (1)..(368): Ceres Seq. ID no. 15221174
  misc_feature (32)..(319): Pfam Name: Protein kinase domain Pfam Description: Protein kinase domain
  misc_feature (1)..(368): Homolog of NCBI NO: 4887127 NR Description: putative mitogen-activated protein kinase MAPK
  misc_feature (1)..(368): Homolog of NCBI NO: 629548 NR Description: mitogen-activated protein kinase 7 (EC 2.7.1.-) -
  misc_feature (1)..(362): Homolog of NCBI NO: 11869994 NR Description: MAP kinase 2 [Oryza sativa]
  misc_feature (1)..(362): Homolog of NCBI NO: 7341300 NR Description: MAP kinase MAPK2 [Oryza sativa]
  misc_feature (1)..(366): Homolog of NCBI NO: 2499612 NR Description: MITOGEN-ACTIVATED PROTEIN KINASE HOMOLOG 1
  misc_feature (1)..(363): Homolog of NCBI NO: 15234397 NR Description: mitogen-activated protein kinase (MAPK), putative
  misc_feature (1)..(363): Homolog of NCBI NO: 2499614 NR Description: MITOGEN-ACTIVATED PROTEIN KINASE HOMOLOG NTF3
  misc_feature (1)..(368): Homolog of NCBI NO: 8132347 NR Description: MAP kinase PsMAPK2 [Pisum sativum]
  misc_feature (1)..(367): Homolog of NCBI NO: 15218451 NR Description: mitogen-activated protein kinase (MAPK), putative
  misc_feature (1)..(368): Homolog of NCBI NO: 15224120 NR Description: mitogen-activated protein kinase (MAPK), putative
MAMLVEPPNGIKQQGKHYYSMWQTLFEIDTKYVPIKPIGRGAYGVVCSSINRETNERVAIKKIHNVFENRVDALRTLRELKLLRHVRHENVIALKDVMLPANRSSFKDVYLVYELMDTDLHQIIKSSQSLSDDHCKYFLFQLLRGLKYLHSANILHRDLKPGNLLVNANCDLKICDFGLARTSQGNEQFMTEYVVTRWYRAPELLLCCDNYGTSIDVWSVGCIFAEILGRKPIFPGTECLNQLKLIINVVGSQQESDIRFIDNPKARRFIKSLPYSRGTHLSNLYPQANPLAIDLLQRMLVFDPTKRISVTDALLHPYMAGLFDPGSNPPAHVPISLDIDENMEEPMIREMMWNEMLYYHPEAEISNA

SEQ ID NO: 20712 - protein, 366 aa, Arabidopsis thaliana
  peptide (1)..(366): Ceres Seq. ID no. 15221175
  misc_feature (30)..(317): Pfam Name: Protein kinase domain Pfam Description: Protein kinase domain
  misc_feature (1)..(365): Homolog of NCBI NO: 15218451 NR Description: mitogen-activated protein kinase (MAPK), putative
  misc_feature (1)..(360): Homolog of NCBI NO: 11869994 NR Description: MAP kinase 2 [Oryza sativa]
  misc_feature (1)..(366): Homolog of NCBI NO: 8132347 NR Description: MAP kinase PsMAPK2 [Pisum sativum]
  misc_feature (1)..(360): Homolog of NCBI NO: 7341300 NR Description: MAP kinase MAPK2 [Oryza sativa]
  misc_feature (1)..(361): Homolog of NCBI NO: 2499614 NR Description: MITOGEN-ACTIVATED PROTEIN KINASE HOMOLOG NTF3
  misc_feature (1)..(364): Homolog of NCBI NO: 2499612 NR Description: MITOGEN-ACTIVATED PROTEIN KINASE HOMOLOG 1
  misc_feature (1)..(361): Homolog of NCBI NO: 15234397 NR Description: mitogen-activated protein kinase (MAPK), putative
  misc_feature (1)..(366): Homolog of NCBI NO: 4887127 NR Description: putative mitogen-activated protein kinase MAPK
  misc_feature (1)..(366): Homolog of NCBI NO: 629548 NR Description: mitogen-activated protein kinase 7 (EC 2.7.1.-) -
  misc_feature (1)..(366): Homolog of NCBI NO: 15224120 NR Description: mitogen-activated protein kinase (MAPK), putative
MLVEPPNGIKQQGKHYYSMWQTLFEIDTKYVPIKPIGRGAYGVVCSSINRETNERVAIKKIHNVFENRVDALRTLRELKLLRHVRHENVIALKDVMLPANRSSFKDVYLVYELMDTDLHQIIKSSQSLSDDHCKYFLFQLLRGLKYLHSANILHRDLKPGNLLVNANCDLKICDFGLARTSQGNEQFMTEYVVTRWYRAPELLLCCDNYGTSIDVWSVGCIFAEILGRKPIFPGTECLNQLKLIINVVGSQQESDIRFIDNPKARRFIKSLPYSRGTHLSNLYPQANPLAIDLLQRMLVFDPTKRISVTDALLHPYMAGLFDPGSNPPAHVPISLDIDENMEEPMIREMMWNEMLYYHPEAEISNA

SEQ ID NO: 20713 - DNA, 615 bp, Arabidopsis thaliana
  misc_feature (1)..(615): Ceres Seq. ID no. 13496874
  misc_feature: MA Experiment ID: 108434 Result: Down-regulated in Transcription
  misc_feature: MA Experiment 108434 PARAMETER Experiment Name: At_Root_Tips_cDNA_P Parameter: Tissue Value: Root Tips
  misc_feature: MA Experiment ID: 108461 Result: Up-regulated in Transcription
  misc_feature: MA Experiment 108461 PARAMETER Experiment Name: At_Germinating_Seeds_cDNA_P Parameter: Age (day) Value: 1 vs. 0
  misc_feature: MA Experiment 108461 PARAMETER Experiment Name: At_Germinating_Seeds_cDNA_P Parameter: Tissue Value: Germinating Seeds
  misc_feature: MA Experiment ID: 108462 Result: Up-regulated in Transcription
  misc_feature: MA Experiment 108462 PARAMETER Experiment Name: At_Germinating_Seeds_cDNA_P Parameter: Age (day) Value: 2 vs. 0
  misc_feature: MA Experiment 108462 PARAMETER Experiment Name: At_Germinating_Seeds_cDNA_P Parameter: Tissue Value: Germinating Seeds
  misc_feature: MA Experiment ID: 108463 Result: Up-regulated in Transcription
  misc_feature: MA Experiment 108463 PARAMETER Experiment Name: At_Germinating_Seeds_cDNA_P Parameter: Age (day) Value: 3 vs. 0
  misc_feature: MA Experiment 108463 PARAMETER Experiment Name: At_Germinating_Seeds_cDNA_P Parameter: Tissue Value: Germinating Seeds
  misc_feature: MA Experiment ID: 108464 Result: Up-regulated in Transcription
  misc_feature: MA Experiment 108464 PARAMETER Experiment Name: At_Germinating_Seeds_cDNA_P Parameter: Age (day) Value: 4 vs. 0
  misc_feature: MA Experiment 108464 PARAMETER Experiment Name: At_Germinating_Seeds_cDNA_P Parameter: Tissue Value: Germinating Seeds
  misc_feature: MA Experiment ID: 108473 Result: Up-regulated in Transcription
  misc_feature: MA Experiment 108473 PARAMETER Experiment Name: At_Drought_Flowers_cDNA_P Parameter: Timepoint (hr) Value: 7 d
  misc_feature: MA Experiment 108473 PARAMETER Experiment Name: At_Drought_Flowers_cDNA_P Parameter: Tissue Value: Flower
  misc_feature: MA Experiment 108473 PARAMETER Experiment Name: At_Drought_Flowers_cDNA_P Parameter: Treatment Value: Drought vs. No Drought
  misc_feature: MA Experiment ID: 108474 Result: Up-regulated in Transcription
  misc_feature: MA Experiment 108474 PARAMETER Experiment Name: At_Drought_Flowers_cDNA_P Parameter: Timepoint (hr) Value: null
  misc_feature: MA Experiment 108474 PARAMETER Experiment Name: At_Drought_Flowers_cDNA_P Parameter: Treatment Value: Drought vs. No Drought
  misc_feature: MA Experiment ID: 108501 Result: Down-regulated in Transcription
  misc_feature: MA Experiment 108501 PARAMETER Experiment Name: At_ap2_floral_buds_cDNA_P Parameter: Plant Line Value: ap2 (Ler.)
  misc_feature: MA Experiment 108501 PARAMETER Experiment Name: At_ap2_floral_buds_cDNA_P Parameter: Tissue Value: Closed Flower
  misc_feature: MA Experiment ID: 108594 Result: Down-regulated in Transcription
  misc_feature: MA Experiment 108594 PARAMETER Experiment Name: At_Ler-rhl_Root_cDNA_P Parameter: Plant Line Value: null
  misc_feature: MA Experiment ID: 108668 Result: Up-regulated in Transcription
  misc_feature: MA Experiment 108668 PARAMETER Experiment Name: At_2mM_SA_cDNA_P Parameter: Plant Line Value: WS
  misc_feature: MA Experiment 108668 PARAMETER Experiment Name: At_2mM_SA_cDNA_P Parameter: Timepoint (hr) Value: 6
  misc_feature: MA Experiment 108668 PARAMETER Experiment Name: At_2mM_SA_cDNA_P Parameter: Treatment Value: 2mM SA vs. No Treatment
  misc_feature: MA Experiment ID: 20000030 Result: Up-regulated in Transcription
  misc_feature: MA Experiment 20000030 PARAMETER Experiment Name: At_CS6630_Roots_cDNA_P Parameter: Plant Line Value: CS6630 vs. WS
  misc_feature: MA Experiment 20000030 PARAMETER Experiment Name: At_CS6630_Roots_cDNA_P Parameter: Tissue Value: Roots
  misc_feature: MA Experiment ID: 20000088 Result: Up-regulated in Transcription
  misc_feature: MA Experiment 20000088 PARAMETER Experiment Name: At_100uM_ABA_Mutants_cDNA_P Parameter: Plant Line Value: Landsberg
  misc_feature: MA Experiment 20000088 PARAMETER Experiment Name: At_100uM_ABA_Mutants_cDNA_P Parameter: Timepoint (hr) Value: 6
  misc_feature: MA Experiment 20000088 PARAMETER Experiment Name: At_100uM_ABA_Mutants_cDNA_P Parameter: Tissue Value: Aerial
  misc_feature: MA Experiment 20000088 PARAMETER Experiment Name: At_100uM_ABA_Mutants_cDNA_P Parameter: Treatment Value: 100uM ABA vs. No Treatment
  misc_feature: MA Experiment ID: 20000089 Result: Up-regulated in Transcription
  misc_feature: MA Experiment ID: 20000117 Result: Up-regulated in Transcription
  misc_feature: MA Experiment 20000117 PARAMETER Experiment Name: At_100uM_ABA_Mutants_cDNA_P Parameter: Plant Line Value: Columbia
  misc_feature: MA Experiment 20000117 PARAMETER Experiment Name: At_100uM_ABA_Mutants_cDNA_P Parameter: Timepoint (hr) Value: 6
  misc_feature: MA Experiment 20000117 PARAMETER Experiment Name: At_100uM_ABA_Mutants_cDNA_P Parameter: Tissue Value: Aerial
  misc_feature: MA Experiment 20000117 PARAMETER Experiment Name: At_100uM_ABA_Mutants_cDNA_P Parameter: Treatment Value: 100uM ABA vs. No Treatment
  misc_feature: MA Experiment ID: 20000169 Result: Down-regulated in Transcription
  misc_feature: MA Experiment 20000169 PARAMETER Experiment Name: At_100uM_ABA_P Parameter: Age (day) Value: 14
  misc_feature: MA Experiment 20000169 PARAMETER Experiment Name: At_100uM_ABA_P Parameter: Organism Value: A. thaliana
  misc_feature: MA Experiment 20000169 PARAMETER Experiment Name: At_100uM_ABA_P Parameter: Plant Line Value: WS
  misc_feature: MA Experiment 20000169 PARAMETER Experiment Name: At_100uM_ABA_P Parameter: Timepoint (hr) Value: 6
  misc_feature: MA Experiment 20000169 PARAMETER Experiment Name: At_100uM_ABA_P Parameter: Tissue Value: Aerial
  misc_feature: MA Experiment 20000169 PARAMETER Experiment Name: At_100uM_ABA_P Parameter: Treatment Value: 100uM ABA vs. No Treatment
  misc_feature: MA Experiment ID: 20000182 Result: Up-regulated in Transcription
  misc_feature: MA Experiment 20000182 PARAMETER Experiment Name: At_2mM_SA_P Parameter: Age (day) Value: 14
  misc_feature: MA Experiment 20000182 PARAMETER Experiment Name: At_2mM_SA_P Parameter: Organism Value: A. thaliana
  misc_feature: MA Experiment 20000182 PARAMETER Experiment Name: At_2mM_SA_P Parameter: Plant Line Value: WS
  misc_feature: MA Experiment 20000182 PARAMETER Experiment Name: At_2mM_SA_P Parameter: Timepoint (hr) Value: 6
  misc_feature: MA Experiment 20000182 PARAMETER Experiment Name: At_2mM_SA_P Parameter: Tissue Value: Aerial
  misc_feature: MA Experiment 20000182 PARAMETER Experiment Name: At_2mM_SA_P Parameter: Treatment Value: 2mM SA vs. No Treatment
  misc_feature: MA Experiment ID: 20000185 Result: Down-regulated in Transcription
  misc_feature: MA Experiment 20000185 PARAMETER Experiment Name: At_Roots__P Parameter: Age (day) Value: 7 vs. 21
  misc_feature: MA Experiment 20000185 PARAMETER Experiment Name: At_Roots__P Parameter: Organism Value: A. thaliana
  misc_feature: MA Experiment 20000185 PARAMETER Experiment Name: At_Roots__P Parameter: Tissue Value: Roots vs. Whole Plant
  misc_feature: MA Experiment ID: 20000234 Result: Down-regulated in Transcription
  misc_feature: MA Experiment 20000234 PARAMETER Experiment Name: At_Siliques_P Parameter: Age (day) Value: 21
  misc_feature: MA Experiment 20000234 PARAMETER Experiment Name: At_Siliques_P Parameter: Organism Value: A. thaliana
  misc_feature: MA Experiment 20000234 PARAMETER Experiment Name: At_Siliques_P Parameter: Plant Line Value: WS
  misc_feature: MA Experiment 20000234 PARAMETER Experiment Name: At_Siliques_P Parameter: Tissue Value: Less Than 5mm Siliques vs. Whole Plant
  misc_feature: MA Experiment ID: 20000235 Result: Down-regulated in Transcription
  misc_feature: MA Experiment 20000235 PARAMETER Experiment Name: At_Siliques_P Parameter: Age (day) Value: 21
  misc_feature: MA Experiment 20000235 PARAMETER Experiment Name: At_Siliques_P Parameter: Organism Value: A. thaliana
  misc_feature: MA Experiment 20000235 PARAMETER Experiment Name: At_Siliques_P Parameter: Plant Line Value: WS
  misc_feature: MA Experiment 20000235 PARAMETER Experiment Name: At_Siliques_P Parameter: Tissue Value: 5-10mm Siliques vs. Whole Plant
  misc_feature: MA Experiment ID: 20000264 Result: Down-regulated in Transcription
  misc_feature: MA Experiment 20000264 PARAMETER Experiment Name: At_Open_Flower_P Parameter: Age (day) Value: 21
  misc_feature: MA Experiment 20000264 PARAMETER Experiment Name: At_Open_Flower_P Parameter: Plant Line Value: WS
  misc_feature: MA Experiment 20000264 PARAMETER Experiment Name: At_Open_Flower_P Parameter: Tissue Value: Open Flower vs. Whole Plant
  misc_feature: MA Experiment ID: 20000265 Result: Down-regulated in Transcription
  misc_feature: MA Experiment 20000265 PARAMETER Experiment Name: At_Open_Flower_P Parameter: Age (day) Value: 21
  misc_feature: MA Experiment 20000265 PARAMETER Experiment Name: At_Open_Flower_P Parameter: Plant Line Value: WS
  misc_feature: MA Experiment 20000265 PARAMETER Experiment Name: At_Open_Flower_P Parameter: Tissue Value: Closed Flower vs. Whole Plant
  misc_feature: MA Experiment ID: 20000286 Result: Down-regulated in Transcription
  misc_feature: MA Experiment 20000286 PARAMETER Experiment Name: At_Open_Flower_P Parameter: Age (day) Value: 21
  misc_feature: MA Experiment 20000286 PARAMETER Experiment Name: At_Open_Flower_P Parameter: Plant Line Value: WS
  misc_feature: MA Experiment 20000286 PARAMETER Experiment Name: At_Open_Flower_P Parameter: Tissue Value: Half Open vs. Whole Plant
  misc_feature: MA Experiment ID: 20000439 Result: Down-regulated in Transcription
  misc_feature: MA Experiment 20000439 PARAMETER Experiment Name: At_Roots__P Parameter: Age (day) Value: 14 vs. 21
  misc_feature: MA Experiment 20000439 PARAMETER Experiment Name: At_Roots__P Parameter: Organism Value: A. thaliana
  misc_feature: MA Experiment 20000439 PARAMETER Experiment Name: At_Roots__P Parameter: Tissue Value: Roots vs. Whole Plant
  misc_feature: MA Experiment ID: 20000709 Result: Up-regulated in Transcription
  misc_feature: MA Experiment 20000709 PARAMETER Experiment Name: At_15mM_NH4NO3_L-to-H_P Parameter: Age (hr) Value: 14
  misc_feature: MA Experiment 20000709 PARAMETER Experiment Name: At_15mM_NH4NO3_L-to-H_P Parameter: Organism Value: A. thaliana
  misc_feature: MA Experiment 20000709 PARAMETER Experiment Name: At_15mM_NH4NO3_L-to-H_P Parameter: Plant Line Value: WS
  misc_feature: MA Experiment 20000709 PARAMETER Experiment Name: At_15mM_NH4NO3_L-to-H_P Parameter: Timepoint (hr) Value: 4
  misc_feature: MA Experiment 20000709 PARAMETER Experiment Name: At_15mM_NH4NO3_L-to-H_P Parameter: Tissue Value: Aerial
  misc_feature: MA Experiment 20000709 PARAMETER Experiment Name: At_15mM_NH4NO3_L-to-H_P Parameter: Treatment Value: 15mM NH4NO3 vs. 30mM Mannitol
  misc_feature: MA Experiment ID: 20000794 Result: Down-regulated in Transcription
  misc_feature: MA Experiment 20000794 PARAMETER Experiment Name: At_Petals_P Parameter: Age (day) Value: 23-25 days
  misc_feature: MA Experiment 20000794 PARAMETER Experiment Name: At_Petals_P Parameter: Plant Line Value: WS
  misc_feature: MA Experiment 20000794 PARAMETER Experiment Name: At_Petals_P Parameter: Tissue Value: Petals vs. Whole plant
  misc_feature: MA Experiment ID: 20001248 Result: Up-regulated in Transcription
  misc_feature: MA Experiment 20001248 PARAMETER Experiment Name: At_Far-red-induction_P Parameter: Age (day) Value: 7
  misc_feature: MA Experiment 20001248 PARAMETER Experiment Name: At_Far-red-induction_P Parameter: Light Value: Far-red vs. White
  misc_feature: MA Experiment 20001248 PARAMETER Experiment Name: At_Far-red-induction_P Parameter: Organism Value: A. thaliana
  misc_feature: MA Experiment 20001248 PARAMETER Experiment Name: At_Far-red-induction_P Parameter: Plant Line Value: Columbia
  misc_feature: MA Experiment 20001248 PARAMETER Experiment Name: At_Far-red-induction_P Parameter: Timepoint (hr) Value: 4
  misc_feature: MA Experiment 20001248 PARAMETER Experiment Name: At_Far-red-induction_P Parameter: Tissue Value: Whole Plant
  misc_feature: MA Experiment ID: 20001554 Result: Down-regulated in Transcription
  misc_feature: MA Experiment 20001554 PARAMETER Experiment Name: At_Drought_Soil_Dry_P Parameter: Age (day) Value: 21
  misc_feature: MA Experiment 20001554 PARAMETER Experiment Name: At_Drought_Soil_Dry_P Parameter: Organism Value: A. thaliana
  misc_feature: MA Experiment 20001554 PARAMETER Experiment Name: At_Drought_Soil_Dry_P Parameter: Plant Line Value: WS
  misc_feature: MA Experiment 20001554 PARAMETER Experiment Name: At_Drought_Soil_Dry_P Parameter: Post Timepoint (hr) Value: None
  misc_feature: MA Experiment 20001554 PARAMETER Experiment Name: At_Drought_Soil_Dry_P Parameter: Post-Treatment Value: None
  misc_feature: MA Experiment 20001554 PARAMETER Experiment Name: At_Drought_Soil_Dry_P Parameter: Timepoint (day) Value: 7
  misc_feature: MA Experiment 20001554 PARAMETER Experiment Name: At_Drought_Soil_Dry_P Parameter: Treatment Value: Drought vs. No Drought
  misc_feature: MA Experiment ID: 20001555 Result: Down-regulated in Transcription
  misc_feature: MA Experiment 20001555 PARAMETER Experiment Name: At_Drought_Soil_Dry_P Parameter: Age (day) Value: 24
  misc_feature: MA Experiment 20001555 PARAMETER Experiment Name: At_Drought_Soil_Dry_P Parameter: Organism Value: A. thaliana
  misc_feature: MA Experiment 20001555 PARAMETER Experiment Name: At_Drought_Soil_Dry_P Parameter: Plant Line Value: WS
  misc_feature: MA Experiment 20001555 PARAMETER Experiment Name: At_Drought_Soil_Dry_P Parameter: Post Timepoint (hr) Value: None
  misc_feature: MA Experiment 20001555 PARAMETER Experiment Name: At_Drought_Soil_Dry_P Parameter: Post-Treatment Value: None
  misc_feature: MA Experiment 20001555 PARAMETER Experiment Name: At_Drought_Soil_Dry_P Parameter: Timepoint (day) Value: 10
  misc_feature: MA Experiment 20001555 PARAMETER Experiment Name: At_Drought_Soil_Dry_P Parameter: Treatment Value: Drought vs. No Drought
  misc_feature: MA Experiment ID: 20001556 Result: Down-regulated in Transcription
  misc_feature: MA Experiment 20001556 PARAMETER Experiment Name: At_Drought_Soil_Dry_P Parameter: Age (day) Value: 26
  misc_feature: MA Experiment 20001556 PARAMETER Experiment Name: At_Drought_Soil_Dry_P Parameter: Organism Value: A. thaliana
  misc_feature: MA Experiment 20001556 PARAMETER Experiment Name: At_Drought_Soil_Dry_P Parameter: Plant Line Value: WS
  misc_feature: MA Experiment 20001556 PARAMETER Experiment Name: At_Drought_Soil_Dry_P Parameter: Post Timepoint (hr) Value: None
  misc_feature: MA Experiment 20001556 PARAMETER Experiment Name: At_Drought_Soil_Dry_P Parameter: Post-Treatment Value: None
  misc_feature: MA Experiment 20001556 PARAMETER Experiment Name: At_Drought_Soil_Dry_P Parameter: Timepoint (day) Value: 12
  misc_feature: MA Experiment 20001556 PARAMETER Experiment Name: At_Drought_Soil_Dry_P Parameter: Treatment Value: Drought vs. No Drought
  misc_feature: MA Experiment ID: 20001557 Result: Down-regulated in Transcription
  misc_feature: MA Experiment 20001557 PARAMETER Experiment Name: At_Drought_Soil_Dry_P Parameter: Age (day) Value: 27
  misc_feature: MA Experiment 20001557 PARAMETER Experiment Name: At_Drought_Soil_Dry_P Parameter: Organism Value: A. thaliana
  misc_feature: MA Experiment 20001557 PARAMETER Experiment Name: At_Drought_Soil_Dry_P Parameter: Plant Line Value: WS
  misc_feature: MA Experiment 20001557 PARAMETER Experiment Name: At_Drought_Soil_Dry_P Parameter: Post Timepoint (hr) Value: 3
  misc_feature: MA Experiment 20001557 PARAMETER Experiment Name: At_Drought_Soil_Dry_P Parameter: Post-Treatment Value: Re-Water vs. No Drought
  misc_feature: MA Experiment 20001557 PARAMETER Experiment Name: At_Drought_Soil_Dry_P Parameter: Timepoint (day) Value: 13
  misc_feature: MA Experiment 20001557 PARAMETER Experiment Name: At_Drought_Soil_Dry_P Parameter: Treatment Value: Drought vs. No Drought
  misc_feature: MA Experiment ID: 20001558 Result: Down-regulated in Transcription
  misc_feature: MA Experiment 20001558 PARAMETER Experiment Name: At_Drought_Soil_Dry_P Parameter: Age (day) Value: 27
  misc_feature: MA Experiment 20001558 PARAMETER Experiment Name: At_Drought_Soil_Dry_P Parameter: Organism Value: A. thaliana
  misc_feature: MA Experiment 20001558 PARAMETER Experiment Name: At_Drought_Soil_Dry_P Parameter: Plant Line Value: WS
  misc_feature: MA Experiment 20001558 PARAMETER Experiment Name: At_Drought_Soil_Dry_P Parameter: Post Timepoint (hr) Value: 6
  misc_feature: MA Experiment 20001558 PARAMETER Experiment Name: At_Drought_Soil_Dry_P Parameter: Post-Treatment Value: Re-Water vs. No Drought
  misc_feature: MA Experiment 20001558 PARAMETER Experiment Name: At_Drought_Soil_Dry_P Parameter: Timepoint (day) Value: 13
  misc_feature: MA Experiment 20001558 PARAMETER Experiment Name: At_Drought_Soil_Dry_P Parameter: Treatment Value: Drought vs. No Drought
  misc_feature: MA Experiment ID: 20001559 Result: Down-regulated in Transcription
  misc_feature: MA Experiment 20001559 PARAMETER Experiment Name: At_Drought_Soil_Dry_P Parameter: Age (day) Value: 28
  misc_feature: MA Experiment 20001559 PARAMETER Experiment Name: At_Drought_Soil_Dry_P Parameter: Organism Value: A. thaliana
  misc_feature: MA Experiment 20001559 PARAMETER Experiment Name: At_Drought_Soil_Dry_P Parameter: Plant Line Value: WS
  misc_feature: MA Experiment 20001559 PARAMETER Experiment Name: At_Drought_Soil_Dry_P Parameter: Post Timepoint (hr) Value: 29
  misc_feature: MA Experiment 20001559 PARAMETER Experiment Name: At_Drought_Soil_Dry_P Parameter: Post-Treatment Value: Re-Water vs. No Drought
  misc_feature: MA Experiment 20001559 PARAMETER Experiment Name: At_Drought_Soil_Dry_P Parameter: Timepoint (day) Value: 14
  misc_feature: MA Experiment 20001559 PARAMETER Experiment Name: At_Drought_Soil_Dry_P Parameter: Treatment Value: Drought vs. No Drought
  misc_feature: MA Experiment ID: 20001757 Result: Up-regulated in Transcription
  misc_feature: MA Experiment 20001757 PARAMETER Experiment Name: At_50mM_NH4NO3_L-to-H_P Parameter: Timepoint (hr) Value: 6
  misc_feature: MA Experiment 20001757 PARAMETER Experiment Name: At_50mM_NH4NO3_L-to-H_P Parameter: Tissue Value: Leaf
  misc_feature: MA Experiment 20001757 PARAMETER Experiment Name: At_50mM_NH4NO3_L-to-H_P Parameter: Treatment Value: 50mM NH4NO3 vs 100mM Mannitol
  misc_feature: MA Experiment ID: 20001904 Result: Down-regulated in Transcription
  misc_feature: MA Experiment 20001904 PARAMETER Experiment Name: At_Drought_Reproduction_P Parameter: Age (day) Value: 37
  misc_feature: MA Experiment 20001904 PARAMETER Experiment Name: At_Drought_Reproduction_P Parameter: Organism Value: A. thaliana
  misc_feature: MA Experiment 20001904 PARAMETER Experiment Name: At_Drought_Reproduction_P Parameter: Plant Line Value: WS
  misc_feature: MA Experiment 20001904 PARAMETER Experiment Name: At_Drought_Reproduction_P Parameter: Timepoint (day) Value: 7
  misc_feature: MA Experiment 20001904 PARAMETER Experiment Name: At_Drought_Reproduction_P Parameter: Tissue Value: Rosettes
  misc_feature: MA Experiment 20001904 PARAMETER Experiment Name: At_Drought_Reproduction_P Parameter: Treatment Value: Drought vs. No Drought
  misc_feature: MA Experiment ID: 20001905 Result: Down-regulated in Transcription
  misc_feature: MA Experiment 20001905 PARAMETER Experiment Name: At_Drought_Reproduction_P Parameter: Age (day) Value: 40
  misc_feature: MA Experiment 20001905 PARAMETER Experiment Name: At_Drought_Reproduction_P Parameter: Organism Value: A. thaliana
  misc_feature: MA Experiment 20001905 PARAMETER Experiment Name: At_Drought_Reproduction_P Parameter: Plant Line Value: WS
  misc_feature: MA Experiment 20001905 PARAMETER Experiment Name: At_Drought_Reproduction_P Parameter: Timepoint (day) Value: 10
  misc_feature: MA Experiment 20001905 PARAMETER Experiment Name: At_Drought_Reproduction_P Parameter: Tissue Value: Rosettes
  misc_feature: MA Experiment 20001905 PARAMETER Experiment Name: At_Drought_Reproduction_P Parameter: Treatment Value: Drought vs. No Drought
atggggacatattattcatcacaagttttaagcagtatttgtaagaaaatggcttccaagactttgcttcttttgggtctctttgcatttcttttcatcgtctcagaaatggctgccgcgggcacggtgaagtcagagagtgaggaaactgtgaaacctgaacaacatggtggtggattcggtgacaatggaggaggaagataccaaggaggaggcggccatggtggccacggagggggaggataccaaggaggaggaggacgataccaaggaggcggtgggcgacaaggaggagggggaagttactgccgccacggctgctgctacaaaggttaccatggctgctcaaggtgttgttcatatgccggagaagcggttcagactcagtctggtcactaaatctacataatatatcaaccaccatgagtgtacgatttcatttatatatacacttacgtgtgtatgtgatatgacaatacacttacgtttgtaatgaagtgccttaagtttaagaggagaaactatcggaataaagtttcataatgtaatgcctttgtgtttatttaagttgttatttgcgatgtttgcataataaagttgtttctagttgaagtt

SEQ ID NO: 20714 - protein, 132 aa, Arabidopsis thaliana
  peptide (1)..(132): Ceres Seq. ID no. 13496875
  misc_feature (61)..(119): Pfam Name: Keratin Pfam Description: Keratin
  misc_feature (17)..(123): Homolog of NCBI NO: 259447 NR Description: glycine-rich protein; atGRP [Arabidopsis thaliana]
  misc_feature (17)..(123): Homolog of NCBI NO: 15224548 NR Description: glycine-rich protein (GRP) [Arabidopsis thaliana]
  misc_feature (55)..(132): Homolog of NCBI NO: 15224548 NR Description: glycine-rich protein (GRP) [Arabidopsis thaliana]
  misc_feature (55)..(132): Homolog of NCBI NO: 259447 NR Description: glycine-rich protein; atGRP [Arabidopsis thaliana]
  misc_feature (55)..(132): Homolog of NCBI NO: 81625 NR Description: glycine-rich protein 3 precursor - Arabidopsis
  misc_feature (17)..(132): Homolog of NCBI NO: 18266043 NR Description: glycine-rich protein [Brassica oleracea]
  misc_feature (17)..(132): Homolog of NCBI NO: 15224559 NR Description: glycine-rich protein [Arabidopsis thaliana]
  misc_feature (17)..(132): Homolog of NCBI NO: 4206767 NR Description: glycine-rich protein 3 short isoform [Arabidopsis
  misc_feature (17)..(132): Homolog of NCBI NO: 20466662 NR Description: unknown protein [Arabidopsis thaliana]
  misc_feature (17)..(132): Homolog of NCBI NO: 18396043 NR Description: glycine-rich protein [Arabidopsis thaliana]
MGTYYSSQVLSSICKKMASKTLLLLGLFAFLFIVSEMAAAGTVKSESEETVKPEQHGGGFGDNGGGRYQGGGGHGGHGGGGYQGGGGRYQGGGGRQGGGGSYCRHGCCYKGYHGCSRCCSYAGEAVQTQSGH

SEQ ID NO: 20715 - protein, 116 aa, Arabidopsis thaliana
  peptide (1)..(116): Ceres Seq. ID no. 13496876
  misc_feature (45)..(103): Pfam Name: Keratin Pfam Description: Keratin
  misc_feature (1)..(107): Homolog of NCBI NO: 259447 NR Description: glycine-rich protein; atGRP [Arabidopsis thaliana]
  misc_feature (1)..(107): Homolog of NCBI NO: 15224548 NR Description: glycine-rich protein (GRP) [Arabidopsis thaliana]
  misc_feature (39)..(116): Homolog of NCBI NO: 15224548 NR Description: glycine-rich protein (GRP) [Arabidopsis thaliana]
  misc_feature (39)..(116): Homolog of NCBI NO: 259447 NR Description: glycine-rich protein; atGRP [Arabidopsis thaliana]
  misc_feature (39)..(116): Homolog of NCBI NO: 81625 NR Description: glycine-rich protein 3 precursor - Arabidopsis
  misc_feature (1)..(116): Homolog of NCBI NO: 18266043 NR Description: glycine-rich protein [Brassica oleracea]
  misc_feature (1)..(116): Homolog of NCBI NO: 15224559 NR Description: glycine-rich protein [Arabidopsis thaliana]
  misc_feature (1)..(116): Homolog of NCBI NO: 4206767 NR Description: glycine-rich protein 3 short isoform [Arabidopsis
  misc_feature (1)..(116): Homolog of NCBI NO: 20466662 NR Description: unknown protein [Arabidopsis thaliana]
  misc_feature (1)..(116): Homolog of NCBI NO: 18396043 NR Description: glycine-rich protein [Arabidopsis thaliana]
MASKTLLLLGLFAFLFIVSEMAAAGTVKSESEETVKPEQHGGGFGDNGGGRYQGGGGHGGHGGGGYQGGGGRYQGGGGRQGGGGSYCRHGCCYKGYHGCSRCCSYAGEAVQTQSGH

SEQ ID NO: 20716 - protein, 96 aa, Arabidopsis thaliana
  peptide (1)..(96): Ceres Seq. ID no. 13496877
  misc_feature (25)..(83): Pfam Name: Keratin Pfam Description: Keratin
  misc_feature (1)..(87): Homolog of NCBI NO: 259447 NR Description: glycine-rich protein; atGRP [Arabidopsis thaliana]
  misc_feature (1)..(87): Homolog of NCBI NO: 15224548 NR Description: glycine-rich protein (GRP) [Arabidopsis thaliana]
  misc_feature (19)..(96): Homolog of NCBI NO: 15224548 NR Description: glycine-rich protein (GRP) [Arabidopsis thaliana]
  misc_feature (19)..(96): Homolog of NCBI NO: 259447 NR Description: glycine-rich protein; atGRP [Arabidopsis thaliana]
  misc_feature (19)..(96): Homolog of NCBI NO: 81625 NR Description: glycine-rich protein 3 precursor - Arabidopsis
  misc_feature (1)..(96): Homolog of NCBI NO: 18266043 NR Description: glycine-rich protein [Brassica oleracea]
  misc_feature (1)..(96): Homolog of NCBI NO: 15224559 NR Description: glycine-rich protein [Arabidopsis thaliana]
  misc_feature (1)..(96): Homolog of NCBI NO: 4206767 NR Description: glycine-rich protein 3 short isoform [Arabidopsis
  misc_feature (1)..(96): Homolog of NCBI NO: 20466662 NR Description: unknown protein [Arabidopsis thaliana]
  misc_feature (1)..(96): Homolog of NCBI NO: 18396043 NR Description: glycine-rich protein [Arabidopsis thaliana]
MAAAGTVKSESEETVKPEQHGGGFGDNGGGRYQGGGGHGGHGGGGYQGGGGRYQGGGGRQGGGGSYCRHGCCYKGYHGCSRCCSYAGEAVQTQSGH

SEQ ID NO: 20717 - DNA, 571 bp, Arabidopsis thaliana
  misc_feature (1)..(571): Ceres Seq. ID no. 12420691
  misc_feature: MA Experiment ID: 108433 Result: Up-regulated in Transcription
  misc_feature: MA Experiment 108433 PARAMETER Experiment Name: At_rhl_Mutant2_cDNA_P Parameter: Age (day) Value: 7
  misc_feature: MA Experiment 108433 PARAMETER Experiment Name: At_rhl_Mutant2_cDNA_P Parameter: Organism Value: A. thaliana
  misc_feature: MA Experiment 108433 PARAMETER Experiment Name: At_rhl_Mutant2_cDNA_P Parameter: Plant Line Value: rhl Mutant vs. wt landsburg
  misc_feature: MA Experiment 108433 PARAMETER Experiment Name: At_rhl_Mutant2_cDNA_P Parameter: Tissue Value: Roots
  misc_feature: MA Experiment ID: 108434 Result: Down-regulated in Transcription
  misc_feature: MA Experiment 108434 PARAMETER Experiment Name: At_Root_Tips_cDNA_P Parameter: Tissue Value: Root Tips
  misc_feature: MA Experiment ID: 108488 Result: Down-regulated in Transcription
  misc_feature: MA Experiment ID: 108576 Result: Up-regulated in Transcription
  misc_feature: MA Experiment 108576 PARAMETER Experiment Name: At_42deg_Heat_cDNA_P Parameter: Temperature (deg C) Value: 42 vs. 22
  misc_feature: MA Experiment 108576 PARAMETER Experiment Name: At_42deg_Heat_cDNA_P Parameter: Timepoint (hr) Value: 1
  misc_feature: MA Experiment 108576 PARAMETER Experiment Name: At_42deg_Heat_cDNA_P Parameter: Tissue Value: Aerial
  misc_feature: MA Experiment ID: 20000087 Result: Up-regulated in Transcription
  misc_feature: MA Experiment 20000087 PARAMETER Experiment Name: At_100uM_ABA_Mutants_cDNA_P Parameter: Plant Line Value: WS
  misc_feature: MA Experiment 20000087 PARAMETER Experiment Name: At_100uM_ABA_Mutants_cDNA_P Parameter: Timepoint (hr) Value: 6
  misc_feature: MA Experiment 20000087 PARAMETER Experiment Name: At_100uM_ABA_Mutants_cDNA_P Parameter: Tissue Value: Aerial
  misc_feature: MA Experiment 20000087 PARAMETER Experiment Name: At_100uM_ABA_Mutants_cDNA_P Parameter: Treatment Value: 100uM ABA vs. No Treatment
  misc_feature: MA Experiment ID: 20000112 Result: Up-regulated in Transcription
  misc_feature: MA Experiment 20000112 PARAMETER Experiment Name: At_42deg_Heat_cDNA_P Parameter: Temperature (deg C) Value: 42 vs. 22
  misc_feature: MA Experiment 20000112 PARAMETER Experiment Name: At_42deg_Heat_cDNA_P Parameter: Timepoint (hr) Value: 2
  misc_feature: MA Experiment 20000112 PARAMETER Experiment Name: At_42deg_Heat_cDNA_P Parameter: Tissue Value: Aerial
  misc_feature: MA Experiment ID: 20000113 Result: Up-regulated in Transcription
  misc_feature: MA Experiment 20000113 PARAMETER Experiment Name: At_42deg_Heat_cDNA_P Parameter: Temperature (deg C) Value: 42 vs. 22
  misc_feature: MA Experiment 20000113 PARAMETER Experiment Name: At_42deg_Heat_cDNA_P Parameter: Timepoint (hr) Value: 8
  misc_feature: MA Experiment 20000113 PARAMETER Experiment Name: At_42deg_Heat_cDNA_P Parameter: Tissue Value: Aerial
  misc_feature: MA Experiment ID: 20000173 Result: Up-regulated in Transcription
  misc_feature: MA Experiment 20000173 PARAMETER Experiment Name: At_42deg_Heat_P Parameter: Age (day) Value: 14
  misc_feature: MA Experiment 20000173 PARAMETER Experiment Name: At_42deg_Heat_P Parameter: Organism Value: A. thaliana
  misc_feature: MA Experiment 20000173 PARAMETER Experiment Name: At_42deg_Heat_P Parameter: Plant Line Value: WS
  misc_feature: MA Experiment 20000173 PARAMETER Experiment Name: At_42deg_Heat_P Parameter: Temperature (deg C) Value: 42 vs. 22
  misc_feature: MA Experiment 20000173 PARAMETER Experiment Name: At_42deg_Heat_P Parameter: Timepoint (hr) Value: 6
  misc_feature: MA Experiment 20000173 PARAMETER Experiment Name: At_42deg_Heat_P Parameter: Tissue Value: Aerial
  misc_feature: MA Experiment ID: 20000794 Result: Up-regulated in Transcription
  misc_feature: MA Experiment 20000794 PARAMETER Experiment Name: At_Petals_P Parameter: Age (day) Value: 23-25 days
  misc_feature: MA Experiment 20000794 PARAMETER Experiment Name: At_Petals_P Parameter: Plant Line Value: WS
  misc_feature: MA Experiment 20000794 PARAMETER Experiment Name: At_Petals_P Parameter: Tissue Value: Petals vs. Whole plant
  misc_feature: MA Experiment ID: 20001905 Result: Up-regulated in Transcription
  misc_feature: MA Experiment 20001905 PARAMETER Experiment Name: At_Drought_Reproduction_P Parameter: Age (day) Value: 40
  misc_feature: MA Experiment 20001905 PARAMETER Experiment Name: At_Drought_Reproduction_P Parameter: Organism Value: A. thaliana
  misc_feature: MA Experiment 20001905 PARAMETER Experiment Name: At_Drought_Reproduction_P Parameter: Plant Line Value: WS
  misc_feature: MA Experiment 20001905 PARAMETER Experiment Name: At_Drought_Reproduction_P Parameter: Timepoint (day) Value: 10
  misc_feature: MA Experiment 20001905 PARAMETER Experiment Name: At_Drought_Reproduction_P Parameter: Tissue Value: Rosettes
  misc_feature: MA Experiment 20001905 PARAMETER Experiment Name: At_Drought_Reproduction_P Parameter: Treatment Value: Drought vs. No Drought
gtagaatcttcccgtactttacttttccggaggaatagaaaattgggggctagggttcgcaattgtagttttcgagcgaagaagatgatcgaggtggttctcaacgatcgtttagggaaaaaagttagggtgaagtgtaacgatgatgacacgatcggtgatctgaagaagcttgtcgcggcacaaaccggaacacgagccgagaagatcagaattcagaagtggtacaacatctacaaggatcacatcactctcaaggactatgagatccatgacggcatgggtcttgagctttactacaactaggccaatcgaaggagctaagctgaaggagtgttgttgatttggacacctacataaactcatatcaaccatgttacatctaaaaaagacacaagtatgttgtaagacgtgataacttcaaatttgtggtaataataatacattcactgtcaatggttttaaacccttccaaattgtcagattgatttctggttatctctaagtttgtagtatattagtctttttggttgtattgatgtgctctttctccaaatgttacccatcttcc

SEQ ID NO: 20718 - protein, 101 aa, Arabidopsis thaliana
  peptide (1)..(101): Ceres Seq. ID no. 12420692
  misc_feature (29)..(100): Homolog of NCBI NO: 17507389 NR Description: UBiquitin-Like family UBL-5 (8.7 kD) (ubl-5)
  misc_feature (29)..(100): Homolog of NCBI NO: 33416599 NR Description: Unknown (protein for MGC:66388) [Danio rerio]
  misc_feature (29)..(100): Homolog of NCBI NO: 30585153 NR Description: Homo sapiens ubiquitin-like 5 [synthetic
  misc_feature (29)..(100): Homolog of NCBI NO: 13236510 NR Description: ubiquitin-like 5 [Homo sapiens]
  misc_feature (26)..(100): Homolog of NCBI NO: 40889756 NR Description: Chain A, Solution Structure Of The Murine
  misc_feature (25)..(100): Homolog of NCBI NO: 38492721 NR Description: Chain A, Solution Structure Of Ubl5 A Human
  misc_feature (29)..(101): Homolog of NCBI NO: 23509060 NR Description: ubiquitin-like protein, putative [Plasmodium
  misc_feature (29)..(101): Homolog of NCBI NO: 23482066 NR Description: ubiquitin-like protein [Plasmodium yoelii yoelii]
  misc_feature (29)..(101): Homolog of NCBI NO: 15230632 NR Description: putative protein; protein id: At3g45180.1
  misc_feature (29)..(101): Homolog of NCBI NO: 15238924 NR Description: ubiquitin-like protein
VESSRTLLFRRNRKLGARVRNCSFRAKKMIEVVLNDRLGKKVRVKCNDDDTIGDLKKLVAAQTGTRAEKIRIQKWYNIYKDHITLKDYEIHDGMGLELYYN

SEQ ID NO: 20719 - protein, 73 aa, Arabidopsis thaliana
  peptide (1)..(73): Ceres Seq. ID no. 12420693
  misc_feature (1)..(72): Homolog of NCBI NO: 17507389 NR Description: UBiquitin-Like family UBL-5 (8.7 kD) (ubl-5)
  misc_feature (1)..(72): Homolog of NCBI NO: 33416599 NR Description: Unknown (protein for MGC:66388) [Danio rerio]
  misc_feature (1)..(72): Homolog of NCBI NO: 30585153 NR Description: Homo sapiens ubiquitin-like 5 [synthetic
  misc_feature (1)..(72): Homolog of NCBI NO: 13236510 NR Description: ubiquitin-like 5 [Homo sapiens]
  misc_feature (1)..(72): Homolog of NCBI NO: 40889756 NR Description: Chain A, Solution Structure Of The Murine
  misc_feature (1)..(72): Homolog of NCBI NO: 38492721 NR Description: Chain A, Solution Structure Of Ubl5 A Human
  misc_feature (1)..(73): Homolog of NCBI NO: 23509060 NR Description: ubiquitin-like protein, putative [Plasmodium
  misc_feature (1)..(73): Homolog of NCBI NO: 23482066 NR Description: ubiquitin-like protein [Plasmodium yoelii yoelii]
  misc_feature (1)..(73): Homolog of NCBI NO: 15230632 NR Description: putative protein; protein id: At3g45180.1
  misc_feature (1)..(73): Homolog of NCBI NO: 15238924 NR Description: ubiquitin-like protein
MIEVVLNDRLGKKVRVKCNDDDTIGDLKKLVAAQTGTRAEKIRIQKWYNIYKDHITLKDYEIHDGMGLELYYN

SEQ ID NO: 20720 - DNA, 592 bp, Arabidopsis thaliana
  misc_feature (1)..(592): Ceres Seq. ID no. 12323993
  misc_feature: MA Experiment ID: 108434 Result: Up-regulated in Transcription
  misc_feature: MA Experiment 108434 PARAMETER Experiment Name: At_Root_Tips_cDNA_P Parameter: Tissue Value: Root Tips
  misc_feature: MA Experiment ID: 108461 Result: Up-regulated in Transcription
  misc_feature: MA Experiment 108461 PARAMETER Experiment Name: At_Germinating_Seeds_cDNA_P Parameter: Age (day) Value: 1 vs. 0
  misc_feature: MA Experiment 108461 PARAMETER Experiment Name: At_Germinating_Seeds_cDNA_P Parameter: Tissue Value: Germinating Seeds
  misc_feature: MA Experiment ID: 108462 Result: Up-regulated in Transcription
  misc_feature: MA Experiment 108462 PARAMETER Experiment Name: At_Germinating_Seeds_cDNA_P Parameter: Age (day) Value: 2 vs. 0
  misc_feature: MA Experiment 108462 PARAMETER Experiment Name: At_Germinating_Seeds_cDNA_P Parameter: Tissue Value: Germinating Seeds
  misc_feature: MA Experiment ID: 108464 Result: Up-regulated in Transcription
  misc_feature: MA Experiment 108464 PARAMETER Experiment Name: At_Germinating_Seeds_cDNA_P Parameter: Age (day) Value: 4 vs. 0
  misc_feature: MA Experiment 108464 PARAMETER Experiment Name: At_Germinating_Seeds_cDNA_P Parameter: Tissue Value: Germinating Seeds
  misc_feature: MA Experiment ID: 108474 Result: Down-regulated in Transcription
  misc_feature: MA Experiment 108474 PARAMETER Experiment Name: At_Drought_Flowers_cDNA_P Parameter: Timepoint (hr) Value: null
  misc_feature: MA Experiment 108474 PARAMETER Experiment Name: At_Drought_Flowers_cDNA_P Parameter: Treatment Value: Drought vs. No Drought
  misc_feature: MA Experiment ID: 108569 Result: Down-regulated in Transcription
  misc_feature: MA Experiment 108569 PARAMETER Experiment Name: At_0.001%_MeJA__cDNA_P Parameter: Timepoint (hr) Value: 6
  misc_feature: MA Experiment 108569 PARAMETER Experiment Name: At_0.001%_MeJA__cDNA_P Parameter: Tissue Value: Aerial
  misc_feature: MA Experiment 108569 PARAMETER Experiment Name: At_0.001%_MeJA__cDNA_P Parameter: Treatment Value: 0.001% MeJA vs. No Treatment
  misc_feature: MA Experiment ID: 108577 Result: Down-regulated in Transcription
  misc_feature: MA Experiment 108577 PARAMETER Experiment Name: At_42deg_Heat_cDNA_P Parameter: Temperature (deg C) Value: 42 vs. 22
  misc_feature: MA Experiment 108577 PARAMETER Experiment Name: At_42deg_Heat_cDNA_P Parameter: Timepoint (hr) Value: 6
  misc_feature: MA Experiment 108577 PARAMETER Experiment Name: At_42deg_Heat_cDNA_P Parameter: Tissue Value: Aerial
  misc_feature: MA Experiment ID: 108579 Result: Down-regulated in Transcription
  misc_feature: MA Experiment 108579 PARAMETER Experiment Name: At_4deg_Cold_cDNA_P Parameter: Temperature (deg C) Value: 4 vs. 22
  misc_feature: MA Experiment 108579 PARAMETER Experiment Name: At_4deg_Cold_cDNA_P Parameter: Timepoint (hr) Value: 6
  misc_feature: MA Experiment 108579 PARAMETER Experiment Name: At_4deg_Cold_cDNA_P Parameter: Tissue Value: Aerial
  misc_feature: MA Experiment ID: 20000113 Result: Down-regulated in Transcription
  misc_feature: MA Experiment 20000113 PARAMETER Experiment Name: At_42deg_Heat_cDNA_P Parameter: Temperature (deg C) Value: 42 vs. 22
  misc_feature: MA Experiment 20000113 PARAMETER Experiment Name: At_42deg_Heat_cDNA_P Parameter: Timepoint (hr) Value: 8
  misc_feature: MA Experiment 20000113 PARAMETER Experiment Name: At_42deg_Heat_cDNA_P Parameter: Tissue Value: Aerial
  misc_feature: MA Experiment ID: 20000117 Result: Down-regulated in Transcription
  misc_feature: MA Experiment 20000117 PARAMETER Experiment Name: At_100uM_ABA_Mutants_cDNA_P Parameter: Plant Line Value: Columbia
  misc_feature: MA Experiment 20000117 PARAMETER Experiment Name: At_100uM_ABA_Mutants_cDNA_P Parameter: Timepoint (hr) Value: 6
  misc_feature: MA Experiment 20000117 PARAMETER Experiment Name: At_100uM_ABA_Mutants_cDNA_P Parameter: Tissue Value: Aerial
  misc_feature: MA Experiment 20000117 PARAMETER Experiment Name: At_100uM_ABA_Mutants_cDNA_P Parameter: Treatment Value: 100uM ABA vs. No Treatment
  misc_feature: MA Experiment ID: 20000169 Result: Down-regulated in Transcription
  misc_feature: MA Experiment 20000169 PARAMETER Experiment Name: At_100uM_ABA_P Parameter: Age (day) Value: 14
  misc_feature: MA Experiment 20000169 PARAMETER Experiment Name: At_100uM_ABA_P Parameter: Organism Value: A. thaliana
  misc_feature: MA Experiment 20000169 PARAMETER Experiment Name: At_100uM_ABA_P Parameter: Plant Line Value: WS
  misc_feature: MA Experiment 20000169 PARAMETER Experiment Name: At_100uM_ABA_P Parameter: Timepoint (hr) Value: 6
  misc_feature: MA Experiment 20000169 PARAMETER Experiment Name: At_100uM_ABA_P Parameter: Tissue Value: Aerial
  misc_feature: MA Experiment 20000169 PARAMETER Experiment Name: At_100uM_ABA_P Parameter: Treatment Value: 100uM ABA vs. No Treatment
  misc_feature: MA Experiment ID: 20000180 Result: Up-regulated in Transcription
  misc_feature: MA Experiment 20000180 PARAMETER Experiment Name: At_Germinating_Seeds_P Parameter: Age (hr) Value: 24 vs. 0
  misc_feature: MA Experiment 20000180 PARAMETER Experiment Name: At_Germinating_Seeds_P Parameter: Tissue Value: Germinating Seeds
  misc_feature: MA Experiment ID: 20000182 Result: Down-regulated in Transcription
  misc_feature: MA Experiment 20000182 PARAMETER Experiment Name: At_2mM_SA_P Parameter: Age (day) Value: 14
  misc_feature: MA Experiment 20000182 PARAMETER Experiment Name: At_2mM_SA_P Parameter: Organism Value: A. thaliana
  misc_feature: MA Experiment 20000182 PARAMETER Experiment Name: At_2mM_SA_P Parameter: Plant Line Value: WS
  misc_feature: MA Experiment 20000182 PARAMETER Experiment Name: At_2mM_SA_P Parameter: Timepoint (hr) Value: 6
  misc_feature: MA Experiment 20000182 PARAMETER Experiment Name: At_2mM_SA_P Parameter: Tissue Value: Aerial
  misc_feature: MA Experiment 20000182 PARAMETER Experiment Name: At_2mM_SA_P Parameter: Treatment Value: 2mM SA vs. No Treatment
  misc_feature: MA Experiment ID: 20000184 Result: Down-regulated in Transcription
  misc_feature: MA Experiment 20000184 PARAMETER Experiment Name: At_Shoots__P Parameter: Age (day) Value: 7
  misc_feature: MA Experiment 20000184 PARAMETER Experiment Name: At_Shoots__P Parameter: Tissue Value: Shoots vs. Whole Plant
  misc_feature: MA Experiment ID: 20000214 Result: Down-regulated in Transcription
  misc_feature: MA Experiment 20000214 PARAMETER Experiment Name: At_4deg_Cold_P Parameter: Timepoint (hr) Value: 6
  misc_feature: MA Experiment ID: 20000227 Result: Up-regulated in Transcription
  misc_feature: MA Experiment 20000227 PARAMETER Experiment Name: At_Root-Tips-vs-Tops_P Parameter: Tissue Value: Root Tips vs. Root Tops
  misc_feature: MA Experiment ID: 20000234 Result: Down-regulated in Transcription
  misc_feature: MA Experiment 20000234 PARAMETER Experiment Name: At_Siliques_P Parameter: Age (day) Value: 21
  misc_feature: MA Experiment 20000234 PARAMETER Experiment Name: At_Siliques_P Parameter: Organism Value: A. thaliana
  misc_feature: MA Experiment 20000234 PARAMETER Experiment Name: At_Siliques_P Parameter: Plant Line Value: WS
  misc_feature: MA Experiment 20000234 PARAMETER Experiment Name: At_Siliques_P Parameter: Tissue Value: Less Than 5mm Siliques vs. Whole Plant
  misc_feature: MA Experiment ID: 20000437 Result: Down-regulated in Transcription
  misc_feature: MA Experiment 20000437 PARAMETER Experiment Name: At_Drought_P Parameter: Age (day) Value: 8
  misc_feature: MA Experiment 20000437 PARAMETER Experiment Name: At_Drought_P Parameter: Organism Value: A. thaliana
  misc_feature: MA Experiment 20000437 PARAMETER Experiment Name: At_Drought_P Parameter: Plant Line Value: WS
  misc_feature: MA Experiment 20000437 PARAMETER Experiment Name: At_Drought_P Parameter: Timepoint (hr) Value: 24
  misc_feature: MA Experiment 20000437 PARAMETER Experiment Name: At_Drought_P Parameter: Tissue Value: Whole Plant
  misc_feature: MA Experiment 20000437 PARAMETER Experiment Name: At_Drought_P Parameter: Treatment Value: Drought vs. No Drought
  misc_feature: MA Experiment ID: 20000438 Result: Down-regulated in Transcription
  misc_feature: MA Experiment 20000438 PARAMETER Experiment Name: At_Shoots__P Parameter: Age (day) Value: 14
  misc_feature: MA Experiment 20000438 PARAMETER Experiment Name: At_Shoots__P Parameter: Tissue Value: Shoots vs. Whole Plant
  misc_feature: MA Experiment ID: 20000495 Result: Down-regulated in Transcription
  misc_feature: MA Experiment 20000495 PARAMETER Experiment Name: At_Guard_Cells_P Parameter: Harvest Date Value: 8/2/2002
  misc_feature: MA Experiment 20000495 PARAMETER Experiment Name: At_Guard_Cells_P Parameter: Organism Value: A. thaliana
  misc_feature: MA Experiment 20000495 PARAMETER Experiment Name: At_Guard_Cells_P Parameter: Tissue Value: Guard Cells vs. Leaves
  misc_feature: MA Experiment ID: 20000527 Result: Down-regulated in Transcription
  misc_feature: MA Experiment 20000527 PARAMETER Experiment Name: At_10percent_PEG_P Parameter: Age (day) Value: 20
  misc_feature: MA Experiment 20000527 PARAMETER Experiment Name: At_10percent_PEG_P Parameter: Organism Value: A. thaliana
  misc_feature: MA Experiment 20000527 PARAMETER Experiment Name: At_10percent_PEG_P Parameter: Plant Line Value: WS
  misc_feature: MA Experiment 20000527 PARAMETER Experiment Name: At_10percent_PEG_P Parameter: Timepoint (day) Value: 20
  misc_feature: MA Experiment 20000527 PARAMETER Experiment Name: At_10percent_PEG_P Parameter: Tissue Value: Whole Plant
  misc_feature: MA Experiment 20000527 PARAMETER Experiment Name: At_10percent_PEG_P Parameter: Treatment Value: 10percent PEG vs. No Treatment
  misc_feature: MA Experiment ID: 20001247 Result: Up-regulated in Transcription
  misc_feature: MA Experiment 20001247 PARAMETER Experiment Name: At_Far-red-induction_P Parameter: Age (day) Value: 7
  misc_feature: MA Experiment 20001247 PARAMETER Experiment Name: At_Far-red-induction_P Parameter: Light Value: Far-red vs. White
  misc_feature: MA Experiment 20001247 PARAMETER Experiment Name: At_Far-red-induction_P Parameter: Organism Value: A. thaliana
  misc_feature: MA Experiment 20001247 PARAMETER Experiment Name: At_Far-red-induction_P Parameter: Plant Line Value: Columbia
  misc_feature: MA Experiment 20001247 PARAMETER Experiment Name: At_Far-red-induction_P Parameter: Timepoint (hr) Value: 1
  misc_feature: MA Experiment 20001247 PARAMETER Experiment Name: At_Far-red-induction_P Parameter: Tissue Value: Whole Plant
  misc_feature: MA Experiment ID: 20001248 Result: Up-regulated in Transcription
  misc_feature: MA Experiment 20001248 PARAMETER Experiment Name: At_Far-red-induction_P Parameter: Age (day) Value: 7
  misc_feature: MA Experiment 20001248 PARAMETER Experiment Name: At_Far-red-induction_P Parameter: Light Value: Far-red vs. White
  misc_feature: MA Experiment 20001248 PARAMETER Experiment Name: At_Far-red-induction_P Parameter: Organism Value: A. thaliana
  misc_feature: MA Experiment 20001248 PARAMETER Experiment Name: At_Far-red-induction_P Parameter: Plant Line Value: Columbia
  misc_feature: MA Experiment 20001248 PARAMETER Experiment Name: At_Far-red-induction_P Parameter: Timepoint (hr) Value: 4
  misc_feature: MA Experiment 20001248 PARAMETER Experiment Name: At_Far-red-induction_P Parameter: Tissue Value: Whole Plant
  misc_feature: MA Experiment ID: 20001450 Result: Up-regulated in Transcription
  misc_feature: MA Experiment 20001450 PARAMETER Experiment Name: At_Far-red-induction_P Parameter: Age (day) Value: 7
  misc_feature: MA Experiment 20001450 PARAMETER Experiment Name: At_Far-red-induction_P Parameter: Light Value: Far-red vs. White
  misc_feature: MA Experiment 20001450 PARAMETER Experiment Name: At_Far-red-induction_P Parameter: Organism Value: A. thaliana
  misc_feature: MA Experiment 20001450 PARAMETER Experiment Name: At_Far-red-induction_P Parameter: Plant Line Value: Columbia
  misc_feature: MA Experiment 20001450 PARAMETER Experiment Name: At_Far-red-induction_P Parameter: Timepoint (hr) Value: 8
  misc_feature: MA Experiment 20001450 PARAMETER Experiment Name: At_Far-red-induction_P Parameter: Tissue Value: Whole Plant
  misc_feature: MA Experiment ID: 20001451 Result: Up-regulated in Transcription
  misc_feature: MA Experiment 20001451 PARAMETER Experiment Name: At_Far-red-induction_P Parameter: Age (day) Value: 7
  misc_feature: MA Experiment 20001451 PARAMETER Experiment Name: At_Far-red-induction_P Parameter: Light Value: Far-red vs. White
  misc_feature: MA Experiment 20001451 PARAMETER Experiment Name: At_Far-red-induction_P Parameter: Organism Value: A. thaliana
  misc_feature: MA Experiment 20001451 PARAMETER Experiment Name: At_Far-red-induction_P Parameter: Plant Line Value: Columbia
  misc_feature: MA Experiment 20001451 PARAMETER Experiment Name: At_Far-red-induction_P Parameter: Timepoint (hr) Value: 24
  misc_feature: MA Experiment 20001451 PARAMETER Experiment Name: At_Far-red-induction_P Parameter: Tissue Value: Whole Plant
  misc_feature: MA Experiment ID: 20001555 Result: Down-regulated in Transcription
  misc_feature: MA Experiment 20001555 PARAMETER Experiment Name: At_Drought_Soil_Dry_P Parameter: Age (day) Value: 24
  misc_feature: MA Experiment 20001555 PARAMETER Experiment Name: At_Drought_Soil_Dry_P Parameter: Organism Value: A. thaliana
  misc_feature: MA Experiment 20001555 PARAMETER Experiment Name: At_Drought_Soil_Dry_P Parameter: Plant Line Value: WS
  misc_feature: MA Experiment 20001555 PARAMETER Experiment Name: At_Drought_Soil_Dry_P Parameter: Post Timepoint (hr) Value: None
  misc_feature: MA Experiment 20001555 PARAMETER Experiment Name: At_Drought_Soil_Dry_P Parameter: Post-Treatment Value: None
  misc_feature: MA Experiment 20001555 PARAMETER Experiment Name: At_Drought_Soil_Dry_P Parameter: Timepoint (day) Value: 10
  misc_feature: MA Experiment 20001555 PARAMETER Experiment Name: At_Drought_Soil_Dry_P Parameter: Treatment Value: Drought vs. No Drought
  misc_feature: MA Experiment ID: 20001556 Result: Down-regulated in Transcription
  misc_feature: MA Experiment 20001556 PARAMETER Experiment Name: At_Drought_Soil_Dry_P Parameter: Age (day) Value: 26
  misc_feature: MA Experiment 20001556 PARAMETER Experiment Name: At_Drought_Soil_Dry_P Parameter: Organism Value: A. thaliana
  misc_feature: MA Experiment 20001556 PARAMETER Experiment Name: At_Drought_Soil_Dry_P Parameter: Plant Line Value: WS
  misc_feature: MA Experiment 20001556 PARAMETER Experiment Name: At_Drought_Soil_Dry_P Parameter: Post Timepoint (hr) Value: None
  misc_feature: MA Experiment 20001556 PARAMETER Experiment Name: At_Drought_Soil_Dry_P Parameter: Post-Treatment Value: None
  misc_feature: MA Experiment 20001556 PARAMETER Experiment Name: At_Drought_Soil_Dry_P Parameter: Timepoint (day) Value: 12
  misc_feature: MA Experiment 20001556 PARAMETER Experiment Name: At_Drought_Soil_Dry_P Parameter: Treatment Value: Drought vs. No Drought
  misc_feature: MA Experiment ID: 20001558 Result: Down-regulated in Transcription
  misc_feature: MA Experiment 20001558 PARAMETER Experiment Name: At_Drought_Soil_Dry_P Parameter: Age (day) Value: 27
  misc_feature: MA Experiment 20001558 PARAMETER Experiment Name: At_Drought_Soil_Dry_P Parameter: Organism Value: A. thaliana
  misc_feature: MA Experiment 20001558 PARAMETER Experiment Name: At_Drought_Soil_Dry_P Parameter: Plant Line Value: WS
  misc_feature: MA Experiment 20001558 PARAMETER Experiment Name: At_Drought_Soil_Dry_P Parameter: Post Timepoint (hr) Value: 6
  misc_feature: MA Experiment 20001558 PARAMETER Experiment Name: At_Drought_Soil_Dry_P Parameter: Post-Treatment Value: Re-Water vs. No Drought
  misc_feature: MA Experiment 20001558 PARAMETER Experiment Name: At_Drought_Soil_Dry_P Parameter: Timepoint (day) Value: 13
  misc_feature: MA Experiment 20001558 PARAMETER Experiment Name: At_Drought_Soil_Dry_P Parameter: Treatment Value: Drought vs. No Drought
  misc_feature: MA Experiment ID: 20001911 Result: Down-regulated in Transcription
  misc_feature: MA Experiment 20001911 PARAMETER Experiment Name: At_Drought_Reproduction_P Parameter: Age (day) Value: 40
  misc_feature: MA Experiment 20001911 PARAMETER Experiment Name: At_Drought_Reproduction_P Parameter: Organism Value: A. thaliana
  misc_feature: MA Experiment 20001911 PARAMETER Experiment Name: At_Drought_Reproduction_P Parameter: Plant Line Value: WS
  misc_feature: MA Experiment 20001911 PARAMETER Experiment Name: At_Drought_Reproduction_P Parameter: Timepoint (day) Value: 10
  misc_feature: MA Experiment 20001911 PARAMETER Experiment Name: At_Drought_Reproduction_P Parameter: Tissue Value: Flowers
  misc_feature: MA Experiment 20001911 PARAMETER Experiment Name: At_Drought_Reproduction_P Parameter: Treatment Value: Drought vs. No Drought
atcaaaatctttacaatatttatcatgtatgattctatcaagtgagatggaacggtatgcaatttttccgtttaataatgtgttttcgcttacaggttgaacaagtcactccagtagcagtagagaacgttgaggtaccaacaaagacagtggaggagacagtggtggagacagaggtgacccaacagccggaagaatccgtccccgccgtgacagaacaaaaatccgaagcaccaattgtagaaacaaacgaagaagtggttgtggaagaggcagagaagaaagatgaagaaaccgagaagaaaacagaggagaaagacgagaagacagaagtgatcacggaaactccggtagttgaggaggaggagaagaaagctgaggaagtgaccgaaactccggcggttgtggaggaggagaagaagacagaggtggttgaggagaaacagactgaggttgcggctgctgaggaagtcgccgttgagaaggccgaggagtaaagaggaaggaagaagctatatatgaccttttttggtctcatatcgttttctgtttattttattttatcaacatttcataagtattttctatgttt

SEQ ID NO: 20721 - protein, 146 aa, Arabidopsis thaliana
  peptide (1)..(146): Ceres Seq. ID no. 12323994
  misc_feature (33)..(140): Pfam Name: DREPP plasma membrane polypeptide Pfam Description: DREPP plasma membrane polypeptide
  misc_feature (15)..(146): Homolog of NCBI NO: 22999045 NR Description: hypothetical protein [Magnetococcus sp. MC-1]
  misc_feature (14)..(146): Homolog of NCBI NO: 22999045 NR Description: hypothetical protein [Magnetococcus sp. MC-1]
  misc_feature (12)..(146): Homolog of NCBI NO: 9049359 NR Description: vacuolar calcium binding protein [Raphanus
  misc_feature (18)..(146): Homolog of NCBI NO: 9049359 NR Description: vacuolar calcium binding protein [Raphanus
  misc_feature (12)..(138): Homolog of NCBI NO: 18391349 NR Description: expressed protein
  misc_feature (12)..(142): Homolog of NCBI NO: 21555836 NR Description: unknown [Arabidopsis thaliana]
  misc_feature (12)..(142): Homolog of NCBI NO: 18407594 NR Description: expressed protein
  misc_feature (47)..(146): Homolog of NCBI NO: 15231671 NR Description: putative protein; protein id: At3g59370.1
  misc_feature (47)..(146): Homolog of NCBI NO: 18391349 NR Description: expressed protein
  misc_feature (12)..(146): Homolog of NCBI NO: 30682601 NR Description: expressed protein [Arabidopsis thaliana]
MQFFRLIMCFRLQVEQVTPVAVENVEVPTKTVEETVVETEVTQQPEESVPAVTEQKSEAPIVETNEEVVVEEAEKKDEETEKKTEEKDEKTEVITETPVVEEEEKKAEEVTETPAVVEEEKKTEVVEEKQTEVAAAEEVAVEKAEE

SEQ ID NO: 20722 - protein, 139 aa, Arabidopsis thaliana
  peptide (1)..(139): Ceres Seq. ID no. 12323995
  misc_feature (26)..(133): Pfam Name: DREPP plasma membrane polypeptide Pfam Description: DREPP plasma membrane polypeptide
  misc_feature (5)..(131): Homolog of NCBI NO: 18391349 NR Description: expressed protein
  misc_feature (5)..(135): Homolog of NCBI NO: 21555836 NR Description: unknown [Arabidopsis thaliana]
  misc_feature (5)..(135): Homolog of NCBI NO: 18407594 NR Description: expressed protein
  misc_feature (8)..(139): Homolog of NCBI NO: 22999045 NR Description: hypothetical protein [Magnetococcus sp. MC-1]
  misc_feature (5)..(139): Homolog of NCBI NO: 9049359 NR Description: vacuolar calcium binding protein [Raphanus
  misc_feature (11)..(139): Homolog of NCBI NO: 9049359 NR Description: vacuolar calcium binding protein [Raphanus
  misc_feature (7)..(139): Homolog of NCBI NO: 22999045 NR Description: hypothetical protein [Magnetococcus sp. MC-1]
  misc_feature (40)..(139): Homolog of NCBI NO: 15231671 NR Description: putative protein; protein id: At3g59370.1
  misc_feature (40)..(139): Homolog of NCBI NO: 18391349 NR Description: expressed protein
  misc_feature (5)..(139): Homolog of NCBI NO: 30682601 NR Description: expressed protein [Arabidopsis thaliana]
MCFRLQVEQVTPVAVENVEVPTKTVEETVVETEVTQQPEESVPAVTEQKSEAPIVETNEEVVVEEAEKKDEETEKKTEEKDEKTEVITETPVVEEEEKKAEEVTETPAVVEEEKKTEVVEEKQTEVAAAEEVAVEKAEE

SEQ ID NO: 20723 - DNA, 1578 bp, Arabidopsis thaliana
  misc_feature (1)..(1578): Ceres Seq. ID no. 12421854
  misc_feature: MA Experiment ID: 108462 Result: Up-regulated in Transcription
  misc_feature: MA Experiment 108462 PARAMETER Experiment Name: At_Germinating_Seeds_cDNA_P Parameter: Age (day) Value: 2 vs. 0
  misc_feature: MA Experiment 108462 PARAMETER Experiment Name: At_Germinating_Seeds_cDNA_P Parameter: Tissue Value: Germinating Seeds
  misc_feature: MA Experiment ID: 108463 Result: Up-regulated in Transcription
  misc_feature: MA Experiment 108463 PARAMETER Experiment Name: At_Germinating_Seeds_cDNA_P Parameter: Age (day) Value: 3 vs. 0
  misc_feature: MA Experiment 108463 PARAMETER Experiment Name: At_Germinating_Seeds_cDNA_P Parameter: Tissue Value: Germinating Seeds
  misc_feature: MA Experiment ID: 108464 Result: Up-regulated in Transcription
  misc_feature: MA Experiment 108464 PARAMETER Experiment Name: At_Germinating_Seeds_cDNA_P Parameter: Age (day) Value: 4 vs. 0
  misc_feature: MA Experiment 108464 PARAMETER Experiment Name: At_Germinating_Seeds_cDNA_P Parameter: Tissue Value: Germinating Seeds
  misc_feature: MA Experiment ID: 108501 Result: Down-regulated in Transcription
  misc_feature: MA Experiment 108501 PARAMETER Experiment Name: At_ap2_floral_buds_cDNA_P Parameter: Plant Line Value: ap2 (Ler.)
  misc_feature: MA Experiment 108501 PARAMETER Experiment Name: At_ap2_floral_buds_cDNA_P Parameter: Tissue Value: Closed Flower
  misc_feature: MA Experiment ID: 20000069 Result: Down-regulated in Transcription
  misc_feature: MA Experiment 20000069 PARAMETER Experiment Name: At_100uM_ABA_Mutants_cDNA_P Parameter: Plant Line Value: CS23
  misc_feature: MA Experiment 20000069 PARAMETER Experiment Name: At_100uM_ABA_Mutants_cDNA_P Parameter: Timepoint (hr) Value: 6
  misc_feature: MA Experiment 20000069 PARAMETER Experiment Name: At_100uM_ABA_Mutants_cDNA_P Parameter: Tissue Value: Aerial
  misc_feature: MA Experiment 20000069 PARAMETER Experiment Name: At_100uM_ABA_Mutants_cDNA_P Parameter: Treatment Value: 100uM ABA vs. No Treatment
  misc_feature: MA Experiment ID: 20000072 Result: Down-regulated in Transcription
  misc_feature: MA Experiment 20000072 PARAMETER Experiment Name: At_100uM_ABA_Mutants_cDNA_P Parameter: Plant Line Value: CS8105
  misc_feature: MA Experiment 20000072 PARAMETER Experiment Name: At_100uM_ABA_Mutants_cDNA_P Parameter: Timepoint (hr) Value: 6
  misc_feature: MA Experiment 20000072 PARAMETER Experiment Name: At_100uM_ABA_Mutants_cDNA_P Parameter: Tissue Value: Aerial
  misc_feature: MA Experiment 20000072 PARAMETER Experiment Name: At_100uM_ABA_Mutants_cDNA_P Parameter: Treatment Value: 100uM ABA vs. No Treatment
  misc_feature: MA Experiment ID: 20000087 Result: Down-regulated in Transcription
  misc_feature: MA Experiment 20000087 PARAMETER Experiment Name: At_100uM_ABA_Mutants_cDNA_P Parameter: Plant Line Value: WS
  misc_feature: MA Experiment 20000087 PARAMETER Experiment Name: At_100uM_ABA_Mutants_cDNA_P Parameter: Timepoint (hr) Value: 6
  misc_feature: MA Experiment 20000087 PARAMETER Experiment Name: At_100uM_ABA_Mutants_cDNA_P Parameter: Tissue Value: Aerial
  misc_feature: MA Experiment 20000087 PARAMETER Experiment Name: At_100uM_ABA_Mutants_cDNA_P Parameter: Treatment Value: 100uM ABA vs. No Treatment
  misc_feature: MA Experiment ID: 20000090 Result: Down-regulated in Transcription
  misc_feature: MA Experiment ID: 20000185 Result: Down-regulated in Transcription
  misc_feature: MA Experiment 20000185 PARAMETER Experiment Name: At_Roots__P Parameter: Age (day) Value: 7 vs. 21
  misc_feature: MA Experiment 20000185 PARAMETER Experiment Name: At_Roots__P Parameter: Organism Value: A. thaliana
  misc_feature: MA Experiment 20000185 PARAMETER Experiment Name: At_Roots__P Parameter: Tissue Value: Roots vs. Whole Plant
  misc_feature: MA Experiment ID: 20001248 Result: Down-regulated in Transcription
  misc_feature: MA Experiment 20001248 PARAMETER Experiment Name: At_Far-red-induction_P Parameter: Age (day) Value: 7
  misc_feature: MA Experiment 20001248 PARAMETER Experiment Name: At_Far-red-induction_P Parameter: Light Value: Far-red vs. White
  misc_feature: MA Experiment 20001248 PARAMETER Experiment Name: At_Far-red-induction_P Parameter: Organism Value: A. thaliana
  misc_feature: MA Experiment 20001248 PARAMETER Experiment Name: At_Far-red-induction_P Parameter: Plant Line Value: Columbia
  misc_feature: MA Experiment 20001248 PARAMETER Experiment Name: At_Far-red-induction_P Parameter: Timepoint (hr) Value: 4
  misc_feature: MA Experiment 20001248 PARAMETER Experiment Name: At_Far-red-induction_P Parameter: Tissue Value: Whole Plant
  misc_feature: MA Experiment ID: 20001557 Result: Down-regulated in Transcription
  misc_feature: MA Experiment 20001557 PARAMETER Experiment Name: At_Drought_Soil_Dry_P Parameter: Age (day) Value: 27
  misc_feature: MA Experiment 20001557 PARAMETER Experiment Name: At_Drought_Soil_Dry_P Parameter: Organism Value: A. thaliana
  misc_feature: MA Experiment 20001557 PARAMETER Experiment Name: At_Drought_Soil_Dry_P Parameter: Plant Line Value: WS
  misc_feature: MA Experiment 20001557 PARAMETER Experiment Name: At_Drought_Soil_Dry_P Parameter: Post Timepoint (hr) Value: 3
  misc_feature: MA Experiment 20001557 PARAMETER Experiment Name: At_Drought_Soil_Dry_P Parameter: Post-Treatment Value: Re-Water vs. No Drought
  misc_feature: MA Experiment 20001557 PARAMETER Experiment Name: At_Drought_Soil_Dry_P Parameter: Timepoint (day) Value: 13
  misc_feature: MA Experiment 20001557 PARAMETER Experiment Name: At_Drought_Soil_Dry_P Parameter: Treatment Value: Drought vs. No Drought
  misc_feature: MA Experiment ID: 20001558 Result: Down-regulated in Transcription
  misc_feature: MA Experiment 20001558 PARAMETER Experiment Name: At_Drought_Soil_Dry_P Parameter: Age (day) Value: 27
  misc_feature: MA Experiment 20001558 PARAMETER Experiment Name: At_Drought_Soil_Dry_P Parameter: Organism Value: A. thaliana
  misc_feature: MA Experiment 20001558 PARAMETER Experiment Name: At_Drought_Soil_Dry_P Parameter: Plant Line Value: WS
  misc_feature: MA Experiment 20001558 PARAMETER Experiment Name: At_Drought_Soil_Dry_P Parameter: Post Timepoint (hr) Value: 6
  misc_feature: MA Experiment 20001558 PARAMETER Experiment Name: At_Drought_Soil_Dry_P Parameter: Post-Treatment Value: Re-Water vs. No Drought
  misc_feature: MA Experiment 20001558 PARAMETER Experiment Name: At_Drought_Soil_Dry_P Parameter: Timepoint (day) Value: 13
  misc_feature: MA Experiment 20001558 PARAMETER Experiment Name: At_Drought_Soil_Dry_P Parameter: Treatment Value: Drought vs. No Drought
  misc_feature: MA Experiment ID: 20001905 Result: Down-regulated in Transcription
  misc_feature: MA Experiment 20001905 PARAMETER Experiment Name: At_Drought_Reproduction_P Parameter: Age (day) Value: 40
  misc_feature: MA Experiment 20001905 PARAMETER Experiment Name: At_Drought_Reproduction_P Parameter: Organism Value: A. thaliana
  misc_feature: MA Experiment 20001905 PARAMETER Experiment Name: At_Drought_Reproduction_P Parameter: Plant Line Value: WS
  misc_feature: MA Experiment 20001905 PARAMETER Experiment Name: At_Drought_Reproduction_P Parameter: Timepoint (day) Value: 10
  misc_feature: MA Experiment 20001905 PARAMETER Experiment Name: At_Drought_Reproduction_P Parameter: Tissue Value: Rosettes
  misc_feature: MA Experiment 20001905 PARAMETER Experiment Name: At_Drought_Reproduction_P Parameter: Treatment Value: Drought vs. No Drought
gacctttggtttctgtgttgtgtgatatttactacgaaaccacttgtcaccaaaggttcttctttcttttagcgttgggttcgtgattccaagatcaatggttgtgaacttcactagttagagatactgaatcaaagagatgattcttccgagaattgggtaaatctatcgattctgattttctggattaaagaactagtaacctattttcattccatagcttcttcagatcatacattctcgcaagtgttcgatacgggtgtagaagaagaagagtctttctatgctcctgatcatgatgtcttgactctgcttcaacctaacttcaccaccaacgatgtctagtagtaccaagaacattccaaaacctcctcctcttccttgtattacctaccagcgttttcaatctagtacaaggaaaccttcgagcttaatgcgccttgtgcctaaagaagcacttgaaacttgggataagcttttcaaggaaggatctggagcagatacatatgttgaaaccgataacaagtctcactttcctgcccattcaagtgtcctggctgcagcctcaccagttatagcgacacttctgaatcaatcgagggataagaatgggaatacatacctcaaaatccatggagttccttgtgaagcagtctacatgttcattaggtttctatactcttcctgctacgaggaggaagaaatgaagaagtttgtgctccatttattggttctgtcacattgctactcggtcccatctcttaaaagactttgtgtagagattctcgatcaaggatggattaacaaggagaatgtgatcgatgtgcttcaactagcgagaaactgtgacgtgacaaggatttgctttgtatgtctttccatggtcatcaaagacttcaaatctgtatcttcaacagagggatggaaagtgatgaaacgctctaatcctttgctcgaacaagagctcattgaggcagtcatcgaatccgacagtaggaaacaagaaagaagaagaaaactggaggagagagaagtgtatttgcagctctatgaagccatggaagctcttgtccacatatgtcgtgaaggttgtgggacaattggacctcgcgataaggcccttaaaggaagccataccgtgtgtaaattcccggcgtgtaaagggcttgaaggtgcgctcagacatttcttgggatgcaagtctagggcttcatgttctcattgcaaaaggatgtggcagcttcttcagcttcactcttgtatctgtgatgattctaattcttgcaaagtttctctctgctggaatttcaaggagaaaatgaagaagcttagcaagaaagaacaatctaaatggcgattgcttgtagaaaacattattagggcgaggaacagtctcgggcccttctcgtcacgtccttctggtttgatatagaaacaggttttagattttagtgtatagccagttagacacaaaaagaaaacgtacataggcgcagggtatagtgtatattgcgcaccaatacggcgcacaatagtggttttgaacaaacattgtctatatcaagttggttgttatat

SEQ ID NO: 20724 - protein, 364 aa, Arabidopsis thaliana
  peptide (1)..(364): Ceres Seq. ID no. 12421855
  misc_feature (44)..(154): Pfam Name: BTB/POZ domain Pfam Description: BTB/POZ domain
  misc_feature (45)..(350): Homolog of NCBI NO: 7487530 NR Description: hypothetical protein T29H11.120 - Arabidopsis
  misc_feature (45)..(350): Homolog of NCBI NO: 18408618 NR Description: putative protein
  misc_feature (55)..(364): Homolog of NCBI NO: 15242656 NR Description: putative protein; protein id: At5g63160.1
  misc_feature (1)..(291): Homolog of NCBI NO: 34907566 NR Description: B1078G07.24 [Oryza sativa (japonica
  misc_feature (4)..(356): Homolog of NCBI NO: 18420081 NR Description: putative protein
  misc_feature (4)..(356): Homolog of NCBI NO: 26453150 NR Description: unknown protein [Arabidopsis thaliana]
  misc_feature (4)..(356): Homolog of NCBI NO: 7485765 NR Description: hypothetical protein F19F18.100 - Arabidopsis
  misc_feature (4)..(356): Homolog of NCBI NO: 21537174 NR Description: unknown [Arabidopsis thaliana]
  misc_feature (2)..(356): Homolog of NCBI NO: 15240763 NR Description: putative protein
  misc_feature (1)..(322): Homolog of NCBI NO: 15221235 NR Description: hypothetical protein; protein id: At1g05690.1
MSSSTKNIPKPPPLPCITYQRFQSSTRKPSSLMRLVPKEALETWDKLFKEGSGADTYVETDNKSHFPAHSSVLAAASPVIATLLNQSRDKNGNTYLKIHGVPCEAVYMFIRFLYSSCYEEEEMKKFVLHLLVLSHCYSVPSLKRLCVEILDQGWINKENVIDVLQLARNCDVTRICFVCLSMVIKDFKSVSSTEGWKVMKRSNPLLEQELIEAVIESDSRKQERRRKLEEREVYLQLYEAMEALVHICREGCGTIGPRDKALKGSHTVCKFPACKGLEGALRHFLGCKSRASCSHCKRMWQLLQLHSCICDDSNSCKVSLCWNFKEKMKKLSKKEQSKWRLLVENIIRARNSLGPFSSRPSGLI

SEQ ID NO: 20725 - protein, 332 aa, Arabidopsis thaliana
  peptide (1)..(332): Ceres Seq. ID no. 12421856
  misc_feature (12)..(122): Pfam Name: BTB/POZ domain Pfam Description: BTB/POZ domain
  misc_feature (13)..(318): Homolog of NCBI NO: 7487530 NR Description: hypothetical protein T29H11.120 - Arabidopsis
  misc_feature (13)..(318): Homolog of NCBI NO: 18408618 NR Description: putative protein
  misc_feature (23)..(332): Homolog of NCBI NO: 15242656 NR Description: putative protein; protein id: At5g63160.1
  misc_feature (1)..(259): Homolog of NCBI NO: 34907566 NR Description: B1078G07.24 [Oryza sativa (japonica
  misc_feature (1)..(324): Homolog of NCBI NO: 26453150 NR Description: unknown protein [Arabidopsis thaliana]
  misc_feature (1)..(324): Homolog of NCBI NO: 18420081 NR Description: putative protein
  misc_feature (1)..(324): Homolog of NCBI NO: 7485765 NR Description: hypothetical protein F19F18.100 - Arabidopsis
  misc_feature (1)..(324): Homolog of NCBI NO: 21537174 NR Description: unknown [Arabidopsis thaliana]
  misc_feature (1)..(324): Homolog of NCBI NO: 15240763 NR Description: putative protein
  misc_feature (1)..(290): Homolog of NCBI NO: 15221235 NR Description: hypothetical protein; protein id: At1g05690.1
MRLVPKEALETWDKLFKEGSGADTYVETDNKSHFPAHSSVLAAASPVIATLLNQSRDKNGNTYLKIHGVPCEAVYMFIRFLYSSCYEEEEMKKFVLHLLVLSHCYSVPSLKRLCVEILDQGWINKENVIDVLQLARNCDVTRICFVCLSMVIKDFKSVSSTEGWKVMKRSNPLLEQELIEAVIESDSRKQERRRKLEEREVYLQLYEAMEALVHICREGCGTIGPRDKALKGSHTVCKFPACKGLEGALRHFLGCKSRASCSHCKRMWQLLQLHSCICDDSNSCKVSLCWNFKEKMKKLSKKEQSKWRLLVENIIRARNSLGPFSSRPSGLI

SEQ ID NO: 20726 - protein, 257 aa, Arabidopsis thaliana
  peptide (1)..(257): Ceres Seq. ID no. 12421857
  misc_feature (122)..(214): Pfam Name: TAZ zinc finger Pfam Description: TAZ zinc finger
  misc_feature (1)..(243): Homolog of NCBI NO: 7487530 NR Description: hypothetical protein T29H11.120 - Arabidopsis
  misc_feature (1)..(243): Homolog of NCBI NO: 18408618 NR Description: putative protein
  misc_feature (1)..(257): Homolog of NCBI NO: 15242656 NR Description: putative protein; protein id: At5g63160.1
  misc_feature (1)..(184): Homolog of NCBI NO: 34907566 NR Description: B1078G07.24 [Oryza sativa (japonica
  misc_feature (1)..(249): Homolog of NCBI NO: 26453150 NR Description: unknown protein [Arabidopsis thaliana]
  misc_feature (1)..(249): Homolog of NCBI NO: 18420081 NR Description: putative protein
  misc_feature (1)..(249): Homolog of NCBI NO: 7485765 NR Description: hypothetical protein F19F18.100 - Arabidopsis
  misc_feature (1)..(249): Homolog of NCBI NO: 21537174 NR Description: unknown [Arabidopsis thaliana]
  misc_feature (1)..(249): Homolog of NCBI NO: 15240763 NR Description: putative protein
  misc_feature (1)..(215): Homolog of NCBI NO: 15221235 NR Description: hypothetical protein; protein id: At1g05690.1
MFIRFLYSSCYEEEEMKKFVLHLLVLSHCYSVPSLKRLCVEILDQGWINKENVIDVLQLARNCDVTRICFVCLSMVIKDFKSVSSTEGWKVMKRSNPLLEQELIEAVIESDSRKQERRRKLEEREVYLQLYEAMEALVHICREGCGTIGPRDKALKGSHTVCKFPACKGLEGALRHFLGCKSRASCSHCKRMWQLLQLHSCICDDSNSCKVSLCWNFKEKMKKLSKKEQSKWRLLVENIIRARNSLGPFSSRPSGLI

SEQ ID NO: 20727 - DNA, 957 bp, Arabidopsis thaliana
  misc_feature (1)..(957): Ceres Seq. ID no. 12558659
  misc_feature: MA Experiment ID: 20000184 Result: Down-regulated in Transcription
  misc_feature: MA Experiment 20000184 PARAMETER Experiment Name: At_Shoots__P Parameter: Age (day) Value: 7
  misc_feature: MA Experiment 20000184 PARAMETER Experiment Name: At_Shoots__P Parameter: Tissue Value: Shoots vs. Whole Plant
  misc_feature: MA Experiment ID: 20000794 Result: Up-regulated in Transcription
  misc_feature: MA Experiment 20000794 PARAMETER Experiment Name: At_Petals_P Parameter: Age (day) Value: 23-25 days
  misc_feature: MA Experiment 20000794 PARAMETER Experiment Name: At_Petals_P Parameter: Plant Line Value: WS
  misc_feature: MA Experiment 20000794 PARAMETER Experiment Name: At_Petals_P Parameter: Tissue Value: Petals vs. Whole plant
  misc_feature: MA Experiment ID: 20001247 Result: Up-regulated in Transcription
  misc_feature: MA Experiment 20001247 PARAMETER Experiment Name: At_Far-red-induction_P Parameter: Age (day) Value: 7
  misc_feature: MA Experiment 20001247 PARAMETER Experiment Name: At_Far-red-induction_P Parameter: Light Value: Far-red vs. White
  misc_feature: MA Experiment 20001247 PARAMETER Experiment Name: At_Far-red-induction_P Parameter: Organism Value: A. thaliana
  misc_feature: MA Experiment 20001247 PARAMETER Experiment Name: At_Far-red-induction_P Parameter: Plant Line Value: Columbia
  misc_feature: MA Experiment 20001247 PARAMETER Experiment Name: At_Far-red-induction_P Parameter: Timepoint (hr) Value: 1
  misc_feature: MA Experiment 20001247 PARAMETER Experiment Name: At_Far-red-induction_P Parameter: Tissue Value: Whole Plant
  misc_feature: MA Experiment ID: 20001450 Result: Up-regulated in Transcription
  misc_feature: MA Experiment 20001450 PARAMETER Experiment Name: At_Far-red-induction_P Parameter: Age (day) Value: 7
  misc_feature: MA Experiment 20001450 PARAMETER Experiment Name: At_Far-red-induction_P Parameter: Light Value: Far-red vs. White
  misc_feature: MA Experiment 20001450 PARAMETER Experiment Name: At_Far-red-induction_P Parameter: Organism Value: A. thaliana
  misc_feature: MA Experiment 20001450 PARAMETER Experiment Name: At_Far-red-induction_P Parameter: Plant Line Value: Columbia
  misc_feature: MA Experiment 20001450 PARAMETER Experiment Name: At_Far-red-induction_P Parameter: Timepoint (hr) Value: 8
  misc_feature: MA Experiment 20001450 PARAMETER Experiment Name: At_Far-red-induction_P Parameter: Tissue Value: Whole Plant
  misc_feature: MA Experiment ID: 20001451 Result: Up-regulated in Transcription
  misc_feature: MA Experiment 20001451 PARAMETER Experiment Name: At_Far-red-induction_P Parameter: Age (day) Value: 7
  misc_feature: MA Experiment 20001451 PARAMETER Experiment Name: At_Far-red-induction_P Parameter: Light Value: Far-red vs. White
  misc_feature: MA Experiment 20001451 PARAMETER Experiment Name: At_Far-red-induction_P Parameter: Organism Value: A. thaliana
  misc_feature: MA Experiment 20001451 PARAMETER Experiment Name: At_Far-red-induction_P Parameter: Plant Line Value: Columbia
  misc_feature: MA Experiment 20001451 PARAMETER Experiment Name: At_Far-red-induction_P Parameter: Timepoint (hr) Value: 24
  misc_feature: MA Experiment 20001451 PARAMETER Experiment Name: At_Far-red-induction_P Parameter: Tissue Value: Whole Plant
attaattcattatcatcaaataatacagcagcaacacagcaacacagtaaaacccaattccctaatcccaaaattcgatctctcatctgatggctggttacagagccgatgaagagtacgattacctcttcaagctcgtgttgatcggcgactctggtgtcggcaaatcgaatctgctctctcggttcaccaagaacgagttcaatctcgaatccaagtctactattggtgttgagttcgctaccaaaaccactaaagtcgaaggcaaagtcgtcaaagctcagatttgggatactgctggtcaagagagataccgagcaatcacaagcgcttattacagaggagctgttggtgctttgcttatttacgacgtgacaaggcacgcaacatttgagaatgcagcaagatggctaagggaactaagaggacacacagacccaaacatagtggtgatgcttatagggaacaagtgcgatctgcgtcacttggtggcagtcaaaacagaagaggctaaagcctttgctgagagagaatccctctatttcatggagacttcagctctagacgcaaccaatgttgaaaacgcattcacggaagtgctcactcagatccacaagatagtgagcaaaagaagtgttgatggaggaggagagtcggctgatttaccgggaaaaggagagacgataaacgttaaagaagacggatcggttcttaagagaatgggttgctgctctaactagagtggggggattgtagatttggcttgatttggttagggtgagacaacaaatgataatctctttgggtcttgcaatcaaaaaagaaataagaaacgattacttttaagatcatgtgtatgctttggtaactttggcctgtaaggtcctttaaaatttaagtacatgattggtaatttgtttttcaaaaaaaaaaaaaaaaaagcttatcgatccgtcg

SEQ ID NO: 20728 - protein, 216 aa, Arabidopsis thaliana
  peptide (1)..(216): Ceres Seq. ID no. 12558660
  misc_feature (15)..(176): Pfam Name: Ras family Pfam Description: Ras family
  misc_feature (1)..(215): Homolog of NCBI NO: 3024502 NR Description: RAS-RELATED PROTEIN RAB11D
  misc_feature (1)..(216): Homolog of NCBI NO: 15221477 NR Description: Ras-related GTP-binding protein (RAB11D)
MAGYRADEEYDYLFKLVLIGDSGVGKSNLLSRFTKNEFNLESKSTIGVEFATKTTKVEGKVVKAQIWDTAGQERYRAITSAYYRGAVGALLIYDVTRHATFENAARWLRELRGHTDPNIVVMLIGNKCDLRHLVAVKTEEAKAFAERESLYFMETSALDATNVENAFTEVLTQIHKIVSKRSVDGGGESADLPGKGETINVKEDGSVLKRMGCCSN

SEQ ID NO: 20729 - DNA, 1462 bp, Arabidopsis thaliana
  misc_feature (1)..(1462): Ceres Seq. ID no. 12578784
  misc_feature: MA Experiment ID: 108462 Result: Up-regulated in Transcription
  misc_feature: MA Experiment 108462 PARAMETER Experiment Name: At_Germinating_Seeds_cDNA_P Parameter: Age (day) Value: 2 vs. 0
  misc_feature: MA Experiment 108462 PARAMETER Experiment Name: At_Germinating_Seeds_cDNA_P Parameter: Tissue Value: Germinating Seeds
  misc_feature: MA Experiment ID: 108488 Result: Down-regulated in Transcription
  misc_feature: MA Experiment ID: 108573 Result: Up-regulated in Transcription
  misc_feature: MA Experiment 108573 PARAMETER Experiment Name: At_Drought_cDNA_P Parameter: Timepoint (hr) Value: 6
  misc_feature: MA Experiment 108573 PARAMETER Experiment Name: At_Drought_cDNA_P Parameter: Tissue Value: Aerial
  misc_feature: MA Experiment 108573 PARAMETER Experiment Name: At_Drought_cDNA_P Parameter: Treatment Value: Drought vs. No Drought
  misc_feature: MA Experiment ID: 108577 Result: Down-regulated in Transcription
  misc_feature: MA Experiment 108577 PARAMETER Experiment Name: At_42deg_Heat_cDNA_P Parameter: Temperature (deg C) Value: 42 vs. 22
  misc_feature: MA Experiment 108577 PARAMETER Experiment Name: At_42deg_Heat_cDNA_P Parameter: Timepoint (hr) Value: 6
  misc_feature: MA Experiment 108577 PARAMETER Experiment Name: At_42deg_Heat_cDNA_P Parameter: Tissue Value: Aerial
  misc_feature: MA Experiment ID: 108585 Result: Up-regulated in Transcription
  misc_feature: MA Experiment 108585 PARAMETER Experiment Name: At_5mM_NaNP_cDNA_P Parameter: Timepoint (hr) Value: 6
  misc_feature: MA Experiment 108585 PARAMETER Experiment Name: At_5mM_NaNP_cDNA_P Parameter: Tissue Value: Aerial
  misc_feature: MA Experiment 108585 PARAMETER Experiment Name: At_5mM_NaNP_cDNA_P Parameter: Treatment Value: null
  misc_feature: MA Experiment ID: 108595 Result: Down-regulated in Transcription
  misc_feature: MA Experiment 108595 PARAMETER Experiment Name: At_Ler-pi_Ovule_cDNA_P Parameter: Plant Line Value: null
  misc_feature: MA Experiment ID: 20000224 Result: Down-regulated in Transcription
  misc_feature: MA Experiment ID: 20000307 Result: Up-regulated in Transcription
  misc_feature: MA Experiment 20000307 PARAMETER Experiment Name: At_Germinating_Seeds_Sub_P Parameter: Age (hr) Value: 24 vs. 0
  misc_feature: MA Experiment 20000307 PARAMETER Experiment Name: At_Germinating_Seeds_Sub_P Parameter: Organism Value: A. thaliana
  misc_feature: MA Experiment 20000307 PARAMETER Experiment Name: At_Germinating_Seeds_Sub_P Parameter: Plant Line Value: WS
  misc_feature: MA Experiment 20000307 PARAMETER Experiment Name: At_Germinating_Seeds_Sub_P Parameter: Tissue Value: Germinating Seeds
  misc_feature: MA Experiment ID: 20000327 Result: Down-regulated in Transcription
  misc_feature: MA Experiment 20000327 PARAMETER Experiment Name: At_42deg_Heat_Sub_P Parameter: Age (day) Value: 14
  misc_feature: MA Experiment 20000327 PARAMETER Experiment Name: At_42deg_Heat_Sub_P Parameter: Organism Value: A. thaliana
  misc_feature: MA Experiment 20000327 PARAMETER Experiment Name: At_42deg_Heat_Sub_P Parameter: Plant Line Value: WS
  misc_feature: MA Experiment 20000327 PARAMETER Experiment Name: At_42deg_Heat_Sub_P Parameter: Temperature (deg C) Value: 42 vs. 22
  misc_feature: MA Experiment 20000327 PARAMETER Experiment Name: At_42deg_Heat_Sub_P Parameter: Timepoint (hr) Value: 1
  misc_feature: MA Experiment 20000327 PARAMETER Experiment Name: At_42deg_Heat_Sub_P Parameter: Tissue Value: Aerial
  misc_feature: MA Experiment ID: 20000328 Result: Down-regulated in Transcription
  misc_feature: MA Experiment 20000328 PARAMETER Experiment Name: At_42deg_Heat_Sub_P Parameter: Age (day) Value: 14
  misc_feature: MA Experiment 20000328 PARAMETER Experiment Name: At_42deg_Heat_Sub_P Parameter: Organism Value: A. thaliana
  misc_feature: MA Experiment 20000328 PARAMETER Experiment Name: At_42deg_Heat_Sub_P Parameter: Plant Line Value: WS
  misc_feature: MA Experiment 20000328 PARAMETER Experiment Name: At_42deg_Heat_Sub_P Parameter: Temperature (deg C) Value: 42 vs. 22
  misc_feature: MA Experiment 20000328 PARAMETER Experiment Name: At_42deg_Heat_Sub_P Parameter: Timepoint (hr) Value: 6
  misc_feature: MA Experiment 20000328 PARAMETER Experiment Name: At_42deg_Heat_Sub_P Parameter: Tissue Value: Aerial
ctccgatgtttcaaaaacaaagtcgattacgctagaatccatggtcacgacatcttctacagcaattctcttcttcatccgaagatgaattcgtattgggcgaaacttccggtggttaaagctgcgatgcttgctcacccatttatggattgaagctttagagagaaaatgggtgatgaggcagagatcaaggaacatttaaagccacaagcttcatctgaaacaatagacaagaaacataatgtgaaagggaagaggttatggcagaaagtcaagtatcaattggtggagtttcattcattgcctgcttatttaagagacaatgagtacatcattggtcattaccgatccgaatggcggatcaaacagattcttctcagcatctttaccattcataatgagactttgaatgtttggacgcatttgattgggtttttcctgtttttggcactcactatatacactgcaacgaaagtaccgagtgtcgtggatcttcattcgcttcaacaccgtttacccgatttgttgaggaaaacagatctccacaaacttcattctgagctcatgtctcgccttccttctagtccatctagttggcatgtgatggaccttctttataactgtttgcctgaaagattttctcatggcaactacactgacatgtgtgttctgcattctgtgagggaagatcttgcaaacttgatagctcctttgatcttcaggccaattactcgatggccgttttatgcatttctaggtggtgctatattctgtctattagcaagcagcacgtgccacctcctctcatgtcactccgagcgagtctcctacataatgcttaggcttgattacgccggcatcgcagctctaatagcgacttccttctaccctccggtttattactccttcatgtgtgatcctttcttctgcaacctctacttaggattcataaccatcttaggaatcgccactgtgcttgtttctctcctcccggttttccaaagcctggagtttcgggtggtgagggcgtctctgttctttggaatgggattctctggcttagctccgattcttcacaagctgatcatcttttgggaccaacctgaagcccttcacatgacaggttatgagattttgatgggtttgctttatgggttaggagctgtggtttatgcaactaggatcccagagagatggatgccgggtaaattcgatatagcaggacatagccatcagttgtttcatgttctggttgttgctggtgcgttaacgcactatagagctgggctagtgtatcttaagtggagagatattgaaggatgttgaagatgaagattgaagattagatggaatctttgatgttttaaatcttgtttgtagtagcttcatataaaagttggattatgtaaagtcttatctgtaatcaaacgtttaattgtttcttttattcaacaaaggattc

SEQ ID NO: 20730 - protein, 385 aa, Arabidopsis thaliana
  peptide (1)..(385): Ceres Seq. ID no. 12578785
  misc_feature (73)..(374): Pfam Name: Uncharacterised protein family (Hly-III / UPF0073) Pfam Description: Uncharacterised protein family (Hly-III /
  misc_feature (34)..(106): Homolog of NCBI NO: 13272399 NR Description: hypothetical protein [Arabidopsis thaliana]
  misc_feature (22)..(100): Homolog of NCBI NO: 18377749 NR Description: unknown protein [Arabidopsis thaliana]
  misc_feature (187)..(369): Homolog of NCBI NO: 18400468 NR Description: expressed protein
  misc_feature (187)..(369): Homolog of NCBI NO: 13272399 NR Description: hypothetical protein [Arabidopsis thaliana]
  misc_feature (164)..(380): Homolog of NCBI NO: 18377749 NR Description: unknown protein [Arabidopsis thaliana]
  misc_feature (9)..(97): Homolog of NCBI NO: 15241302 NR Description: putative protein
  misc_feature (187)..(385): Homolog of NCBI NO: 15241302 NR Description: putative protein
  misc_feature (108)..(334): Homolog of NCBI NO: 20330770 NR Description: Hypothetical protein [Oryza sativa (japonica
  misc_feature (1)..(374): Homolog of NCBI NO: 15233813 NR Description: putative protein; protein id: At4g38320.1
  misc_feature (1)..(385): Homolog of NCBI NO: 15235657 NR Description: expressed protein
MGDEAEIKEHLKPQASSETIDKKHNVKGKRLWQKVKYQLVEFHSLPAYLRDNEYIIGHYRSEWRIKQILLSIFTIHNETLNVWTHLIGFFLFLALTIYTATKVPSVVDLHSLQHRLPDLLRKTDLHKLHSELMSRLPSSPSSWHVMDLLYNCLPERFSHGNYTDMCVLHSVREDLANLIAPLIFRPITRWPFYAFLGGAIFCLLASSTCHLLSCHSERVSYIMLRLDYAGIAALIATSFYPPVYYSFMCDPFFCNLYLGFITILGIATVLVSLLPVFQSLEFRVVRASLFFGMGFSGLAPILHKLIIFWDQPEALHMTGYEILMGLLYGLGAVVYATRIPERWMPGKFDIAGHSHQLFHVLVVAGALTHYRAGLVYLKWRDIEGC

SEQ ID NO: 20731 - protein, 253 aa, Arabidopsis thaliana
  peptide (1)..(253): Ceres Seq. ID no. 12578786
  misc_feature (1)..(242): Pfam Name: Uncharacterised protein family (Hly-III / UPF0073) Pfam Description: Uncharacterised protein family (Hly-III /
  misc_feature (60)..(238): Homolog of NCBI NO: 24649047 NR Description: CG5315-PA [Drosophila melanogaster]
  misc_feature (74)..(237): Homolog of NCBI NO: 25309925 NR Description: hypothetical protein At2g24150 [imported] -
  misc_feature (32)..(248): Homolog of NCBI NO: 30688829 NR Description: expressed protein [Arabidopsis thaliana]
  misc_feature (55)..(237): Homolog of NCBI NO: 18400468 NR Description: expressed protein
  misc_feature (55)..(237): Homolog of NCBI NO: 13272399 NR Description: hypothetical protein [Arabidopsis thaliana]
  misc_feature (32)..(248): Homolog of NCBI NO: 18377749 NR Description: unknown protein [Arabidopsis thaliana]
  misc_feature (55)..(253): Homolog of NCBI NO: 15241302 NR Description: putative protein
  misc_feature (1)..(202): Homolog of NCBI NO: 20330770 NR Description: Hypothetical protein [Oryza sativa (japonica
  misc_feature (1)..(242): Homolog of NCBI NO: 15233813 NR Description: putative protein; protein id: At4g38320.1
  misc_feature (1)..(253): Homolog of NCBI NO: 15235657 NR Description: expressed protein
MSRLPSSPSSWHVMDLLYNCLPERFSHGNYTDMCVLHSVREDLANLIAPLIFRPITRWPFYAFLGGAIFCLLASSTCHLLSCHSERVSYIMLRLDYAGIAALIATSFYPPVYYSFMCDPFFCNLYLGFITILGIATVLVSLLPVFQSLEFRVVRASLFFGMGFSGLAPILHKLIIFWDQPEALHMTGYEILMGLLYGLGAVVYATRIPERWMPGKFDIAGHSHQLFHVLVVAGALTHYRAGLVYLKWRDIEGC

SEQ ID NO: 20732 - protein, 240 aa, Arabidopsis thaliana
  peptide (1)..(240): Ceres Seq. ID no. 12578787
  misc_feature (1)..(229): Pfam Name: Uncharacterised protein family (Hly-III / UPF0073) Pfam Description: Uncharacterised protein family (Hly-III /
  misc_feature (47)..(225): Homolog of NCBI NO: 24649047 NR Description: CG5315-PA [Drosophila melanogaster]
  misc_feature (61)..(224): Homolog of NCBI NO: 25309925 NR Description: hypothetical protein At2g24150 [imported] -
  misc_feature (19)..(235): Homolog of NCBI NO: 30688829 NR Description: expressed protein [Arabidopsis thaliana]
  misc_feature (42)..(224): Homolog of NCBI NO: 18400468 NR Description: expressed protein
  misc_feature (42)..(224): Homolog of NCBI NO: 13272399 NR Description: hypothetical protein [Arabidopsis thaliana]
  misc_feature (19)..(235): Homolog of NCBI NO: 18377749 NR Description: unknown protein [Arabidopsis thaliana]
  misc_feature (42)..(240): Homolog of NCBI NO: 15241302 NR Description: putative protein
  misc_feature (1)..(189): Homolog of NCBI NO: 20330770 NR Description: Hypothetical protein [Oryza sativa (japonica
  misc_feature (1)..(229): Homolog of NCBI NO: 15233813 NR Description: putative protein; protein id: At4g38320.1
  misc_feature (1)..(240): Homolog of NCBI NO: 15235657 NR Description: expressed protein
MDLLYNCLPERFSHGNYTDMCVLHSVREDLANLIAPLIFRPITRWPFYAFLGGAIFCLLASSTCHLLSCHSERVSYIMLRLDYAGIAALIATSFYPPVYYSFMCDPFFCNLYLGFITILGIATVLVSLLPVFQSLEFRVVRASLFFGMGFSGLAPILHKLIIFWDQPEALHMTGYEILMGLLYGLGAVVYATRIPERWMPGKFDIAGHSHQLFHVLVVAGALTHYRAGLVYLKWRDIEGC

SEQ ID NO: 20733 - DNA, 2159 bp, Arabidopsis thaliana
  misc_feature (1)..(2159): Ceres Seq. ID no. 12336358
  misc_feature: MA Experiment ID: 108561 Result: Up-regulated in Transcription
  misc_feature: MA Experiment 108561 PARAMETER Experiment Name: At_100uM_ABA_cDNA_P Parameter: Timepoint (hr) Value: 6
  misc_feature: MA Experiment 108561 PARAMETER Experiment Name: At_100uM_ABA_cDNA_P Parameter: Tissue Value: Aerial
  misc_feature: MA Experiment 108561 PARAMETER Experiment Name: At_100uM_ABA_cDNA_P Parameter: Treatment Value: 100uM ABA vs. No Treatment
  misc_feature: MA Experiment ID: 108594 Result: Up-regulated in Transcription
  misc_feature: MA Experiment 108594 PARAMETER Experiment Name: At_Ler-rhl_Root_cDNA_P Parameter: Plant Line Value: null
  misc_feature: MA Experiment ID: 20000072 Result: Up-regulated in Transcription
  misc_feature: MA Experiment 20000072 PARAMETER Experiment Name: At_100uM_ABA_Mutants_cDNA_P Parameter: Plant Line Value: CS8105
  misc_feature: MA Experiment 20000072 PARAMETER Experiment Name: At_100uM_ABA_Mutants_cDNA_P Parameter: Timepoint (hr) Value: 6
  misc_feature: MA Experiment 20000072 PARAMETER Experiment Name: At_100uM_ABA_Mutants_cDNA_P Parameter: Tissue Value: Aerial
  misc_feature: MA Experiment 20000072 PARAMETER Experiment Name: At_100uM_ABA_Mutants_cDNA_P Parameter: Treatment Value: 100uM ABA vs. No Treatment
  misc_feature: MA Experiment ID: 20000173 Result: Down-regulated in Transcription
  misc_feature: MA Experiment 20000173 PARAMETER Experiment Name: At_42deg_Heat_P Parameter: Age (day) Value: 14
  misc_feature: MA Experiment 20000173 PARAMETER Experiment Name: At_42deg_Heat_P Parameter: Organism Value: A. thaliana
  misc_feature: MA Experiment 20000173 PARAMETER Experiment Name: At_42deg_Heat_P Parameter: Plant Line Value: WS
  misc_feature: MA Experiment 20000173 PARAMETER Experiment Name: At_42deg_Heat_P Parameter: Temperature (deg C) Value: 42 vs. 22
  misc_feature: MA Experiment 20000173 PARAMETER Experiment Name: At_42deg_Heat_P Parameter: Timepoint (hr) Value: 6
  misc_feature: MA Experiment 20000173 PARAMETER Experiment Name: At_42deg_Heat_P Parameter: Tissue Value: Aerial
  misc_feature: MA Experiment ID: 20000179 Result: Up-regulated in Transcription
  misc_feature: MA Experiment 20000179 PARAMETER Experiment Name: At_Germinating_Seeds_P Parameter: Age (hr) Value: 6 vs. 0
  misc_feature: MA Experiment 20000179 PARAMETER Experiment Name: At_Germinating_Seeds_P Parameter: Tissue Value: Germinating Seeds
  misc_feature: MA Experiment ID: 20000184 Result: Down-regulated in Transcription
  misc_feature: MA Experiment 20000184 PARAMETER Experiment Name: At_Shoots__P Parameter: Age (day) Value: 7
  misc_feature: MA Experiment 20000184 PARAMETER Experiment Name: At_Shoots__P Parameter: Tissue Value: Shoots vs. Whole Plant
  misc_feature: MA Experiment ID: 20000214 Result: Down-regulated in Transcription
  misc_feature: MA Experiment 20000214 PARAMETER Experiment Name: At_4deg_Cold_P Parameter: Timepoint (hr) Value: 6
  misc_feature: MA Experiment ID: 20000264 Result: Up-regulated in Transcription
  misc_feature: MA Experiment 20000264 PARAMETER Experiment Name: At_Open_Flower_P Parameter: Age (day) Value: 21
  misc_feature: MA Experiment 20000264 PARAMETER Experiment Name: At_Open_Flower_P Parameter: Plant Line Value: WS
  misc_feature: MA Experiment 20000264 PARAMETER Experiment Name: At_Open_Flower_P Parameter: Tissue Value: Open Flower vs. Whole Plant
  misc_feature: MA Experiment ID: 20000265 Result: Up-regulated in Transcription
  misc_feature: MA Experiment 20000265 PARAMETER Experiment Name: At_Open_Flower_P Parameter: Age (day) Value: 21
  misc_feature: MA Experiment 20000265 PARAMETER Experiment Name: At_Open_Flower_P Parameter: Plant Line Value: WS
  misc_feature: MA Experiment 20000265 PARAMETER Experiment Name: At_Open_Flower_P Parameter: Tissue Value: Closed Flower vs. Whole Plant
  misc_feature: MA Experiment ID: 20000286 Result: Up-regulated in Transcription
  misc_feature: MA Experiment 20000286 PARAMETER Experiment Name: At_Open_Flower_P Parameter: Age (day) Value: 21
  misc_feature: MA Experiment 20000286 PARAMETER Experiment Name: At_Open_Flower_P Parameter: Plant Line Value: WS
  misc_feature: MA Experiment 20000286 PARAMETER Experiment Name: At_Open_Flower_P Parameter: Tissue Value: Half Open vs. Whole Plant
  misc_feature: MA Experiment ID: 20000437 Result: Up-regulated in Transcription
  misc_feature: MA Experiment 20000437 PARAMETER Experiment Name: At_Drought_P Parameter: Age (day) Value: 8
  misc_feature: MA Experiment 20000437 PARAMETER Experiment Name: At_Drought_P Parameter: Organism Value: A. thaliana
  misc_feature: MA Experiment 20000437 PARAMETER Experiment Name: At_Drought_P Parameter: Plant Line Value: WS
  misc_feature: MA Experiment 20000437 PARAMETER Experiment Name: At_Drought_P Parameter: Timepoint (hr) Value: 24
  misc_feature: MA Experiment 20000437 PARAMETER Experiment Name: At_Drought_P Parameter: Tissue Value: Whole Plant
  misc_feature: MA Experiment 20000437 PARAMETER Experiment Name: At_Drought_P Parameter: Treatment Value: Drought vs. No Drought
  misc_feature: MA Experiment ID: 20000527 Result: Down-regulated in Transcription
  misc_feature: MA Experiment 20000527 PARAMETER Experiment Name: At_10percent_PEG_P Parameter: Age (day) Value: 20
  misc_feature: MA Experiment 20000527 PARAMETER Experiment Name: At_10percent_PEG_P Parameter: Organism Value: A. thaliana
  misc_feature: MA Experiment 20000527 PARAMETER Experiment Name: At_10percent_PEG_P Parameter: Plant Line Value: WS
  misc_feature: MA Experiment 20000527 PARAMETER Experiment Name: At_10percent_PEG_P Parameter: Timepoint (day) Value: 20
  misc_feature: MA Experiment 20000527 PARAMETER Experiment Name: At_10percent_PEG_P Parameter: Tissue Value: Whole Plant
  misc_feature: MA Experiment 20000527 PARAMETER Experiment Name: At_10percent_PEG_P Parameter: Treatment Value: 10percent PEG vs. No Treatment
  misc_feature: MA Experiment ID: 20000794 Result: Up-regulated in Transcription
  misc_feature: MA Experiment 20000794 PARAMETER Experiment Name: At_Petals_P Parameter: Age (day) Value: 23-25 days
  misc_feature: MA Experiment 20000794 PARAMETER Experiment Name: At_Petals_P Parameter: Plant Line Value: WS
  misc_feature: MA Experiment 20000794 PARAMETER Experiment Name: At_Petals_P Parameter: Tissue Value: Petals vs. Whole plant
  misc_feature: MA Experiment ID: 20001247 Result: Up-regulated in Transcription
  misc_feature: MA Experiment 20001247 PARAMETER Experiment Name: At_Far-red-induction_P Parameter: Age (day) Value: 7
  misc_feature: MA Experiment 20001247 PARAMETER Experiment Name: At_Far-red-induction_P Parameter: Light Value: Far-red vs. White
  misc_feature: MA Experiment 20001247 PARAMETER Experiment Name: At_Far-red-induction_P Parameter: Organism Value: A. thaliana
  misc_feature: MA Experiment 20001247 PARAMETER Experiment Name: At_Far-red-induction_P Parameter: Plant Line Value: Columbia
  misc_feature: MA Experiment 20001247 PARAMETER Experiment Name: At_Far-red-induction_P Parameter: Timepoint (hr) Value: 1
  misc_feature: MA Experiment 20001247 PARAMETER Experiment Name: At_Far-red-induction_P Parameter: Tissue Value: Whole Plant
  misc_feature: MA Experiment ID: 20001450 Result: Up-regulated in Transcription
  misc_feature: MA Experiment 20001450 PARAMETER Experiment Name: At_Far-red-induction_P Parameter: Age (day) Value: 7
  misc_feature: MA Experiment 20001450 PARAMETER Experiment Name: At_Far-red-induction_P Parameter: Light Value: Far-red vs. White
  misc_feature: MA Experiment 20001450 PARAMETER Experiment Name: At_Far-red-induction_P Parameter: Organism Value: A. thaliana
  misc_feature: MA Experiment 20001450 PARAMETER Experiment Name: At_Far-red-induction_P Parameter: Plant Line Value: Columbia
  misc_feature: MA Experiment 20001450 PARAMETER Experiment Name: At_Far-red-induction_P Parameter: Timepoint (hr) Value: 8
  misc_feature: MA Experiment 20001450 PARAMETER Experiment Name: At_Far-red-induction_P Parameter: Tissue Value: Whole Plant
  misc_feature: MA Experiment ID: 20001904 Result: Up-regulated in Transcription
  misc_feature: MA Experiment 20001904 PARAMETER Experiment Name: At_Drought_Reproduction_P Parameter: Age (day) Value: 37
  misc_feature: MA Experiment 20001904 PARAMETER Experiment Name: At_Drought_Reproduction_P Parameter: Organism Value: A. thaliana
  misc_feature: MA Experiment 20001904 PARAMETER Experiment Name: At_Drought_Reproduction_P Parameter: Plant Line Value: WS
  misc_feature: MA Experiment 20001904 PARAMETER Experiment Name: At_Drought_Reproduction_P Parameter: Timepoint (day) Value: 7
  misc_feature: MA Experiment 20001904 PARAMETER Experiment Name: At_Drought_Reproduction_P Parameter: Tissue Value: Rosettes
  misc_feature: MA Experiment 20001904 PARAMETER Experiment Name: At_Drought_Reproduction_P Parameter: Treatment Value: Drought vs. No Drought
  misc_feature: MA Experiment ID: 20001905 Result: Up-regulated in Transcription
  misc_feature: MA Experiment 20001905 PARAMETER Experiment Name: At_Drought_Reproduction_P Parameter: Age (day) Value: 40
  misc_feature: MA Experiment 20001905 PARAMETER Experiment Name: At_Drought_Reproduction_P Parameter: Organism Value: A. thaliana
  misc_feature: MA Experiment 20001905 PARAMETER Experiment Name: At_Drought_Reproduction_P Parameter: Plant Line Value: WS
  misc_feature: MA Experiment 20001905 PARAMETER Experiment Name: At_Drought_Reproduction_P Parameter: Timepoint (day) Value: 10
  misc_feature: MA Experiment 20001905 PARAMETER Experiment Name: At_Drought_Reproduction_P Parameter: Tissue Value: Rosettes
  misc_feature: MA Experiment 20001905 PARAMETER Experiment Name: At_Drought_Reproduction_P Parameter: Treatment Value: Drought vs. No Drought
attcagtcgtaaaataaaaccgaatttgatttttatttttctctctcaaagtttttcttgggagagcaacaatggcgatgaggaagcttttatcgaagaaactcttcaatatcacgaatgttgcttcacagagtcttatgaattgtcgcatttcgtcttcttcgttagccgtacgaaccagagttccgaatgattcaacagatacaaccaaaatcgcaccggagcctggagatttggcgatgtcgcgaaggttcatgcataacagtgctatgattaggccggcggagattatgcagatgccggtgggagagagtttgattgagaaactccgtgagattgatggaagcaaggatcggattcgattagacggactttctccgccggagagggagacgagtttgacggtggcggatacgaagaagctgcttagagcggcgcagatcgagattgtgaaatcgaagctaagagaaacgggaagaagctggatgccgtataaggagtttgttagcgtttgtggtgaagcttcttcagatccagatctcggatctaaaatcgcgaagatgcttgatgattcagcaaacgtcatcgttttgggagattccgtttgtattagacctgatcaggtactttcttcgttcttcttctctagccttttagcattttgaaatcgtgctttgtctctgagatctctctgagtattgcagctgattgattgggagagataagagagagatttaaaaactctctgaaaaaaacggattaggttctcaaaagtttttgttcgattttgattttggaagctataccgaaaactgataccatttttattcggttggatctcttttcttttggttccaattcaacaggagaatcaaaaacctctgtgtttttaccagagttccataggaggttcccaagtttgagagagatggtgataaagaggaacagtttctacagagaccacaactctttttttttcccctaaaaaaaaaaccattggttggattagggttataaattgagtcaagaccctttggtgatttgataccaaaacctaaacataaaaaaacttcaaaagagagagttgagagaagcttactaactggttcttgggggttattagaaagtttatagagatgatgatgataatgggttgggtttatgtggagggattagtcaatagtggaagatcttaaccagaaacagggatatggggatggattgattgactttataaactagtcattgattcataaagatgtatttttgttgtgtgtttttgagtgtgctaattgtgtgtctcaaaagaaggtggtggaggtcttgttttacccagacattttctgtttttgtcttttgctattgtgtttgatcaggttaccaaatccattgaaggactgcttcctttgccaaagatccataacccaaatgaccctcggagaatcgagtttaaagagcttgaagctgaaaaggcagtgatcgatgtgaaagctcacactttggtgcggaaagagctttgggctggtctcggttacttgatcctacagactgcggggttcatgaggctaacgttttgggaactctcgtgggacgtgatggagccaatctgtttctatgtcacgtccgtgtactttatggctggttacgcgtttttcctcaggacatcgaaagagccttcttttgaagggttttaccaaagcaggttcgaggcgaaacagagaaagttgatgaatgagtatgagtttgatctggagaggtataatgaactgaagaagctgttttgctctaagccttcggatcatgtttccaagattcttggagctatcaagagttaaaattttgattaggggaaaaattgcttagattcaatgttgttgtcacaaatggtgtctgattttacctaactagagaattctaccccaaaaaaaagtaagaaaaaaacgaatgggtactactctcaaatttttcagttttcgaaaaaaagacaaagaggttgttcttattattgcggcttatgtaacatcagcgaagagttatgtttttgttttcgatttttattttttattttttttatttttttattttatgaccgatctaaaatttaacattgtgtaaataaatgtttgaaggtgtaatataatacagaattaattatctgc

SEQ ID NO: 20734 - protein, 197 aa, Arabidopsis thaliana
  peptide (1)..(197): Ceres Seq. ID no. 12336359
  misc_feature (147)..(197): Pfam Name: Protein of unknown function, DUF607 Pfam Description: Protein of unknown function, DUF607
  misc_feature (147)..(197): Pfam Name: Protein of unknown function, DUF607 Pfam Description: Protein of unknown function, DUF607
  misc_feature (110)..(197): Homolog of NCBI NO: 37535778 NR Description: unknown protein [Oryza sativa (japonica
  misc_feature (1)..(197): Homolog of NCBI NO: 20330769 NR Description: Hypothetical protein [Oryza sativa (japonica
  misc_feature (96)..(188): Homolog of NCBI NO: 15239011 NR Description: unknown protein; protein id: At5g42610.1
  misc_feature (20)..(188): Homolog of NCBI NO: 15240047 NR Description: putative protein
  misc_feature (110)..(197): Homolog of NCBI NO: 37535778 NR Description: unknown protein [Oryza sativa (japonica
  misc_feature (96)..(188): Homolog of NCBI NO: 15239011 NR Description: unknown protein; protein id: At5g42610.1
  misc_feature (20)..(188): Homolog of NCBI NO: 14596231 NR Description: Unknown protein [Arabidopsis thaliana]
  misc_feature (1)..(197): Homolog of NCBI NO: 15224063 NR Description: hypothetical protein; protein id: At2g23790.1
  misc_feature (3)..(186): Homolog of NCBI NO: 15234535 NR Description: putative protein; protein id: At4g36820.1
  misc_feature (1)..(197): Homolog of NCBI NO: 24496456 NR Description: hypothetical protein [Arabidopsis thaliana]
  misc_feature (20)..(188): Homolog of NCBI NO: 15240047 NR Description: putative protein
  misc_feature (1)..(197): Homolog of NCBI NO: 20330769 NR Description: Hypothetical protein [Oryza sativa (japonica
  misc_feature (20)..(188): Homolog of NCBI NO: 14596231 NR Description: Unknown protein [Arabidopsis thaliana]
  misc_feature (1)..(197): Homolog of NCBI NO: 24496456 NR Description: hypothetical protein [Arabidopsis thaliana]
  misc_feature (1)..(197): Homolog of NCBI NO: 15224063 NR Description: hypothetical protein; protein id: At2g23790.1
  misc_feature (3)..(186): Homolog of NCBI NO: 15234535 NR Description: putative protein; protein id: At4g36820.1
MAMRKLLSKKLFNITNVASQSLMNCRISSSSLAVRTRVPNDSTDTTKIAPEPGDLAMSRRFMHNSAMIRPAEIMQMPVGESLIEKLREIDGSKDRIRLDGLSPPERETSLTVADTKKLLRAAQIEIVKSKLRETGRSWMPYKEFVSVCGEASSDPDLGSKIAKMLDDSANVIVLGDSVCIRPDQVLSSFFFSSLLAF

SEQ ID NO: 20735 - protein, 195 aa, Arabidopsis thaliana
  peptide (1)..(195): Ceres Seq. ID no. 12336360
  misc_feature (145)..(195): Pfam Name: Protein of unknown function, DUF607 Pfam Description: Protein of unknown function, DUF607
  misc_feature (145)..(195): Pfam Name: Protein of unknown function, DUF607 Pfam Description: Protein of unknown function, DUF607
  misc_feature (108)..(195): Homolog of NCBI NO: 37535778 NR Description: unknown protein [Oryza sativa (japonica
  misc_feature (1)..(195): Homolog of NCBI NO: 20330769 NR Description: Hypothetical protein [Oryza sativa (japonica
  misc_feature (94)..(186): Homolog of NCBI NO: 15239011 NR Description: unknown protein; protein id: At5g42610.1
  misc_feature (18)..(186): Homolog of NCBI NO: 15240047 NR Description: putative protein
  misc_feature (1)..(195): Homolog of NCBI NO: 20330769 NR Description: Hypothetical protein [Oryza sativa (japonica
  misc_feature (18)..(186): Homolog of NCBI NO: 15240047 NR Description: putative protein
  misc_feature (1)..(195): Homolog of NCBI NO: 24496456 NR Description: hypothetical protein [Arabidopsis thaliana]
  misc_feature (1)..(184): Homolog of NCBI NO: 15234535 NR Description: putative protein; protein id: At4g36820.1
  misc_feature (1)..(195): Homolog of NCBI NO: 15224063 NR Description: hypothetical protein; protein id: At2g23790.1
  misc_feature (18)..(186): Homolog of NCBI NO: 14596231 NR Description: Unknown protein [Arabidopsis thaliana]
  misc_feature (94)..(186): Homolog of NCBI NO: 15239011 NR Description: unknown protein; protein id: At5g42610.1
  misc_feature (108)..(195): Homolog of NCBI NO: 37535778 NR Description: unknown protein [Oryza sativa (japonica
  misc_feature (18)..(186): Homolog of NCBI NO: 14596231 NR Description: Unknown protein [Arabidopsis thaliana]
  misc_feature (1)..(195): Homolog of NCBI NO: 24496456 NR Description: hypothetical protein [Arabidopsis thaliana]
  misc_feature (1)..(195): Homolog of NCBI NO: 15224063 NR Description: hypothetical protein; protein id: At2g23790.1
  misc_feature (1)..(184): Homolog of NCBI NO: 15234535 NR Description: putative protein; protein id: At4g36820.1
MRKLLSKKLFNITNVASQSLMNCRISSSSLAVRTRVPNDSTDTTKIAPEPGDLAMSRRFMHNSAMIRPAEIMQMPVGESLIEKLREIDGSKDRIRLDGLSPPERETSLTVADTKKLLRAAQIEIVKSKLRETGRSWMPYKEFVSVCGEASSDPDLGSKIAKMLDDSANVIVLGDSVCIRPDQVLSSFFFSSLLAF

SEQ ID NO: 20736 - protein, 175 aa, Arabidopsis thaliana
  peptide (1)..(175): Ceres Seq. ID no. 12336361
  misc_feature (125)..(175): Pfam Name: Protein of unknown function, DUF607 Pfam Description: Protein of unknown function, DUF607
  misc_feature (125)..(175): Pfam Name: Protein of unknown function, DUF607 Pfam Description: Protein of unknown function, DUF607
  misc_feature (88)..(175): Homolog of NCBI NO: 37535778 NR Description: unknown protein [Oryza sativa (japonica
  misc_feature (1)..(175): Homolog of NCBI NO: 20330769 NR Description: Hypothetical protein [Oryza sativa (japonica
  misc_feature (74)..(166): Homolog of NCBI NO: 15239011 NR Description: unknown protein; protein id: At5g42610.1
  misc_feature (1)..(166): Homolog of NCBI NO: 15240047 NR Description: putative protein
  misc_feature (88)..(175): Homolog of NCBI NO: 37535778 NR Description: unknown protein [Oryza sativa (japonica
  misc_feature (74)..(166): Homolog of NCBI NO: 15239011 NR Description: unknown protein; protein id: At5g42610.1
  misc_feature (1)..(166): Homolog of NCBI NO: 14596231 NR Description: Unknown protein [Arabidopsis thaliana]
  misc_feature (1)..(175): Homolog of NCBI NO: 15224063 NR Description: hypothetical protein; protein id: At2g23790.1
  misc_feature (1)..(164): Homolog of NCBI NO: 15234535 NR Description: putative protein; protein id: At4g36820.1
  misc_feature (1)..(175): Homolog of NCBI NO: 24496456 NR Description: hypothetical protein [Arabidopsis thaliana]
  misc_feature (1)..(166): Homolog of NCBI NO: 15240047 NR Description: putative protein
  misc_feature (1)..(175): Homolog of NCBI NO: 20330769 NR Description: Hypothetical protein [Oryza sativa (japonica
  misc_feature (1)..(166): Homolog of NCBI NO: 14596231 NR Description: Unknown protein [Arabidopsis thaliana]
  misc_feature (1)..(175): Homolog of NCBI NO: 24496456 NR Description: hypothetical protein [Arabidopsis thaliana]
  misc_feature (1)..(175): Homolog of NCBI NO: 15224063 NR Description: hypothetical protein; protein id: At2g23790.1
  misc_feature (1)..(164): Homolog of NCBI NO: 15234535 NR Description: putative protein; protein id: At4g36820.1
MNCRISSSSLAVRTRVPNDSTDTTKIAPEPGDLAMSRRFMHNSAMIRPAEIMQMPVGESLIEKLREIDGSKDRIRLDGLSPPERETSLTVADTKKLLRAAQIEIVKSKLRETGRSWMPYKEFVSVCGEASSDPDLGSKIAKMLDDSANVIVLGDSVCIRPDQVLSSFFFSSLLAF

SEQ ID NO: 20737 - DNA, 2300 bp, Arabidopsis thaliana
  misc_feature (1)..(2300): Ceres Seq. ID no. 13646680
  misc_feature: MA Experiment ID: 20000307 Result: Up-regulated in Transcription
  misc_feature: MA Experiment 20000307 PARAMETER Experiment Name: At_Germinating_Seeds_Sub_P Parameter: Age (hr) Value: 24 vs. 0
  misc_feature: MA Experiment 20000307 PARAMETER Experiment Name: At_Germinating_Seeds_Sub_P Parameter: Organism Value: A. thaliana
  misc_feature: MA Experiment 20000307 PARAMETER Experiment Name: At_Germinating_Seeds_Sub_P Parameter: Plant Line Value: WS
  misc_feature: MA Experiment 20000307 PARAMETER Experiment Name: At_Germinating_Seeds_Sub_P Parameter: Tissue Value: Germinating Seeds
  misc_feature: MA Experiment ID: 20000355 Result: Up-regulated in Transcription
  misc_feature: MA Experiment 20000355 PARAMETER Experiment Name: At_Siliques_Sub_P Parameter: Age (day) Value: 21
  misc_feature: MA Experiment 20000355 PARAMETER Experiment Name: At_Siliques_Sub_P Parameter: Organism Value: A. thaliana
  misc_feature: MA Experiment 20000355 PARAMETER Experiment Name: At_Siliques_Sub_P Parameter: Plant Line Value: WS
  misc_feature: MA Experiment 20000355 PARAMETER Experiment Name: At_Siliques_Sub_P Parameter: Tissue Value: Less Than 5mm Siliques vs. Whole Plant
gagaaaatggatacaccggaaaagagtgaaacccagatcggtactacagtttctaaactcaaagtcgaggttttttattctatacctatctcaaagtttcatgctttattagttttctcgttgttcctctgtttctgtgatgggttttttggtgtctgttagacttttcttcattgaatcgtacggttttgtgtaaagcccttgtcttaatttgttgcattttagtcaaagtttcagtttttaatcggttattggaatgaattgtgttgaaagttatggttttgatgattggagaagaatttgagatcaaagtgtttttttgtgcaatgcaggattcaccagtgtttagttacatatgcaatctctcaccaattaagactatcaaaccaattccaatcacttgtcctttaagctctctcaatttcgcatctccaccttctgttttcacttctcctcacgcggtttctcataaagagtctcgtttcagaagtcaaaaagatgtgtctgcttctaaagaagttggagaagaagaagctttagtcggtagcgaaccggaacaaagctacaagaatgactgcaatactcctagagttaccaatgatgtgaaagacaatggttgtgggaaggatttgcaggtgatgatggacaatgtcaagaagaaaagtgatactccggattgggaaactttgattgctgctacaacagaactgatttatggctcaccgagagagtcagaggcttttagttgcttgttgaagaaaacttcaaactctgaagcacgtctacgtggtagtataactgcaacatcggtggctgttacgaataccgatgtagtcaacaatgaatctgaatctgttgatgctctttcgatattgcaccgtggtgtgagaagacggtgtttagactttgaggttaaggggaaaaatcagcaaacattaggagaatcttcatctagttgtgtagtacctagcattggtctgcatcttaacaccattgcaatgtcctctaaggacaagaatgttgctaatgaatattcattttccggtaacataaaagtcggtgtgcaaagttctctgactccggtgcttcattcgcagcacgacatcgtgagagaaaatgaaagcgggaaagattcaggacaaattatagaagtggttccaaagtctttagcttcagtagacttgactccaataagccccaagaagaaaaggcgtaagtccgaacaatcaggagaaggcgactcgtcatgtaaacggtgcaactgcaaaaaatccaagtgtttgaagctttactgtgaatgctttgctgctggattttattgcatagagccatgttcatgtataaattgcttcaacaaacctatccataaagatgttgtcctggcgactcgcaaacagattgaatcccgcaatccacttgcatttgctcctaaagtcatcagaaactcagattccatcattgaagttggtgaggatgcaagtaaaactccagcttcagcgcgacacaaacgaggctgtaactgcaagaaatcaaactgtctgaagaaatactgtgaatgctatcagggcggagttggttgttctataaactgtagatgtgaaggatgtaaaaatgcatttggcagaaaagatgggtctttgttcgaacaagatgaggagaatgaaacatctggcacacccggaacaaagaaaacacaacagaatgtcgagttgttcaaacctgcagctccaccttcaacaccaattccatttagacaaccactggcgcaacttccaatctcatccaacaacagactgctacctccacagtctcattttcatcatggagctattggatcatcttcctcagggatatacaacatcagaaaaccagacatgagtttgttgtctcattcaagaatcgagacaatcacagaggatattgatgatatgtctgagaatctaatccattctccaataactactctatctcccaacagcaaaagggtttcgttgtctcatcttgattcaccagagtcgactccatggagaagaaatggtggggggaggaatctgatacgttcgttcccaacgtttccttctctcactccacaccattaaaattctttgaatgtcaacttctagttggtagttttaacttacacagacaacatacgcaaacatttacaagtttagtagcagtattgcgttagtttttacaatggttgtgtaataaaaatgttaagtcatttatcaatatcttgacaacattcctcgtctaatatcacaaatgtaaccttatttattcaacaattttcatgt

SEQ ID NO: 20738 - protein, 607 aa, Arabidopsis thaliana
  peptide (1)..(607): Ceres Seq. ID no. 13646681
  misc_feature (409)..(450): Pfam Name: Tesmin/TSO1-like CXC domain Pfam Description: Tesmin/TSO1-like CXC domain
  misc_feature (200)..(606): Homolog of NCBI NO: 15028139 NR Description: putative DNA binding protein [Arabidopsis
  misc_feature (119)..(227): Homolog of NCBI NO: 23297130 NR Description: putative DNA binding protein [Arabidopsis
  misc_feature (200)..(606): Homolog of NCBI NO: 23297130 NR Description: putative DNA binding protein [Arabidopsis
  misc_feature (112)..(227): Homolog of NCBI NO: 30686784 NR Description: DNA binding protein -related [Arabidopsis
  misc_feature (19)..(139): Homolog of NCBI NO: 30686784 NR Description: DNA binding protein -related [Arabidopsis
  misc_feature (200)..(606): Homolog of NCBI NO: 30686784 NR Description: DNA binding protein -related [Arabidopsis
  misc_feature (19)..(91): Homolog of NCBI NO: 6739821 NR Description: putative DNA binding protein [Arabidopsis
  misc_feature (112)..(227): Homolog of NCBI NO: 6739821 NR Description: putative DNA binding protein [Arabidopsis
  misc_feature (200)..(606): Homolog of NCBI NO: 6739821 NR Description: putative DNA binding protein [Arabidopsis
  misc_feature (18)..(607): Homolog of NCBI NO: 9279694 NR Description: DNA binding protein-like [Arabidopsis thaliana]
MVLMIGEEFEIKVFFCAMQDSPVFSYICNLSPIKTIKPIPITCPLSSLNFASPPSVFTSPHAVSHKESRFRSQKDVSASKEVGEEEALVGSEPEQSYKNDCNTPRVTNDVKDNGCGKDLQVMMDNVKKKSDTPDWETLIAATTELIYGSPRESEAFSCLLKKTSNSEARLRGSITATSVAVTNTDVVNNESESVDALSILHRGVRRRCLDFEVKGKNQQTLGESSSSCVVPSIGLHLNTIAMSSKDKNVANEYSFSGNIKVGVQSSLTPVLHSQHDIVRENESGKDSGQIIEVVPKSLASVDLTPISPKKKRRKSEQSGEGDSSCKRCNCKKSKCLKLYCECFAAGFYCIEPCSCINCFNKPIHKDVVLATRKQIESRNPLAFAPKVIRNSDSIIEVGEDASKTPASARHKRGCNCKKSNCLKKYCECYQGGVGCSINCRCEGCKNAFGRKDGSLFEQDEENETSGTPGTKKTQQNVELFKPAAPPSTPIPFRQPLAQLPISSNNRLLPPQSHFHHGAIGSSSSGIYNIRKPDMSLLSHSRIETITEDIDDMSENLIHSPITTLSPNSKRVSLSHLDSPESTPWRRNGGGRNLIRSFPTFPSLTPHH

SEQ ID NO: 20739 - protein, 604 aa, Arabidopsis thaliana
  peptide (1)..(604): Ceres Seq. ID no. 13646682
  misc_feature (406)..(447): Pfam Name: Tesmin/TSO1-like CXC domain Pfam Description: Tesmin/TSO1-like CXC domain
  misc_feature (197)..(603): Homolog of NCBI NO: 15028139 NR Description: putative DNA binding protein [Arabidopsis
  misc_feature (116)..(224): Homolog of NCBI NO: 23297130 NR Description: putative DNA binding protein [Arabidopsis
  misc_feature (197)..(603): Homolog of NCBI NO: 23297130 NR Description: putative DNA binding protein [Arabidopsis
  misc_feature (109)..(224): Homolog of NCBI NO: 30686784 NR Description: DNA binding protein -related [Arabidopsis
  misc_feature (16)..(136): Homolog of NCBI NO: 30686784 NR Description: DNA binding protein -related [Arabidopsis
  misc_feature (197)..(603): Homolog of NCBI NO: 30686784 NR Description: DNA binding protein -related [Arabidopsis
  misc_feature (16)..(88): Homolog of NCBI NO: 6739821 NR Description: putative DNA binding protein [Arabidopsis
  misc_feature (109)..(224): Homolog of NCBI NO: 6739821 NR Description: putative DNA binding protein [Arabidopsis
  misc_feature (197)..(603): Homolog of NCBI NO: 6739821 NR Description: putative DNA binding protein [Arabidopsis
  misc_feature (15)..(604): Homolog of NCBI NO: 9279694 NR Description: DNA binding protein-like [Arabidopsis thaliana]
MIGEEFEIKVFFCAMQDSPVFSYICNLSPIKTIKPIPITCPLSSLNFASPPSVFTSPHAVSHKESRFRSQKDVSASKEVGEEEALVGSEPEQSYKNDCNTPRVTNDVKDNGCGKDLQVMMDNVKKKSDTPDWETLIAATTELIYGSPRESEAFSCLLKKTSNSEARLRGSITATSVAVTNTDVVNNESESVDALSILHRGVRRRCLDFEVKGKNQQTLGESSSSCVVPSIGLHLNTIAMSSKDKNVANEYSFSGNIKVGVQSSLTPVLHSQHDIVRENESGKDSGQIIEVVPKSLASVDLTPISPKKKRRKSEQSGEGDSSCKRCNCKKSKCLKLYCECFAAGFYCIEPCSCINCFNKPIHKDVVLATRKQIESRNPLAFAPKVIRNSDSIIEVGEDASKTPASARHKRGCNCKKSNCLKKYCECYQGGVGCSINCRCEGCKNAFGRKDGSLFEQDEENETSGTPGTKKTQQNVELFKPAAPPSTPIPFRQPLAQLPISSNNRLLPPQSHFHHGAIGSSSSGIYNIRKPDMSLLSHSRIETITEDIDDMSENLIHSPITTLSPNSKRVSLSHLDSPESTPWRRNGGGRNLIRSFPTFPSLTPHH

SEQ ID NO: 20740 - protein, 590 aa, Arabidopsis thaliana
  peptide (1)..(590): Ceres Seq. ID no. 13646683
  misc_feature (392)..(433): Pfam Name: Tesmin/TSO1-like CXC domain Pfam Description: Tesmin/TSO1-like CXC domain
  misc_feature (183)..(589): Homolog of NCBI NO: 15028139 NR Description: putative DNA binding protein [Arabidopsis
  misc_feature (102)..(210): Homolog of NCBI NO: 23297130 NR Description: putative DNA binding protein [Arabidopsis
  misc_feature (183)..(589): Homolog of NCBI NO: 23297130 NR Description: putative DNA binding protein [Arabidopsis
  misc_feature (95)..(210): Homolog of NCBI NO: 30686784 NR Description: DNA binding protein -related [Arabidopsis
  misc_feature (2)..(122): Homolog of NCBI NO: 30686784 NR Description: DNA binding protein -related [Arabidopsis
  misc_feature (183)..(589): Homolog of NCBI NO: 30686784 NR Description: DNA binding protein -related [Arabidopsis
  misc_feature (2)..(74): Homolog of NCBI NO: 6739821 NR Description: putative DNA binding protein [Arabidopsis
  misc_feature (95)..(210): Homolog of NCBI NO: 6739821 NR Description: putative DNA binding protein [Arabidopsis
  misc_feature (183)..(589): Homolog of NCBI NO: 6739821 NR Description: putative DNA binding protein [Arabidopsis
  misc_feature (1)..(590): Homolog of NCBI NO: 9279694 NR Description: DNA binding protein-like [Arabidopsis thaliana]
MQDSPVFSYICNLSPIKTIKPIPITCPLSSLNFASPPSVFTSPHAVSHKESRFRSQKDVSASKEVGEEEALVGSEPEQSYKNDCNTPRVTNDVKDNGCGKDLQVMMDNVKKKSDTPDWETLIAATTELIYGSPRESEAFSCLLKKTSNSEARLRGSITATSVAVTNTDVVNNESESVDALSILHRGVRRRCLDFEVKGKNQQTLGESSSSCVVPSIGLHLNTIAMSSKDKNVANEYSFSGNIKVGVQSSLTPVLHSQHDIVRENESGKDSGQIIEVVPKSLASVDLTPISPKKKRRKSEQSGEGDSSCKRCNCKKSKCLKLYCECFAAGFYCIEPCSCINCFNKPIHKDVVLATRKQIESRNPLAFAPKVIRNSDSIIEVGEDASKTPASARHKRGCNCKKSNCLKKYCECYQGGVGCSINCRCEGCKNAFGRKDGSLFEQDEENETSGTPGTKKTQQNVELFKPAAPPSTPIPFRQPLAQLPISSNNRLLPPQSHFHHGAIGSSSSGIYNIRKPDMSLLSHSRIETITEDIDDMSENLIHSPITTLSPNSKRVSLSHLDSPESTPWRRNGGGRNLIRSFPTFPSLTPHH

SEQ ID NO: 20741 - DNA, 2850 bp, Arabidopsis thaliana
  misc_feature (1)..(2850): Ceres Seq. ID no. 14309755
  misc_feature: MA Experiment ID: 108434 Result: Down-regulated in Transcription
  misc_feature: MA Experiment 108434 PARAMETER Experiment Name: At_Root_Tips_cDNA_P Parameter: Tissue Value: Root Tips
  misc_feature: MA Experiment ID: 108462 Result: Up-regulated in Transcription
  misc_feature: MA Experiment 108462 PARAMETER Experiment Name: At_Germinating_Seeds_cDNA_P Parameter: Age (day) Value: 2 vs. 0
  misc_feature: MA Experiment 108462 PARAMETER Experiment Name: At_Germinating_Seeds_cDNA_P Parameter: Tissue Value: Germinating Seeds
  misc_feature: MA Experiment ID: 108463 Result: Up-regulated in Transcription
  misc_feature: MA Experiment 108463 PARAMETER Experiment Name: At_Germinating_Seeds_cDNA_P Parameter: Age (day) Value: 3 vs. 0
  misc_feature: MA Experiment 108463 PARAMETER Experiment Name: At_Germinating_Seeds_cDNA_P Parameter: Tissue Value: Germinating Seeds
  misc_feature: MA Experiment ID: 108488 Result: Down-regulated in Transcription
  misc_feature: MA Experiment ID: 108561 Result: Up-regulated in Transcription
  misc_feature: MA Experiment 108561 PARAMETER Experiment Name: At_100uM_ABA_cDNA_P Parameter: Timepoint (hr) Value: 6
  misc_feature: MA Experiment 108561 PARAMETER Experiment Name: At_100uM_ABA_cDNA_P Parameter: Tissue Value: Aerial
  misc_feature: MA Experiment 108561 PARAMETER Experiment Name: At_100uM_ABA_cDNA_P Parameter: Treatment Value: 100uM ABA vs. No Treatment
  misc_feature: MA Experiment ID: 108569 Result: Up-regulated in Transcription
  misc_feature: MA Experiment 108569 PARAMETER Experiment Name: At_0.001%_MeJA__cDNA_P Parameter: Timepoint (hr) Value: 6
  misc_feature: MA Experiment 108569 PARAMETER Experiment Name: At_0.001%_MeJA__cDNA_P Parameter: Tissue Value: Aerial
  misc_feature: MA Experiment 108569 PARAMETER Experiment Name: At_0.001%_MeJA__cDNA_P Parameter: Treatment Value: 0.001% MeJA vs. No Treatment
  misc_feature: MA Experiment ID: 108572 Result: Up-regulated in Transcription
  misc_feature: MA Experiment 108572 PARAMETER Experiment Name: At_Drought_cDNA_P Parameter: Timepoint (hr) Value: 1
  misc_feature: MA Experiment 108572 PARAMETER Experiment Name: At_Drought_cDNA_P Parameter: Tissue Value: Aerial
  misc_feature: MA Experiment 108572 PARAMETER Experiment Name: At_Drought_cDNA_P Parameter: Treatment Value: Drought vs. No Drought
  misc_feature: MA Experiment ID: 108573 Result: Up-regulated in Transcription
  misc_feature: MA Experiment 108573 PARAMETER Experiment Name: At_Drought_cDNA_P Parameter: Timepoint (hr) Value: 6
  misc_feature: MA Experiment 108573 PARAMETER Experiment Name: At_Drought_cDNA_P Parameter: Tissue Value: Aerial
  misc_feature: MA Experiment 108573 PARAMETER Experiment Name: At_Drought_cDNA_P Parameter: Treatment Value: Drought vs. No Drought
  misc_feature: MA Experiment ID: 108577 Result: Down-regulated in Transcription
  misc_feature: MA Experiment 108577 PARAMETER Experiment Name: At_42deg_Heat_cDNA_P Parameter: Temperature (deg C) Value: 42 vs. 22
  misc_feature: MA Experiment 108577 PARAMETER Experiment Name: At_42deg_Heat_cDNA_P Parameter: Timepoint (hr) Value: 6
  misc_feature: MA Experiment 108577 PARAMETER Experiment Name: At_42deg_Heat_cDNA_P Parameter: Tissue Value: Aerial
  misc_feature: MA Experiment ID: 108585 Result: Up-regulated in Transcription
  misc_feature: MA Experiment 108585 PARAMETER Experiment Name: At_5mM_NaNP_cDNA_P Parameter: Timepoint (hr) Value: 6
  misc_feature: MA Experiment 108585 PARAMETER Experiment Name: At_5mM_NaNP_cDNA_P Parameter: Tissue Value: Aerial
  misc_feature: MA Experiment 108585 PARAMETER Experiment Name: At_5mM_NaNP_cDNA_P Parameter: Treatment Value: null
  misc_feature: MA Experiment ID: 108594 Result: Down-regulated in Transcription
  misc_feature: MA Experiment 108594 PARAMETER Experiment Name: At_Ler-rhl_Root_cDNA_P Parameter: Plant Line Value: null
  misc_feature: MA Experiment ID: 108595 Result: Up-regulated in Transcription
  misc_feature: MA Experiment 108595 PARAMETER Experiment Name: At_Ler-pi_Ovule_cDNA_P Parameter: Plant Line Value: null
  misc_feature: MA Experiment ID: 108605 Result: Up-regulated in Transcription
  misc_feature: MA Experiment 108605 PARAMETER Experiment Name: At_100uM_ABA_cDNA_P Parameter: Timepoint (hr) Value: 6
  misc_feature: MA Experiment 108605 PARAMETER Experiment Name: At_100uM_ABA_cDNA_P Parameter: Tissue Value: Aerial
  misc_feature: MA Experiment 108605 PARAMETER Experiment Name: At_100uM_ABA_cDNA_P Parameter: Treatment Value: 100uM ABA vs. No Treatment
  misc_feature: MA Experiment ID: 108607 Result: Up-regulated in Transcription
  misc_feature: MA Experiment 108607 PARAMETER Experiment Name: At_100uM_ABA_cDNA_P Parameter: Timepoint (hr) Value: 4
  misc_feature: MA Experiment 108607 PARAMETER Experiment Name: At_100uM_ABA_cDNA_P Parameter: Tissue Value: Aerial
  misc_feature: MA Experiment 108607 PARAMETER Experiment Name: At_100uM_ABA_cDNA_P Parameter: Treatment Value: 100uM ABA vs. No Treatment
  misc_feature: MA Experiment ID: 108609 Result: Up-regulated in Transcription
  misc_feature: MA Experiment 108609 PARAMETER Experiment Name: At_100uM_ABA_cDNA_P Parameter: Timepoint (hr) Value: 24
  misc_feature: MA Experiment 108609 PARAMETER Experiment Name: At_100uM_ABA_cDNA_P Parameter: Tissue Value: Aerial
  misc_feature: MA Experiment 108609 PARAMETER Experiment Name: At_100uM_ABA_cDNA_P Parameter: Treatment Value: 100uM ABA vs. No Treatment
  misc_feature: MA Experiment ID: 108668 Result: Up-regulated in Transcription
  misc_feature: MA Experiment 108668 PARAMETER Experiment Name: At_2mM_SA_cDNA_P Parameter: Plant Line Value: WS
  misc_feature: MA Experiment 108668 PARAMETER Experiment Name: At_2mM_SA_cDNA_P Parameter: Timepoint (hr) Value: 6
  misc_feature: MA Experiment 108668 PARAMETER Experiment Name: At_2mM_SA_cDNA_P Parameter: Treatment Value: 2mM SA vs. No Treatment
  misc_feature: MA Experiment ID: 20000069 Result: Up-regulated in Transcription
  misc_feature: MA Experiment 20000069 PARAMETER Experiment Name: At_100uM_ABA_Mutants_cDNA_P Parameter: Plant Line Value: CS23
  misc_feature: MA Experiment 20000069 PARAMETER Experiment Name: At_100uM_ABA_Mutants_cDNA_P Parameter: Timepoint (hr) Value: 6
  misc_feature: MA Experiment 20000069 PARAMETER Experiment Name: At_100uM_ABA_Mutants_cDNA_P Parameter: Tissue Value: Aerial
  misc_feature: MA Experiment 20000069 PARAMETER Experiment Name: At_100uM_ABA_Mutants_cDNA_P Parameter: Treatment Value: 100uM ABA vs. No Treatment
  misc_feature: MA Experiment ID: 20000070 Result: Up-regulated in Transcription
  misc_feature: MA Experiment 20000070 PARAMETER Experiment Name: At_100uM_ABA_Mutants_cDNA_P Parameter: Plant Line Value: CS24
  misc_feature: MA Experiment 20000070 PARAMETER Experiment Name: At_100uM_ABA_Mutants_cDNA_P Parameter: Timepoint (hr) Value: 6
  misc_feature: MA Experiment 20000070 PARAMETER Experiment Name: At_100uM_ABA_Mutants_cDNA_P Parameter: Tissue Value: Aerial
  misc_feature: MA Experiment 20000070 PARAMETER Experiment Name: At_100uM_ABA_Mutants_cDNA_P Parameter: Treatment Value: 100uM ABA vs. No Treatment
  misc_feature: MA Experiment ID: 20000072 Result: Up-regulated in Transcription
  misc_feature: MA Experiment 20000072 PARAMETER Experiment Name: At_100uM_ABA_Mutants_cDNA_P Parameter: Plant Line Value: CS8105
  misc_feature: MA Experiment 20000072 PARAMETER Experiment Name: At_100uM_ABA_Mutants_cDNA_P Parameter: Timepoint (hr) Value: 6
  misc_feature: MA Experiment 20000072 PARAMETER Experiment Name: At_100uM_ABA_Mutants_cDNA_P Parameter: Tissue Value: Aerial
  misc_feature: MA Experiment 20000072 PARAMETER Experiment Name: At_100uM_ABA_Mutants_cDNA_P Parameter: Treatment Value: 100uM ABA vs. No Treatment
  misc_feature: MA Experiment ID: 20000086 Result: Up-regulated in Transcription
  misc_feature: MA Experiment 20000086 PARAMETER Experiment Name: At_100uM_ABA_Mutants_cDNA_P Parameter: Plant Line Value: CS22
  misc_feature: MA Experiment 20000086 PARAMETER Experiment Name: At_100uM_ABA_Mutants_cDNA_P Parameter: Timepoint (hr) Value: 6
  misc_feature: MA Experiment 20000086 PARAMETER Experiment Name: At_100uM_ABA_Mutants_cDNA_P Parameter: Tissue Value: Aerial
  misc_feature: MA Experiment 20000086 PARAMETER Experiment Name: At_100uM_ABA_Mutants_cDNA_P Parameter: Treatment Value: 100uM ABA vs. No Treatment
  misc_feature: MA Experiment ID: 20000087 Result: Up-regulated in Transcription
  misc_feature: MA Experiment 20000087 PARAMETER Experiment Name: At_100uM_ABA_Mutants_cDNA_P Parameter: Plant Line Value: WS
  misc_feature: MA Experiment 20000087 PARAMETER Experiment Name: At_100uM_ABA_Mutants_cDNA_P Parameter: Timepoint (hr) Value: 6
  misc_feature: MA Experiment 20000087 PARAMETER Experiment Name: At_100uM_ABA_Mutants_cDNA_P Parameter: Tissue Value: Aerial
  misc_feature: MA Experiment 20000087 PARAMETER Experiment Name: At_100uM_ABA_Mutants_cDNA_P Parameter: Treatment Value: 100uM ABA vs. No Treatment
  misc_feature: MA Experiment ID: 20000088 Result: Up-regulated in Transcription
  misc_feature: MA Experiment 20000088 PARAMETER Experiment Name: At_100uM_ABA_Mutants_cDNA_P Parameter: Plant Line Value: Landsberg
  misc_feature: MA Experiment 20000088 PARAMETER Experiment Name: At_100uM_ABA_Mutants_cDNA_P Parameter: Timepoint (hr) Value: 6
  misc_feature: MA Experiment 20000088 PARAMETER Experiment Name: At_100uM_ABA_Mutants_cDNA_P Parameter: Tissue Value: Aerial
  misc_feature: MA Experiment 20000088 PARAMETER Experiment Name: At_100uM_ABA_Mutants_cDNA_P Parameter: Treatment Value: 100uM ABA vs. No Treatment
  misc_feature: MA Experiment ID: 20000090 Result: Up-regulated in Transcription
  misc_feature: MA Experiment ID: 20000111 Result: Down-regulated in Transcription
  misc_feature: MA Experiment 20000111 PARAMETER Experiment Name: At_42deg_Heat_cDNA_P Parameter: Temperature (deg C) Value: 42 vs. 22
  misc_feature: MA Experiment 20000111 PARAMETER Experiment Name: At_42deg_Heat_cDNA_P Parameter: Timepoint (hr) Value: 6
  misc_feature: MA Experiment 20000111 PARAMETER Experiment Name: At_42deg_Heat_cDNA_P Parameter: Tissue Value: Aerial
  misc_feature: MA Experiment ID: 20000117 Result: Up-regulated in Transcription
  misc_feature: MA Experiment 20000117 PARAMETER Experiment Name: At_100uM_ABA_Mutants_cDNA_P Parameter: Plant Line Value: Columbia
  misc_feature: MA Experiment 20000117 PARAMETER Experiment Name: At_100uM_ABA_Mutants_cDNA_P Parameter: Timepoint (hr) Value: 6
  misc_feature: MA Experiment 20000117 PARAMETER Experiment Name: At_100uM_ABA_Mutants_cDNA_P Parameter: Tissue Value: Aerial
  misc_feature: MA Experiment 20000117 PARAMETER Experiment Name: At_100uM_ABA_Mutants_cDNA_P Parameter: Treatment Value: 100uM ABA vs. No Treatment
  misc_feature: MA Experiment ID: 20000169 Result: Up-regulated in Transcription
  misc_feature: MA Experiment 20000169 PARAMETER Experiment Name: At_100uM_ABA_P Parameter: Age (day) Value: 14
  misc_feature: MA Experiment 20000169 PARAMETER Experiment Name: At_100uM_ABA_P Parameter: Organism Value: A. thaliana
  misc_feature: MA Experiment 20000169 PARAMETER Experiment Name: At_100uM_ABA_P Parameter: Plant Line Value: WS
  misc_feature: MA Experiment 20000169 PARAMETER Experiment Name: At_100uM_ABA_P Parameter: Timepoint (hr) Value: 6
  misc_feature: MA Experiment 20000169 PARAMETER Experiment Name: At_100uM_ABA_P Parameter: Tissue Value: Aerial
  misc_feature: MA Experiment 20000169 PARAMETER Experiment Name: At_100uM_ABA_P Parameter: Treatment Value: 100uM ABA vs. No Treatment
  misc_feature: MA Experiment ID: 20000173 Result: Down-regulated in Transcription
  misc_feature: MA Experiment 20000173 PARAMETER Experiment Name: At_42deg_Heat_P Parameter: Age (day) Value: 14
  misc_feature: MA Experiment 20000173 PARAMETER Experiment Name: At_42deg_Heat_P Parameter: Organism Value: A. thaliana
  misc_feature: MA Experiment 20000173 PARAMETER Experiment Name: At_42deg_Heat_P Parameter: Plant Line Value: WS
  misc_feature: MA Experiment 20000173 PARAMETER Experiment Name: At_42deg_Heat_P Parameter: Temperature (deg C) Value: 42 vs. 22
  misc_feature: MA Experiment 20000173 PARAMETER Experiment Name: At_42deg_Heat_P Parameter: Timepoint (hr) Value: 6
  misc_feature: MA Experiment 20000173 PARAMETER Experiment Name: At_42deg_Heat_P Parameter: Tissue Value: Aerial
  misc_feature: MA Experiment ID: 20000182 Result: Up-regulated in Transcription
  misc_feature: MA Experiment 20000182 PARAMETER Experiment Name: At_2mM_SA_P Parameter: Age (day) Value: 14
  misc_feature: MA Experiment 20000182 PARAMETER Experiment Name: At_2mM_SA_P Parameter: Organism Value: A. thaliana
  misc_feature: MA Experiment 20000182 PARAMETER Experiment Name: At_2mM_SA_P Parameter: Plant Line Value: WS
  misc_feature: MA Experiment 20000182 PARAMETER Experiment Name: At_2mM_SA_P Parameter: Timepoint (hr) Value: 6
  misc_feature: MA Experiment 20000182 PARAMETER Experiment Name: At_2mM_SA_P Parameter: Tissue Value: Aerial
  misc_feature: MA Experiment 20000182 PARAMETER Experiment Name: At_2mM_SA_P Parameter: Treatment Value: 2mM SA vs. No Treatment
  misc_feature: MA Experiment ID: 20000224 Result: Up-regulated in Transcription
  misc_feature: MA Experiment ID: 20000227 Result: Down-regulated in Transcription
  misc_feature: MA Experiment 20000227 PARAMETER Experiment Name: At_Root-Tips-vs-Tops_P Parameter: Tissue Value: Root Tips vs. Root Tops
  misc_feature: MA Experiment ID: 20000234 Result: Down-regulated in Transcription
  misc_feature: MA Experiment 20000234 PARAMETER Experiment Name: At_Siliques_P Parameter: Age (day) Value: 21
  misc_feature: MA Experiment 20000234 PARAMETER Experiment Name: At_Siliques_P Parameter: Organism Value: A. thaliana
  misc_feature: MA Experiment 20000234 PARAMETER Experiment Name: At_Siliques_P Parameter: Plant Line Value: WS
  misc_feature: MA Experiment 20000234 PARAMETER Experiment Name: At_Siliques_P Parameter: Tissue Value: Less Than 5mm Siliques vs. Whole Plant
  misc_feature: MA Experiment ID: 20000264 Result: Down-regulated in Transcription
  misc_feature: MA Experiment 20000264 PARAMETER Experiment Name: At_Open_Flower_P Parameter: Age (day) Value: 21
  misc_feature: MA Experiment 20000264 PARAMETER Experiment Name: At_Open_Flower_P Parameter: Plant Line Value: WS
  misc_feature: MA Experiment 20000264 PARAMETER Experiment Name: At_Open_Flower_P Parameter: Tissue Value: Open Flower vs. Whole Plant
  misc_feature: MA Experiment ID: 20000265 Result: Down-regulated in Transcription
  misc_feature: MA Experiment 20000265 PARAMETER Experiment Name: At_Open_Flower_P Parameter: Age (day) Value: 21
  misc_feature: MA Experiment 20000265 PARAMETER Experiment Name: At_Open_Flower_P Parameter: Plant Line Value: WS
  misc_feature: MA Experiment 20000265 PARAMETER Experiment Name: At_Open_Flower_P Parameter: Tissue Value: Closed Flower vs. Whole Plant
  misc_feature: MA Experiment ID: 20000286 Result: Down-regulated in Transcription
  misc_feature: MA Experiment 20000286 PARAMETER Experiment Name: At_Open_Flower_P Parameter: Age (day) Value: 21
  misc_feature: MA Experiment 20000286 PARAMETER Experiment Name: At_Open_Flower_P Parameter: Plant Line Value: WS
  misc_feature: MA Experiment 20000286 PARAMETER Experiment Name: At_Open_Flower_P Parameter: Tissue Value: Half Open vs. Whole Plant
  misc_feature: MA Experiment ID: 20000436 Result: Up-regulated in Transcription
  misc_feature: MA Experiment 20000436 PARAMETER Experiment Name: At_Drought_P Parameter: Age (day) Value: 7
  misc_feature: MA Experiment 20000436 PARAMETER Experiment Name: At_Drought_P Parameter: Organism Value: A. thaliana
  misc_feature: MA Experiment 20000436 PARAMETER Experiment Name: At_Drought_P Parameter: Plant Line Value: WS
  misc_feature: MA Experiment 20000436 PARAMETER Experiment Name: At_Drought_P Parameter: Timepoint (hr) Value: 12
  misc_feature: MA Experiment 20000436 PARAMETER Experiment Name: At_Drought_P Parameter: Tissue Value: Whole Plant
  misc_feature: MA Experiment 20000436 PARAMETER Experiment Name: At_Drought_P Parameter: Treatment Value: Drought vs. No Drought
  misc_feature: MA Experiment ID: 20000437 Result: Up-regulated in Transcription
  misc_feature: MA Experiment 20000437 PARAMETER Experiment Name: At_Drought_P Parameter: Age (day) Value: 8
  misc_feature: MA Experiment 20000437 PARAMETER Experiment Name: At_Drought_P Parameter: Organism Value: A. thaliana
  misc_feature: MA Experiment 20000437 PARAMETER Experiment Name: At_Drought_P Parameter: Plant Line Value: WS
  misc_feature: MA Experiment 20000437 PARAMETER Experiment Name: At_Drought_P Parameter: Timepoint (hr) Value: 24
  misc_feature: MA Experiment 20000437 PARAMETER Experiment Name: At_Drought_P Parameter: Tissue Value: Whole Plant
  misc_feature: MA Experiment 20000437 PARAMETER Experiment Name: At_Drought_P Parameter: Treatment Value: Drought vs. No Drought
  misc_feature: MA Experiment ID: 20000438 Result: Down-regulated in Transcription
  misc_feature: MA Experiment 20000438 PARAMETER Experiment Name: At_Shoots__P Parameter: Age (day) Value: 14
  misc_feature: MA Experiment 20000438 PARAMETER Experiment Name: At_Shoots__P Parameter: Tissue Value: Shoots vs. Whole Plant
  misc_feature: MA Experiment ID: 20000453 Result: Up-regulated in Transcription
  misc_feature: MA Experiment 20000453 PARAMETER Experiment Name: At_100uM_ABA_P Parameter: Age (day) Value: 15
  misc_feature: MA Experiment 20000453 PARAMETER Experiment Name: At_100uM_ABA_P Parameter: Organism Value: A. thaliana
  misc_feature: MA Experiment 20000453 PARAMETER Experiment Name: At_100uM_ABA_P Parameter: Plant Line Value: WS
  misc_feature: MA Experiment 20000453 PARAMETER Experiment Name: At_100uM_ABA_P Parameter: Timepoint (hr) Value: 24
  misc_feature: MA Experiment 20000453 PARAMETER Experiment Name: At_100uM_ABA_P Parameter: Tissue Value: Aerial
  misc_feature: MA Experiment 20000453 PARAMETER Experiment Name: At_100uM_ABA_P Parameter: Treatment Value: 100uM ABA vs. No Treatment
  misc_feature: MA Experiment ID: 20000496 Result: Up-regulated in Transcription
  misc_feature: MA Experiment 20000496 PARAMETER Experiment Name: At_Guard_Cells_P Parameter: Harvest Date Value: 7/19/2002
  misc_feature: MA Experiment 20000496 PARAMETER Experiment Name: At_Guard_Cells_P Parameter: Organism Value: Canola
  misc_feature: MA Experiment 20000496 PARAMETER Experiment Name: At_Guard_Cells_P Parameter: Tissue Value: Guard Cells vs. Leaves
  misc_feature: MA Experiment ID: 20000527 Result: Down-regulated in Transcription
  misc_feature: MA Experiment 20000527 PARAMETER Experiment Name: At_10percent_PEG_P Parameter: Age (day) Value: 20
  misc_feature: MA Experiment 20000527 PARAMETER Experiment Name: At_10percent_PEG_P Parameter: Organism Value: A. thaliana
  misc_feature: MA Experiment 20000527 PARAMETER Experiment Name: At_10percent_PEG_P Parameter: Plant Line Value: WS
  misc_feature: MA Experiment 20000527 PARAMETER Experiment Name: At_10percent_PEG_P Parameter: Timepoint (day) Value: 20
  misc_feature: MA Experiment 20000527 PARAMETER Experiment Name: At_10percent_PEG_P Parameter: Tissue Value: Whole Plant
  misc_feature: MA Experiment 20000527 PARAMETER Experiment Name: At_10percent_PEG_P Parameter: Treatment Value: 10percent PEG vs. No Treatment
  misc_feature: MA Experiment ID: 20000794 Result: Down-regulated in Transcription
  misc_feature: MA Experiment 20000794 PARAMETER Experiment Name: At_Petals_P Parameter: Age (day) Value: 23-25 days
  misc_feature: MA Experiment 20000794 PARAMETER Experiment Name: At_Petals_P Parameter: Plant Line Value: WS
  misc_feature: MA Experiment 20000794 PARAMETER Experiment Name: At_Petals_P Parameter: Tissue Value: Petals vs. Whole plant
  misc_feature: MA Experiment ID: 20001559 Result: Up-regulated in Transcription
  misc_feature: MA Experiment 20001559 PARAMETER Experiment Name: At_Drought_Soil_Dry_P Parameter: Age (day) Value: 28
  misc_feature: MA Experiment 20001559 PARAMETER Experiment Name: At_Drought_Soil_Dry_P Parameter: Organism Value: A. thaliana
  misc_feature: MA Experiment 20001559 PARAMETER Experiment Name: At_Drought_Soil_Dry_P Parameter: Plant Line Value: WS
  misc_feature: MA Experiment 20001559 PARAMETER Experiment Name: At_Drought_Soil_Dry_P Parameter: Post Timepoint (hr) Value: 29
  misc_feature: MA Experiment 20001559 PARAMETER Experiment Name: At_Drought_Soil_Dry_P Parameter: Post-Treatment Value: Re-Water vs. No Drought
  misc_feature: MA Experiment 20001559 PARAMETER Experiment Name: At_Drought_Soil_Dry_P Parameter: Timepoint (day) Value: 14
  misc_feature: MA Experiment 20001559 PARAMETER Experiment Name: At_Drought_Soil_Dry_P Parameter: Treatment Value: Drought vs. No Drought
  misc_feature: MA Experiment ID: 20001560 Result: Down-regulated in Transcription
  misc_feature: MA Experiment 20001560 PARAMETER Experiment Name: At_Drought_Soil_Dry_P Parameter: Age (day) Value: 28
  misc_feature: MA Experiment 20001560 PARAMETER Experiment Name: At_Drought_Soil_Dry_P Parameter: Organism Value: A. thaliana
  misc_feature: MA Experiment 20001560 PARAMETER Experiment Name: At_Drought_Soil_Dry_P Parameter: Plant Line Value: WS
  misc_feature: MA Experiment 20001560 PARAMETER Experiment Name: At_Drought_Soil_Dry_P Parameter: Post Timepoint (hr) Value: None
  misc_feature: MA Experiment 20001560 PARAMETER Experiment Name: At_Drought_Soil_Dry_P Parameter: Post-Treatment Value: None
  misc_feature: MA Experiment 20001560 PARAMETER Experiment Name: At_Drought_Soil_Dry_P Parameter: Timepoint (day) Value: 14
  misc_feature: MA Experiment 20001560 PARAMETER Experiment Name: At_Drought_Soil_Dry_P Parameter: Treatment Value: Drought vs. No Drought
  misc_feature: MA Experiment ID: 20001904 Result: Up-regulated in Transcription
  misc_feature: MA Experiment 20001904 PARAMETER Experiment Name: At_Drought_Reproduction_P Parameter: Age (day) Value: 37
  misc_feature: MA Experiment 20001904 PARAMETER Experiment Name: At_Drought_Reproduction_P Parameter: Organism Value: A. thaliana
  misc_feature: MA Experiment 20001904 PARAMETER Experiment Name: At_Drought_Reproduction_P Parameter: Plant Line Value: WS
  misc_feature: MA Experiment 20001904 PARAMETER Experiment Name: At_Drought_Reproduction_P Parameter: Timepoint (day) Value: 7
  misc_feature: MA Experiment 20001904 PARAMETER Experiment Name: At_Drought_Reproduction_P Parameter: Tissue Value: Rosettes
  misc_feature: MA Experiment 20001904 PARAMETER Experiment Name: At_Drought_Reproduction_P Parameter: Treatment Value: Drought vs. No Drought
gacagaggaggagcacatcatcgtgttcttcttcgactcggcgattccaaaaaaggacgcttgcttcatcgcaggcgtcgctgtatcactctccggccgagttctttcacgttttcttcgaaggaatgcaaaactatggtgattgattaaatcgtgtgacaatcgaaaagttgaggaattgcaaggattcgagatagagtctaaaaatggagcaccaagaccttacagattcgagaaaggatcctctttgcatttctcaattgaaaatttcttcttcttctctcgacccattgcctcatgccaacatggcagaggatttaacaaagagtcgtaggcattcacctataaaagtggaagggagtgaagaaacttggggagtagaagatgatgatgaccttactgaccctatttttgataccattgagggcaatggacattcagatccaacaagctgcttcgatgctgatttaagtgagtacaaaaagaaggccacagtaatcgttgaggaatactttggcaccaatgatgttgtctctgttgttaatgaactaaaggagcttggaatggctgagtaccgttattattttgtcaagaagttagtctccatggctatggatagacatgacaaagagaaagaaatggctgcttttctcctctctaccctttatgccgacgtcattgatcccccagaagtttacagaggtttcaacaaactggtcgcttctgctgatgatttatctgttgatattcccgatgcagttgatgttcttgctgtctttgtggctcgggcaattgttgacgacattcttcctcctgcgtttctcaagaagcaaatgaaattgctgccagataactccaaaggtgttgaggttttgagaaaggctgagaagagctatctagcgactccgcttcatgctgaagttgttgagaagagatggggagggactgataattggactgctgaggatgtgaaagctagaattaacgacttgttgaaagagtatgtcatgagtggagacaaaaaagaagcttttagatgcatcaaaggattgaaagttcctttctttcatcatgagattgtcaaacgagcactgatcatggcaatggaaaggcgaaaagctcaagtcaggctgctagatctgttgaaagaaacgattgaggttggtctcataaactccactcaggtgacaaaagggtttagcagaatcattgattcaatcgaagatttgtctcttgacataccagacgcacgccgtattttacagtctttcatctctaaagcggcttctgaaggatggttatgtgcttcttctctgaaatcactctctgctgatgcaggagaaaagttacttgaaaactccagcgccaatgtttttaaagacaaggcgaagtcgatcatccgagagtatttcctttcaggtgacacttcagaggtcgtacattgtctagacaccgaattgaatgcatcttcgagtcagctacgcgcaatctttgtcaaatatctgataactctagcaatggacaggaagaaaagagagaaggagatggcttgtgtgctcgtctctactcttggtttccctcccaaagatgtcagaagcgcattctcgatgctcatactcgtgccgagagagccactagtccccccccccccatcttctcgggtaaacagaatcaactagttttgtttttcctctttcaaaaatgcatttctcttcgtcttcaacatcgtccacttggacaatcttaatcacattgggatgtcttatgcttcatgcatctttgtccgctgctcaactcacccctaccttctacgataggtcatgtcctaatgtcactaacatcgtacgagaaaccattgtaaatgagttaaggtcggaccctcgtatcgctgcgagcatccttcgtcttcacttccacgactgctatgttaatggttgtgacgcatccatcttgttagacaacacgacatcatttcgaacagagaaagatgcgtttggaaacgcaaattcggctcggggatttcctgtgattgatagaatgaaagctgcggtggagagggcatgcccaagaaccgtttcatgcgcagatatgctcaccattgctgctcaacaatctgtcactttggcaggaggtccttcttggagggttcctttgggaaggagagacagtttacaagcattcctggaactcgctaatgcaaatcttccagctccattctttacacttccacaacttaaagccagcttcagaaatgttggtctcgatcgtccttctgatctcgttgctctctccggtggtcacacatttggtaaaaatcaatgtcagtttattcttgacagattatacaatttcagcaacacaggtttacccgaccctaccctcaatactacttacctccaaactcttcgtggactatgcccccttaatggcaatcgaagtgccttggtagattttgatctacgtacgcctacggttttcgacaacaaatactacgtgaatctcaaagagcgaaaaggtcttatccagagcgaccaagagttgttctctagccccaatgccactgacacaatccccttggtgagagcatatgctgatggcacacaaacatttttcaatgcatttgtggaggcgatgaataggatgggaaacattacaccaactacaggaactcaaggacaaatcagattgaactgtagagtggtgaactccaactctctgctccatgatgtggtggatatcgttgactttgttagctctatgtgagaattgtttacccaatatgtggctacaagaatacatatatattaatgaataaaactctcaagacgtttacttgagaacatttatttt

SEQ ID NO: 20742 - protein, 490 aa, Arabidopsis thaliana
  peptide (1)..(490): Ceres Seq. ID no. 14309756
  misc_feature (91)..(202): Pfam Name: MA3 domain Pfam Description: MA3 domain
  misc_feature (91)..(371): Homolog of NCBI NO: 2505865 NR Description: putative topoisomerase [Arabidopsis thaliana]
  misc_feature (91)..(388): Homolog of NCBI NO: 15219942 NR Description: MA3 domain-containing protein [Arabidopsis
  misc_feature (85)..(356): Homolog of NCBI NO: 7486528 NR Description: hypothetical protein F6I7.10 - Arabidopsis
  misc_feature (85)..(365): Homolog of NCBI NO: 10177300 NR Description: topoisomerase-like protein [Arabidopsis thaliana]
  misc_feature (85)..(377): Homolog of NCBI NO: 18416429 NR Description: MA3 domain-containing protein [Arabidopsis
  misc_feature (51)..(470): Homolog of NCBI NO: 18416429 NR Description: MA3 domain-containing protein [Arabidopsis
  misc_feature (51)..(470): Homolog of NCBI NO: 7486528 NR Description: hypothetical protein F6I7.10 - Arabidopsis
  misc_feature (51)..(470): Homolog of NCBI NO: 10177300 NR Description: topoisomerase-like protein [Arabidopsis thaliana]
  misc_feature (79)..(470): Homolog of NCBI NO: 2505865 NR Description: putative topoisomerase [Arabidopsis thaliana]
  misc_feature (1)..(470): Homolog of NCBI NO: 15219942 NR Description: MA3 domain-containing protein [Arabidopsis
MEHQDLTDSRKDPLCISQLKISSSSLDPLPHANMAEDLTKSRRHSPIKVEGSEETWGVEDDDDLTDPIFDTIEGNGHSDPTSCFDADLSEYKKKATVIVEEYFGTNDVVSVVNELKELGMAEYRYYFVKKLVSMAMDRHDKEKEMAAFLLSTLYADVIDPPEVYRGFNKLVASADDLSVDIPDAVDVLAVFVARAIVDDILPPAFLKKQMKLLPDNSKGVEVLRKAEKSYLATPLHAEVVEKRWGGTDNWTAEDVKARINDLLKEYVMSGDKKEAFRCIKGLKVPFFHHEIVKRALIMAMERRKAQVRLLDLLKETIEVGLINSTQVTKGFSRIIDSIEDLSLDIPDARRILQSFISKAASEGWLCASSLKSLSADAGEKLLENSSANVFKDKAKSIIREYFLSGDTSEVVHCLDTELNASSSQLRAIFVKYLITLAMDRKKREKEMACVLVSTLGFPPKDVRSAFSMLILVPREPLVPPPPSSRVNRIN

SEQ ID NO: 20743 - protein, 457 aa, Arabidopsis thaliana
  peptide (1)..(457): Ceres Seq. ID no. 14309757
  misc_feature (58)..(169): Pfam Name: MA3 domain Pfam Description: MA3 domain
  misc_feature (58)..(338): Homolog of NCBI NO: 2505865 NR Description: putative topoisomerase [Arabidopsis thaliana]
  misc_feature (58)..(355): Homolog of NCBI NO: 15219942 NR Description: MA3 domain-containing protein [Arabidopsis
  misc_feature (52)..(323): Homolog of NCBI NO: 7486528 NR Description: hypothetical protein F6I7.10 - Arabidopsis
  misc_feature (52)..(332): Homolog of NCBI NO: 10177300 NR Description: topoisomerase-like protein [Arabidopsis thaliana]
  misc_feature (52)..(344): Homolog of NCBI NO: 18416429 NR Description: MA3 domain-containing protein [Arabidopsis
  misc_feature (18)..(437): Homolog of NCBI NO: 18416429 NR Description: MA3 domain-containing protein [Arabidopsis
  misc_feature (18)..(437): Homolog of NCBI NO: 7486528 NR Description: hypothetical protein F6I7.10 - Arabidopsis
  misc_feature (18)..(437): Homolog of NCBI NO: 10177300 NR Description: topoisomerase-like protein [Arabidopsis thaliana]
  misc_feature (46)..(437): Homolog of NCBI NO: 2505865 NR Description: putative topoisomerase [Arabidopsis thaliana]
  misc_feature (1)..(437): Homolog of NCBI NO: 15219942 NR Description: MA3 domain-containing protein [Arabidopsis
MAEDLTKSRRHSPIKVEGSEETWGVEDDDDLTDPIFDTIEGNGHSDPTSCFDADLSEYKKKATVIVEEYFGTNDVVSVVNELKELGMAEYRYYFVKKLVSMAMDRHDKEKEMAAFLLSTLYADVIDPPEVYRGFNKLVASADDLSVDIPDAVDVLAVFVARAIVDDILPPAFLKKQMKLLPDNSKGVEVLRKAEKSYLATPLHAEVVEKRWGGTDNWTAEDVKARINDLLKEYVMSGDKKEAFRCIKGLKVPFFHHEIVKRALIMAMERRKAQVRLLDLLKETIEVGLINSTQVTKGFSRIIDSIEDLSLDIPDARRILQSFISKAASEGWLCASSLKSLSADAGEKLLENSSANVFKDKAKSIIREYFLSGDTSEVVHCLDTELNASSSQLRAIFVKYLITLAMDRKKREKEMACVLVSTLGFPPKDVRSAFSMLILVPREPLVPPPPSSRVNRIN

SEQ ID NO: 20744 - protein, 371 aa, Arabidopsis thaliana
  peptide (1)..(371): Ceres Seq. ID no. 14309758
  misc_feature (1)..(83): Pfam Name: MA3 domain Pfam Description: MA3 domain
  misc_feature (1)..(252): Homolog of NCBI NO: 2505865 NR Description: putative topoisomerase [Arabidopsis thaliana]
  misc_feature (1)..(269): Homolog of NCBI NO: 15219942 NR Description: MA3 domain-containing protein [Arabidopsis
  misc_feature (1)..(237): Homolog of NCBI NO: 7486528 NR Description: hypothetical protein F6I7.10 - Arabidopsis
  misc_feature (1)..(246): Homolog of NCBI NO: 10177300 NR Description: topoisomerase-like protein [Arabidopsis thaliana]
  misc_feature (1)..(258): Homolog of NCBI NO: 18416429 NR Description: MA3 domain-containing protein [Arabidopsis
  misc_feature (1)..(351): Homolog of NCBI NO: 18416429 NR Description: MA3 domain-containing protein [Arabidopsis
  misc_feature (1)..(351): Homolog of NCBI NO: 7486528 NR Description: hypothetical protein F6I7.10 - Arabidopsis
  misc_feature (1)..(351): Homolog of NCBI NO: 10177300 NR Description: topoisomerase-like protein [Arabidopsis thaliana]
  misc_feature (1)..(351): Homolog of NCBI NO: 2505865 NR Description: putative topoisomerase [Arabidopsis thaliana]
  misc_feature (1)..(351): Homolog of NCBI NO: 15219942 NR Description: MA3 domain-containing protein [Arabidopsis
MAEYRYYFVKKLVSMAMDRHDKEKEMAAFLLSTLYADVIDPPEVYRGFNKLVASADDLSVDIPDAVDVLAVFVARAIVDDILPPAFLKKQMKLLPDNSKGVEVLRKAEKSYLATPLHAEVVEKRWGGTDNWTAEDVKARINDLLKEYVMSGDKKEAFRCIKGLKVPFFHHEIVKRALIMAMERRKAQVRLLDLLKETIEVGLINSTQVTKGFSRIIDSIEDLSLDIPDARRILQSFISKAASEGWLCASSLKSLSADAGEKLLENSSANVFKDKAKSIIREYFLSGDTSEVVHCLDTELNASSSQLRAIFVKYLITLAMDRKKREKEMACVLVSTLGFPPKDVRSAFSMLILVPREPLVPPPPSSRVNRIN

SEQ ID NO: 20745 - DNA, 762 bp, Arabidopsis thaliana
  misc_feature (1)..(762): Ceres Seq. ID no. 13646569
gaaccacctaatctctcctcctctccttctctctattttgccggaatacatatgatcgagtgaaacggcggacaaagctgtcgtgttgagtactaattcgccgtcgtttttctcagtgaaggagtggtgagagatgtcgagtctcgaagatatcaagaacgagactgttgatctggaaaaaattccgattgaggaagttttccagcagctaaaatgttcaagggaaggattgacaacgcaggaaggggaggacaggattcagatctttggccccaacaagctcgaagagaaaaaggaaagcaaacttctgaagtttttggggtttatgtggaatccactttcatgggtcatggaaatggctgcaatcatggccattgctttggccaacggtgatggtaggcctccggattggcagcattttgttggtattatctgtctgttggttatcaactctaccatcagttttatcgaagaaaacaatgctggtaatgctgctgctgctcttatggctggtcttgctcctaaaaccaaggttcttagggatggaaagtggagtgaacaagaagctgctattcttgtcccaggagatattgttagcattaaattaggagacattatcccagctgatgcccacatagggagagatctttgtttattgccataactcttcccaaaccttattgttagtgttcttgtttctcaaatatgtacttttgcataatttgctcttttgaagaaacaaggcatgcctttgtgtttggc

SEQ ID NO: 20746 - protein, 176 aa, Arabidopsis thaliana
  peptide (1)..(176): Ceres Seq. ID no. 13646570
  misc_feature (5)..(86): Pfam Name: Cation transporter/ATPase, N-terminus Pfam Description: Cation transporter/ATPase, N-terminus
  misc_feature (1)..(168): Homolog of NCBI NO: 7436367 NR Description: H+-exporting ATPase (EC 3.6.3.6), plasma membrane
  misc_feature (3)..(168): Homolog of NCBI NO: 7105717 NR Description: plasma membrane proton ATPase [Kosteletzkya
  misc_feature (2)..(168): Homolog of NCBI NO: 15982713 NR Description: AT5g57350/MJB24_16 [Arabidopsis thaliana]
  misc_feature (2)..(168): Homolog of NCBI NO: 15242103 NR Description: ATPase 3, plasma membrane-type (proton pump 3)
  misc_feature (3)..(168): Homolog of NCBI NO: 1076663 NR Description: H+-exporting ATPase (EC 3.6.3.6) (clone PHA2) -
  misc_feature (3)..(168): Homolog of NCBI NO: 416664 NR Description: Plasma membrane ATPase 4 (Proton pump 4)
  misc_feature (3)..(168): Homolog of NCBI NO: 1621440 NR Description: plasma membrane H+-ATPase [Lycopersicon
  misc_feature (1)..(168): Homolog of NCBI NO: 15224264 NR Description: ATPase 1, plasma membrane-type (proton pump 1)
  misc_feature (1)..(168): Homolog of NCBI NO: 166746 NR Description: plasma membrane proton pump H+ ATPase
  misc_feature (1)..(168): Homolog of NCBI NO: 15234666 NR Description: ATPase 2, plasma membrane-type (proton pump 2)
MSSLEDIKNETVDLEKIPIEEVFQQLKCSREGLTTQEGEDRIQIFGPNKLEEKKESKLLKFLGFMWNPLSWVMEMAAIMAIALANGDGRPPDWQHFVGIICLLVINSTISFIEENNAGNAAAALMAGLAPKTKVLRDGKWSEQEAAILVPGDIVSIKLGDIIPADAHIGRDLCLLP

SEQ ID NO: 20747 - protein, 112 aa, Arabidopsis thaliana
  peptide (1)..(112): Ceres Seq. ID no. 13646571
  misc_feature (34)..(104): Pfam Name: E1-E2 ATPase Pfam Description: E1-E2 ATPase
  misc_feature (1)..(104): Homolog of NCBI NO: 416664 NR Description: Plasma membrane ATPase 4 (Proton pump 4)
  misc_feature (1)..(104): Homolog of NCBI NO: 7436367 NR Description: H+-exporting ATPase (EC 3.6.3.6), plasma membrane
  misc_feature (1)..(104): Homolog of NCBI NO: 7105717 NR Description: plasma membrane proton ATPase [Kosteletzkya
  misc_feature (1)..(104): Homolog of NCBI NO: 15982713 NR Description: AT5g57350/MJB24_16 [Arabidopsis thaliana]
  misc_feature (1)..(104): Homolog of NCBI NO: 15242103 NR Description: ATPase 3, plasma membrane-type (proton pump 3)
  misc_feature (1)..(104): Homolog of NCBI NO: 1076663 NR Description: H+-exporting ATPase (EC 3.6.3.6) (clone PHA2) -
  misc_feature (1)..(104): Homolog of NCBI NO: 1621440 NR Description: plasma membrane H+-ATPase [Lycopersicon
  misc_feature (1)..(104): Homolog of NCBI NO: 15224264 NR Description: ATPase 1, plasma membrane-type (proton pump 1)
  misc_feature (1)..(104): Homolog of NCBI NO: 166746 NR Description: plasma membrane proton pump H+ ATPase
  misc_feature (1)..(104): Homolog of NCBI NO: 15234666 NR Description: ATPase 2, plasma membrane-type (proton pump 2)
MWNPLSWVMEMAAIMAIALANGDGRPPDWQHFVGIICLLVINSTISFIEENNAGNAAAALMAGLAPKTKVLRDGKWSEQEAAILVPGDIVSIKLGDIIPADAHIGRDLCLLP

SEQ ID NO: 20748 - protein, 104 aa, Arabidopsis thaliana
  peptide (1)..(104): Ceres Seq. ID no. 13646572
  misc_feature (26)..(96): Pfam Name: E1-E2 ATPase Pfam Description: E1-E2 ATPase
  misc_feature (1)..(96): Homolog of NCBI NO: 416664 NR Description: Plasma membrane ATPase 4 (Proton pump 4)
  misc_feature (1)..(96): Homolog of NCBI NO: 7436367 NR Description: H+-exporting ATPase (EC 3.6.3.6), plasma membrane
  misc_feature (1)..(96): Homolog of NCBI NO: 7105717 NR Description: plasma membrane proton ATPase [Kosteletzkya
  misc_feature (1)..(96): Homolog of NCBI NO: 15982713 NR Description: AT5g57350/MJB24_16 [Arabidopsis thaliana]
  misc_feature (1)..(96): Homolog of NCBI NO: 15242103 NR Description: ATPase 3, plasma membrane-type (proton pump 3)
  misc_feature (1)..(96): Homolog of NCBI NO: 1076663 NR Description: H+-exporting ATPase (EC 3.6.3.6) (clone PHA2) -
  misc_feature (1)..(96): Homolog of NCBI NO: 1621440 NR Description: plasma membrane H+-ATPase [Lycopersicon
  misc_feature (1)..(96): Homolog of NCBI NO: 15224264 NR Description: ATPase 1, plasma membrane-type (proton pump 1)
  misc_feature (1)..(96): Homolog of NCBI NO: 166746 NR Description: plasma membrane proton pump H+ ATPase
  misc_feature (1)..(96): Homolog of NCBI NO: 15234666 NR Description: ATPase 2, plasma membrane-type (proton pump 2)
MEMAAIMAIALANGDGRPPDWQHFVGIICLLVINSTISFIEENNAGNAAAALMAGLAPKTKVLRDGKWSEQEAAILVPGDIVSIKLGDIIPADAHIGRDLCLLP

SEQ ID NO: 20749 - DNA, 1310 bp, Arabidopsis thaliana
  misc_feature (1)..(1310): Ceres Seq. ID no. 14315788
  misc_feature: MA Experiment ID: 20000171 Result: Up-regulated in Transcription
  misc_feature: MA Experiment 20000171 PARAMETER Experiment Name: At_42deg_Heat_P Parameter: Age (day) Value: 14
  misc_feature: MA Experiment 20000171 PARAMETER Experiment Name: At_42deg_Heat_P Parameter: Organism Value: A. thaliana
  misc_feature: MA Experiment 20000171 PARAMETER Experiment Name: At_42deg_Heat_P Parameter: Plant Line Value: WS
  misc_feature: MA Experiment 20000171 PARAMETER Experiment Name: At_42deg_Heat_P Parameter: Temperature (deg C) Value: 42 vs. 22
  misc_feature: MA Experiment 20000171 PARAMETER Experiment Name: At_42deg_Heat_P Parameter: Timepoint (hr) Value: 1
  misc_feature: MA Experiment 20000171 PARAMETER Experiment Name: At_42deg_Heat_P Parameter: Tissue Value: Aerial
  misc_feature: MA Experiment ID: 20000173 Result: Up-regulated in Transcription
  misc_feature: MA Experiment 20000173 PARAMETER Experiment Name: At_42deg_Heat_P Parameter: Age (day) Value: 14
  misc_feature: MA Experiment 20000173 PARAMETER Experiment Name: At_42deg_Heat_P Parameter: Organism Value: A. thaliana
  misc_feature: MA Experiment 20000173 PARAMETER Experiment Name: At_42deg_Heat_P Parameter: Plant Line Value: WS
  misc_feature: MA Experiment 20000173 PARAMETER Experiment Name: At_42deg_Heat_P Parameter: Temperature (deg C) Value: 42 vs. 22
  misc_feature: MA Experiment 20000173 PARAMETER Experiment Name: At_42deg_Heat_P Parameter: Timepoint (hr) Value: 6
  misc_feature: MA Experiment 20000173 PARAMETER Experiment Name: At_42deg_Heat_P Parameter: Tissue Value: Aerial
  misc_feature: MA Experiment ID: 20000184 Result: Down-regulated in Transcription
  misc_feature: MA Experiment 20000184 PARAMETER Experiment Name: At_Shoots__P Parameter: Age (day) Value: 7
  misc_feature: MA Experiment 20000184 PARAMETER Experiment Name: At_Shoots__P Parameter: Tissue Value: Shoots vs. Whole Plant
  misc_feature: MA Experiment ID: 20000437 Result: Up-regulated in Transcription
  misc_feature: MA Experiment 20000437 PARAMETER Experiment Name: At_Drought_P Parameter: Age (day) Value: 8
  misc_feature: MA Experiment 20000437 PARAMETER Experiment Name: At_Drought_P Parameter: Organism Value: A. thaliana
  misc_feature: MA Experiment 20000437 PARAMETER Experiment Name: At_Drought_P Parameter: Plant Line Value: WS
  misc_feature: MA Experiment 20000437 PARAMETER Experiment Name: At_Drought_P Parameter: Timepoint (hr) Value: 24
  misc_feature: MA Experiment 20000437 PARAMETER Experiment Name: At_Drought_P Parameter: Tissue Value: Whole Plant
  misc_feature: MA Experiment 20000437 PARAMETER Experiment Name: At_Drought_P Parameter: Treatment Value: Drought vs. No Drought
  misc_feature: MA Experiment ID: 20001248 Result: Up-regulated in Transcription
  misc_feature: MA Experiment 20001248 PARAMETER Experiment Name: At_Far-red-induction_P Parameter: Age (day) Value: 7
  misc_feature: MA Experiment 20001248 PARAMETER Experiment Name: At_Far-red-induction_P Parameter: Light Value: Far-red vs. White
  misc_feature: MA Experiment 20001248 PARAMETER Experiment Name: At_Far-red-induction_P Parameter: Organism Value: A. thaliana
  misc_feature: MA Experiment 20001248 PARAMETER Experiment Name: At_Far-red-induction_P Parameter: Plant Line Value: Columbia
  misc_feature: MA Experiment 20001248 PARAMETER Experiment Name: At_Far-red-induction_P Parameter: Timepoint (hr) Value: 4
  misc_feature: MA Experiment 20001248 PARAMETER Experiment Name: At_Far-red-induction_P Parameter: Tissue Value: Whole Plant
  misc_feature: MA Experiment ID: 20001450 Result: Up-regulated in Transcription
  misc_feature: MA Experiment 20001450 PARAMETER Experiment Name: At_Far-red-induction_P Parameter: Age (day) Value: 7
  misc_feature: MA Experiment 20001450 PARAMETER Experiment Name: At_Far-red-induction_P Parameter: Light Value: Far-red vs. White
  misc_feature: MA Experiment 20001450 PARAMETER Experiment Name: At_Far-red-induction_P Parameter: Organism Value: A. thaliana
  misc_feature: MA Experiment 20001450 PARAMETER Experiment Name: At_Far-red-induction_P Parameter: Plant Line Value: Columbia
  misc_feature: MA Experiment 20001450 PARAMETER Experiment Name: At_Far-red-induction_P Parameter: Timepoint (hr) Value: 8
  misc_feature: MA Experiment 20001450 PARAMETER Experiment Name: At_Far-red-induction_P Parameter: Tissue Value: Whole Plant
  misc_feature: MA Experiment ID: 20001451 Result: Up-regulated in Transcription
  misc_feature: MA Experiment 20001451 PARAMETER Experiment Name: At_Far-red-induction_P Parameter: Age (day) Value: 7
  misc_feature: MA Experiment 20001451 PARAMETER Experiment Name: At_Far-red-induction_P Parameter: Light Value: Far-red vs. White
  misc_feature: MA Experiment 20001451 PARAMETER Experiment Name: At_Far-red-induction_P Parameter: Organism Value: A. thaliana
  misc_feature: MA Experiment 20001451 PARAMETER Experiment Name: At_Far-red-induction_P Parameter: Plant Line Value: Columbia
  misc_feature: MA Experiment 20001451 PARAMETER Experiment Name: At_Far-red-induction_P Parameter: Timepoint (hr) Value: 24
  misc_feature: MA Experiment 20001451 PARAMETER Experiment Name: At_Far-red-induction_P Parameter: Tissue Value: Whole Plant
gacgccgactcaaagaacccaaagctcttggaggaggtgatcttctcttctcagatcatcttctactcttgagtatacccttcctttgaagataattcctagtttgggacttatccttacttctccgggatttcactttaatccaccgaagagttttgacatctgaattgtattgttttgggtgtgatcccgatagaattcgagggtaggaatctgaaagtagggtgatttggtttagaagaagaaagaaatggagggttttgtcgatcactacattgttctaggtttagcttctggagaggaagctctgaagcttaccgagaaggagattgcaaaagcatacaagttgaaagctttggacttgcatcctgataaacgccctgatgatcctgatgcccatgagaaatttcagaggcttaagacatctaacgaggttctcaaagacgagaaagcccggaaactgtttgatgatcttcttagaatccagcgtgagaaacaacataagaaatcgcaagtagattccaagaggcgtaagatgatgtcagatctggaggaaagggagcgttctgctttttctcctaatccttccgctagagcttatgatgaagaagagagaatcgctaggaagcttaaggaggagatagataggatacgtgcaagacatgcgaagaagaaaagtggtttccaaactccagagagtaatgtagatgaaaagagaaaagaagaaagaagtggtgctggagctagtgttcaactcgataaagagagaatgttgaaggtttcttgggaaaaaagtggtgaagggtatacagctggaaggctaagagaagtgttttctgagtttggtgaggttgaagatgttgttattaggagtaccaagaagaaatgttctgctcttattgtaatggctacaaaggatggagctgttgcagcgacgaggacattgtgtggcaatctttctaatccattgttggttgtacctcttcagaaagcagcccaaaccgattttctgacggctaagaaatctgcagaagcagaaccgcagagtaacatagtaggtgccggtcttcaagcttatgaagatgccgtcatgcaaagactgctacaggcggctatggaccagaaaaagcgaaagccacatgatcaagaacaaagctccttcaagaccaaagtgataaagaataaagctctgcttcatgattaagaattaagctccttatacattgtttgtgtacatccaatctcatatcagttgttgttgtagaatttaaaattctaactcttctcgaaaaaaaaaaatgcttcgtatc

SEQ ID NO: 20750 - protein, 317 aa, Arabidopsis thaliana
  peptide (1)..(317): Ceres Seq. ID no. 14315789
  misc_feature (6)..(76): Pfam Name: DnaJ domain Pfam Description: DnaJ domain
  misc_feature (17)..(294): Homolog of NCBI NO: 31202877 NR Description: ENSANGP00000018929 [Anopheles gambiae]
  misc_feature (5)..(294): Homolog of NCBI NO: 24645889 NR Description: CG17187-PA [Drosophila melanogaster]
  misc_feature (5)..(306): Homolog of NCBI NO: 26346254 NR Description: unnamed protein product [Mus musculus]
  misc_feature (5)..(306): Homolog of NCBI NO: 20982831 NR Description: RIKEN cDNA 1700025B16
  misc_feature (5)..(306): Homolog of NCBI NO: 34856699 NR Description: similar to RIKEN cDNA 1700025B16 [Rattus
  misc_feature (5)..(294): Homolog of NCBI NO: 29126919 NR Description: Similar to hypothetical protein FLJ10634 [Danio
  misc_feature (5)..(300): Homolog of NCBI NO: 8922563 NR Description: hypothetical protein FLJ10634 [Homo sapiens]
  misc_feature (1)..(294): Homolog of NCBI NO: 30689058 NR Description: DnaJ protein family [Arabidopsis thaliana]
  misc_feature (295)..(317): Homolog of NCBI NO: 8809700 NR Description: dbj|BAA91724.1~gene_id:MQM1.14~similar to unknown
  misc_feature (1)..(286): Homolog of NCBI NO: 8809700 NR Description: dbj|BAA91724.1~gene_id:MQM1.14~similar to unknown
MEGFVDHYIVLGLASGEEALKLTEKEIAKAYKLKALDLHPDKRPDDPDAHEKFQRLKTSNEVLKDEKARKLFDDLLRIQREKQHKKSQVDSKRRKMMSDLEERERSAFSPNPSARAYDEEERIARKLKEEIDRIRARHAKKKSGFQTPESNVDEKRKEERSGAGASVQLDKERMLKVSWEKSGEGYTAGRLREVFSEFGEVEDVVIRSTKKKCSALIVMATKDGAVAATRTLCGNLSNPLLVVPLQKAAQTDFLTAKKSAEAEPQSNIVGAGLQAYEDAVMQRLLQAAMDQKKRKPHDQEQSSFKTKVIKNKALLHD

SEQ ID NO: 20751 - protein, 222 aa, Arabidopsis thaliana
  peptide (1)..(222): Ceres Seq. ID no. 14315790
  misc_feature (1)..(88): Pfam Name: Caldesmon Pfam Description: Caldesmon
  misc_feature (1)..(199): Homolog of NCBI NO: 31202877 NR Description: ENSANGP00000018929 [Anopheles gambiae]
  misc_feature (1)..(199): Homolog of NCBI NO: 24645889 NR Description: CG17187-PA [Drosophila melanogaster]
  misc_feature (1)..(211): Homolog of NCBI NO: 26346254 NR Description: unnamed protein product [Mus musculus]
  misc_feature (1)..(211): Homolog of NCBI NO: 20982831 NR Description: RIKEN cDNA 1700025B16
  misc_feature (1)..(211): Homolog of NCBI NO: 34856699 NR Description: similar to RIKEN cDNA 1700025B16 [Rattus
  misc_feature (1)..(199): Homolog of NCBI NO: 29126919 NR Description: Similar to hypothetical protein FLJ10634 [Danio
  misc_feature (1)..(205): Homolog of NCBI NO: 8922563 NR Description: hypothetical protein FLJ10634 [Homo sapiens]
  misc_feature (1)..(199): Homolog of NCBI NO: 30689058 NR Description: DnaJ protein family [Arabidopsis thaliana]
  misc_feature (200)..(222): Homolog of NCBI NO: 8809700 NR Description: dbj|BAA91724.1~gene_id:MQM1.14~similar to unknown
  misc_feature (1)..(191): Homolog of NCBI NO: 8809700 NR Description: dbj|BAA91724.1~gene_id:MQM1.14~similar to unknown
MMSDLEERERSAFSPNPSARAYDEEERIARKLKEEIDRIRARHAKKKSGFQTPESNVDEKRKEERSGAGASVQLDKERMLKVSWEKSGEGYTAGRLREVFSEFGEVEDVVIRSTKKKCSALIVMATKDGAVAATRTLCGNLSNPLLVVPLQKAAQTDFLTAKKSAEAEPQSNIVGAGLQAYEDAVMQRLLQAAMDQKKRKPHDQEQSSFKTKVIKNKALLHD

SEQ ID NO: 20752 - protein, 221 aa, Arabidopsis thaliana
  peptide (1)..(221): Ceres Seq. ID no. 14315791
  misc_feature (1)..(87): Pfam Name: Caldesmon Pfam Description: Caldesmon
  misc_feature (1)..(198): Homolog of NCBI NO: 31202877 NR Description: ENSANGP00000018929 [Anopheles gambiae]
  misc_feature (1)..(198): Homolog of NCBI NO: 24645889 NR Description: CG17187-PA [Drosophila melanogaster]
  misc_feature (1)..(210): Homolog of NCBI NO: 26346254 NR Description: unnamed protein product [Mus musculus]
  misc_feature (1)..(210): Homolog of NCBI NO: 20982831 NR Description: RIKEN cDNA 1700025B16
  misc_feature (1)..(210): Homolog of NCBI NO: 34856699 NR Description: similar to RIKEN cDNA 1700025B16 [Rattus
  misc_feature (1)..(198): Homolog of NCBI NO: 29126919 NR Description: Similar to hypothetical protein FLJ10634 [Danio
  misc_feature (1)..(204): Homolog of NCBI NO: 8922563 NR Description: hypothetical protein FLJ10634 [Homo sapiens]
  misc_feature (1)..(198): Homolog of NCBI NO: 30689058 NR Description: DnaJ protein family [Arabidopsis thaliana]
  misc_feature (199)..(221): Homolog of NCBI NO: 8809700 NR Description: dbj|BAA91724.1~gene_id:MQM1.14~similar to unknown
  misc_feature (1)..(190): Homolog of NCBI NO: 8809700 NR Description: dbj|BAA91724.1~gene_id:MQM1.14~similar to unknown
MSDLEERERSAFSPNPSARAYDEEERIARKLKEEIDRIRARHAKKKSGFQTPESNVDEKRKEERSGAGASVQLDKERMLKVSWEKSGEGYTAGRLREVFSEFGEVEDVVIRSTKKKCSALIVMATKDGAVAATRTLCGNLSNPLLVVPLQKAAQTDFLTAKKSAEAEPQSNIVGAGLQAYEDAVMQRLLQAAMDQKKRKPHDQEQSSFKTKVIKNKALLHD

SEQ ID NO: 20753 - DNA, 1964 bp, Arabidopsis thaliana
  misc_feature (1)..(1964): Ceres Seq. ID no. 14310016
  misc_feature: MA Experiment ID: 20000171 Result: Up-regulated in Transcription
  misc_feature: MA Experiment 20000171 PARAMETER Experiment Name: At_42deg_Heat_P Parameter: Age (day) Value: 14
  misc_feature: MA Experiment 20000171 PARAMETER Experiment Name: At_42deg_Heat_P Parameter: Organism Value: A. thaliana
  misc_feature: MA Experiment 20000171 PARAMETER Experiment Name: At_42deg_Heat_P Parameter: Plant Line Value: WS
  misc_feature: MA Experiment 20000171 PARAMETER Experiment Name: At_42deg_Heat_P Parameter: Temperature (deg C) Value: 42 vs. 22
  misc_feature: MA Experiment 20000171 PARAMETER Experiment Name: At_42deg_Heat_P Parameter: Timepoint (hr) Value: 1
  misc_feature: MA Experiment 20000171 PARAMETER Experiment Name: At_42deg_Heat_P Parameter: Tissue Value: Aerial
  misc_feature: MA Experiment ID: 20000182 Result: Up-regulated in Transcription
  misc_feature: MA Experiment 20000182 PARAMETER Experiment Name: At_2mM_SA_P Parameter: Age (day) Value: 14
  misc_feature: MA Experiment 20000182 PARAMETER Experiment Name: At_2mM_SA_P Parameter: Organism Value: A. thaliana
  misc_feature: MA Experiment 20000182 PARAMETER Experiment Name: At_2mM_SA_P Parameter: Plant Line Value: WS
  misc_feature: MA Experiment 20000182 PARAMETER Experiment Name: At_2mM_SA_P Parameter: Timepoint (hr) Value: 6
  misc_feature: MA Experiment 20000182 PARAMETER Experiment Name: At_2mM_SA_P Parameter: Tissue Value: Aerial
  misc_feature: MA Experiment 20000182 PARAMETER Experiment Name: At_2mM_SA_P Parameter: Treatment Value: 2mM SA vs. No Treatment
  misc_feature: MA Experiment ID: 20001905 Result: Up-regulated in Transcription
  misc_feature: MA Experiment 20001905 PARAMETER Experiment Name: At_Drought_Reproduction_P Parameter: Age (day) Value: 40
  misc_feature: MA Experiment 20001905 PARAMETER Experiment Name: At_Drought_Reproduction_P Parameter: Organism Value: A. thaliana
  misc_feature: MA Experiment 20001905 PARAMETER Experiment Name: At_Drought_Reproduction_P Parameter: Plant Line Value: WS
  misc_feature: MA Experiment 20001905 PARAMETER Experiment Name: At_Drought_Reproduction_P Parameter: Timepoint (day) Value: 10
  misc_feature: MA Experiment 20001905 PARAMETER Experiment Name: At_Drought_Reproduction_P Parameter: Tissue Value: Rosettes
  misc_feature: MA Experiment 20001905 PARAMETER Experiment Name: At_Drought_Reproduction_P Parameter: Treatment Value: Drought vs. No Drought
gggaggatcctgcgaagaccaaccagtctgttaattttgtataaacaatgaaacgaagaagatcttccgagaatattctctccttctcacgcataccctagaatattgtttcgtctctcttccttctacgtttgcttatttgccccaactcgacgcgaatcatcagcttttataaattctgtcaactcaaagattgtttctgaattggaatcttacagaggtttagcttgagatgatatgactaatcagcaggagcaacacattgcgatatttacaacagctagtattccatggcttacgggaactgctgttaatcctctcttccgtgctgcctaccttgcaaatgatggggaaagacgggtcacgttggtgattccatggctgactttgaagcaccaaaagcttgtctacccaaatagcatcacttttagttccccgtcagagcaagaagcttatgtccgccagtggcttgaggagagagtctcttttcgtttagcctttgagatacgtttctatcctggaaagtttgctattgacaaaaggagtattcttcctgttggggatatatctgatgccattcctgatgaagaggcagacattgctgtcctcgaggagcctgagcatctcacatggtttcatcatggccaaaaatggaaaactaagttcaactacgtcataggaatcgtacacactaactacttggaatacgttaaaagagagaaacaaggccgtgtcaaagcatttttcctcaaatacttaaatagttgggttgttggcatttactgccacaaggtaaacttctttcttctttacagccactaggacatgatagagtgattgctcaattatgtgaatatatccaatggctgggtttaatttgagaatcaagacagtttgttggaatgtgaccacaattatggccggtccttttgatgtgaatcaggacttgtaccaatgatgttactcctgcaagtaatcaagttatctgctgcgactcaggaataccctaaatctatagtctgcaatgttcatggcgtcaaccctaaatttctcgaaattgggttgagaaaactagaacagcagaagctccaggagcagcccttcactaaaggcgcatactacattggtaagatggtctggagcaaagggtacaaggagcttcttaaactacttgagaaacaccaaaaggaacttgccgagttagaggttgatttatacggtgatggagaggactctgaagagatcaaagaagcagcccgaaaactcgacttgacggttaatgtttacccaggacgtgatcacgctgactcgctatttcacaactataaagtgtttctcaaccccagcacgacagacgttgtgtgtacaacaactgcagaagccttggcgatgggaaaaatagtagtatgcgcgaatcacatatcgaacaagttcttcaaacagtttcccaactgcagaacctatgacgatggacaaggttttgtaagagccacactcaaggctcttggggaacaaccatcgcaacttacagagcaacaaaggcatgaactatcatgggaagctgctacacaacggtttataaaagtctctgatctgaaccggttatcaagagctgattcgaacttgtcaaagagaagtgtgtttgcgtcatcttcgattagtgtggggaaaaacttggaggatatgtcagcgtatattcatttcttggcgtctggatttgaagcttccagaacagcttttggtgctatacctggaagcttgcagcccgatgaagagttatgtagagatcttggtttgtctctcaacactccttccccaaatactcgcaagcaagattgacctgttttttaatttatctttgtctgcatatcattgggatatttttgtgtataaatcaatgtatactatctgaatcattctatagcagctttggtgtaatattgatgatgaaagttagatttttc

SEQ ID NO: 20754 - protein, 294 aa, Arabidopsis thaliana
  peptide (1)..(294): Ceres Seq. ID no. 14310017
  misc_feature (37)..(198): Pfam Name: Glycosyl transferases group 1 Pfam Description: Glycosyl transferases group 1
  misc_feature (6)..(122): Homolog of NCBI NO: 30681840 NR Description: digalactosyldiacylglycerol synthase 1 (MGDG:MGDG
  misc_feature (60)..(294): Homolog of NCBI NO: 18141114 NR Description: digalactosyldiacylglycerol synthase [Arabidopsis
  misc_feature (6)..(294): Homolog of NCBI NO: 15229824 NR Description: digalactosyldiacylglycerol synthase 1 (MGDG:MGDG
  misc_feature (6)..(281): Homolog of NCBI NO: 27542603 NR Description: digalactosyldiacylglycerol synthase [Xerophyta
  misc_feature (6)..(281): Homolog of NCBI NO: 38344037 NR Description: OJ991214_12.18 [Oryza sativa (japonica
  misc_feature (6)..(283): Homolog of NCBI NO: 34902044 NR Description: name [Oryza sativa (japonica cultivar-group)]
  misc_feature (6)..(87): Homolog of NCBI NO: 7486557 NR Description: hypothetical protein F6N23.24 - Arabidopsis
  misc_feature (123)..(294): Homolog of NCBI NO: 7486557 NR Description: hypothetical protein F6N23.24 - Arabidopsis
  misc_feature (6)..(294): Homolog of NCBI NO: 22328179 NR Description: UDP-galactose:MGDG galactosyltransferase
MMLLLQVIKLSAATQEYPKSIVCNVHGVNPKFLEIGLRKLEQQKLQEQPFTKGAYYIGKMVWSKGYKELLKLLEKHQKELAELEVDLYGDGEDSEEIKEAARKLDLTVNVYPGRDHADSLFHNYKVFLNPSTTDVVCTTTAEALAMGKIVVCANHISNKFFKQFPNCRTYDDGQGFVRATLKALGEQPSQLTEQQRHELSWEAATQRFIKVSDLNRLSRADSNLSKRSVFASSSISVGKNLEDMSAYIHFLASGFEASRTAFGAIPGSLQPDEELCRDLGLSLNTPSPNTRKQD

SEQ ID NO: 20755 - protein, 293 aa, Arabidopsis thaliana
  peptide (1)..(293): Ceres Seq. ID no. 14310018
  misc_feature (36)..(197): Pfam Name: Glycosyl transferases group 1 Pfam Description: Glycosyl transferases group 1
  misc_feature (5)..(121): Homolog of NCBI NO: 30681840 NR Description: digalactosyldiacylglycerol synthase 1 (MGDG:MGDG
  misc_feature (59)..(293): Homolog of NCBI NO: 18141114 NR Description: digalactosyldiacylglycerol synthase [Arabidopsis
  misc_feature (5)..(293): Homolog of NCBI NO: 15229824 NR Description: digalactosyldiacylglycerol synthase 1 (MGDG:MGDG
  misc_feature (5)..(280): Homolog of NCBI NO: 27542603 NR Description: digalactosyldiacylglycerol synthase [Xerophyta
  misc_feature (5)..(280): Homolog of NCBI NO: 38344037 NR Description: OJ991214_12.18 [Oryza sativa (japonica
  misc_feature (5)..(282): Homolog of NCBI NO: 34902044 NR Description: name [Oryza sativa (japonica cultivar-group)]
  misc_feature (5)..(86): Homolog of NCBI NO: 7486557 NR Description: hypothetical protein F6N23.24 - Arabidopsis
  misc_feature (122)..(293): Homolog of NCBI NO: 7486557 NR Description: hypothetical protein F6N23.24 - Arabidopsis
  misc_feature (5)..(293): Homolog of NCBI NO: 22328179 NR Description: UDP-galactose:MGDG galactosyltransferase
MLLLQVIKLSAATQEYPKSIVCNVHGVNPKFLEIGLRKLEQQKLQEQPFTKGAYYIGKMVWSKGYKELLKLLEKHQKELAELEVDLYGDGEDSEEIKEAARKLDLTVNVYPGRDHADSLFHNYKVFLNPSTTDVVCTTTAEALAMGKIVVCANHISNKFFKQFPNCRTYDDGQGFVRATLKALGEQPSQLTEQQRHELSWEAATQRFIKVSDLNRLSRADSNLSKRSVFASSSISVGKNLEDMSAYIHFLASGFEASRTAFGAIPGSLQPDEELCRDLGLSLNTPSPNTRKQD

SEQ ID NO: 20756 - protein, 235 aa, Arabidopsis thaliana
  peptide (1)..(235): Ceres Seq. ID no. 14310019
  misc_feature (1)..(139): Pfam Name: Glycosyl transferases group 1 Pfam Description: Glycosyl transferases group 1
  misc_feature (1)..(63): Homolog of NCBI NO: 30681840 NR Description: digalactosyldiacylglycerol synthase 1 (MGDG:MGDG
  misc_feature (1)..(235): Homolog of NCBI NO: 18141114 NR Description: digalactosyldiacylglycerol synthase [Arabidopsis
  misc_feature (1)..(235): Homolog of NCBI NO: 15229824 NR Description: digalactosyldiacylglycerol synthase 1 (MGDG:MGDG
  misc_feature (1)..(222): Homolog of NCBI NO: 27542603 NR Description: digalactosyldiacylglycerol synthase [Xerophyta
  misc_feature (1)..(222): Homolog of NCBI NO: 38344037 NR Description: OJ991214_12.18 [Oryza sativa (japonica
  misc_feature (1)..(224): Homolog of NCBI NO: 34902044 NR Description: name [Oryza sativa (japonica cultivar-group)]
  misc_feature (1)..(28): Homolog of NCBI NO: 7486557 NR Description: hypothetical protein F6N23.24 - Arabidopsis
  misc_feature (64)..(235): Homolog of NCBI NO: 7486557 NR Description: hypothetical protein F6N23.24 - Arabidopsis
  misc_feature (1)..(235): Homolog of NCBI NO: 22328179 NR Description: UDP-galactose:MGDG galactosyltransferase
MVWSKGYKELLKLLEKHQKELAELEVDLYGDGEDSEEIKEAARKLDLTVNVYPGRDHADSLFHNYKVFLNPSTTDVVCTTTAEALAMGKIVVCANHISNKFFKQFPNCRTYDDGQGFVRATLKALGEQPSQLTEQQRHELSWEAATQRFIKVSDLNRLSRADSNLSKRSVFASSSISVGKNLEDMSAYIHFLASGFEASRTAFGAIPGSLQPDEELCRDLGLSLNTPSPNTRKQD

SEQ ID NO: 20757 - DNA, 2072 bp, Arabidopsis thaliana
  misc_feature (1)..(2072): Ceres Seq. ID no. 14309942
gagcaaagcgtcttccatttctcagaagagtgtgtgacaacagcggcaaccgacagacatgtcttcgccgacatcgccttggtttgcggatctcttcacagatgacagggtgaggaccctatcgcaccaggtctccacacttggggacagggtgtgggaactggagcacaaaattacccagctgatgggcgagaaggccaagctggagaagcaactggaggaggcaaaggcgatctcaagccacaaggaagaggtggggagaagcttgaaggctgaaaatgataagcttcagtcggaggttttggttgcggaggaaaagtgtagcaagtctgcagcggaggttgagaggctgacgaaggaattaggcgcgctggcggaggcaaaggaggcagctgccaaggaattcaacgacgagagagagaaaatcacgctagaatcggaggatctcaagatgaggctggaggaaatgctggccatcaaggatttgacagagagcgagaatgacaagcttcggtccgaggctttgatcgcagctgaaaagcaaaacatgtatgaagcagagattgagaggctcaagaaggaactgagtgggttgttggaggcgaaggaggcggctgccaaggctttcgacgtacaaaaagcagaaatcaccaatgaattagaggaactacagaggaagctgaaggaaatcgaagctaataaggatttagtggagggagaaaacagtaagcttcagtctgagattctcacagcacaggagaaatatagacagtctgaagcagaggttaagtgcattaaacaagtaatgtgttcagtggtggaggcgaaggaggcagctacaagggcatctgaagctgagaaggcagaaatcatggaggaaatggacaaccttaagaggacaatcgaggagatcaaggccaacagggatttggtagagagtcagaaccaggagcttcggtcaaagatttcgagtgcagagcaagagcgtagcctatttgaaggagagattaagagcgtcaggatggaattgggggcagtagaggaggccaagcagatccttacgagggagttcgatgctgagaaggcagagatcctgaaggaactggatgaccttgagaagaagctagaggaattgcagaccaacaagggtttgctggaggctgaaaacgacaagcttcagctggaggttttgaccgcacagcacaaacaaagcatgtccgaagcagaggctgagagccttaagatggaactgggagcattggtggaggcaaaggaggcggctacaaaagcatttggtgccgagaaagcaaagaccacgaaggaactggaggatcttaagaggaaggtggaggaaatccaaaccaagaaggatctggtggagggcgaaaaggataagctccgtttggagattttaatagcggagcagaggcatgccatggctgaattagaggttaagcgcctcaagatggacttggctgcatcggcagaggcgagggagacagttgtgaggtcatgtgacgctgagaaggccaagttcatggcggaaatagagaacctcaggaggaagatagaggaaatccacgccagcaaggaagcggccgagaaagcagcgcgcaacaaagatgcagaggctgacaggctgaaggatgagctggcgaggatccggctctctgtgtcacagctgcaagcgtcctgcgacgaacttgatgccaagcagtcgcgcctgaacgacgagaagaactctgtccagaaagcactagtgtccgagaaggtcgaaggtaacaagctcaagttaaaaatcgaggaactcgagaatcacattgctggcaaggacggtgagaaagggaaactgaaggcggcgttggaggaaaagatgactgagatcaatgctctcagcaaagacaacgcgatgctacatcgcacaattctcgaggcacaagagaagaataaaggtagcattttatcgttcttgtcaccgtgcggctccaagtaacttggttgtaatgtgttgcattactaatgcaatggtgaaggtaccatgcaatgaaataaaaatttcagtttgctctgtg

SEQ ID NO: 20758 - protein, 644 aa, Arabidopsis thaliana
  peptide (1)..(644): Ceres Seq. ID no. 14309943
  misc_feature (29)..(634): Pfam Name: Myosin tail Pfam Description: Myosin tail
  misc_feature (22)..(621): Homolog of NCBI NO: 32487724 NR Description: OSJNBa0022F16.25 [Oryza sativa (japonica
  misc_feature (15)..(628): Homolog of NCBI NO: 32487724 NR Description: OSJNBa0022F16.25 [Oryza sativa (japonica
  misc_feature (41)..(580): Homolog of NCBI NO: 32487724 NR Description: OSJNBa0022F16.25 [Oryza sativa (japonica
  misc_feature (64)..(564): Homolog of NCBI NO: 38345173 NR Description: OSJNBa0089E12.15 [Oryza sativa (japonica
  misc_feature (121)..(630): Homolog of NCBI NO: 38345638 NR Description: OSJNBb0028M18.1 [Oryza sativa (japonica
  misc_feature (11)..(535): Homolog of NCBI NO: 38345173 NR Description: OSJNBa0089E12.15 [Oryza sativa (japonica
  misc_feature (145)..(589): Homolog of NCBI NO: 38345173 NR Description: OSJNBa0089E12.15 [Oryza sativa (japonica
  misc_feature (115)..(614): Homolog of NCBI NO: 38345173 NR Description: OSJNBa0089E12.15 [Oryza sativa (japonica
  misc_feature (27)..(563): Homolog of NCBI NO: 38345638 NR Description: OSJNBb0028M18.1 [Oryza sativa (japonica
  misc_feature (11)..(644): Homolog of NCBI NO: 38346693 NR Description: OSJNBa0080E14.9 [Oryza sativa (japonica
MSSPTSPWFADLFTDDRVRTLSHQVSTLGDRVWELEHKITQLMGEKAKLEKQLEEAKAISSHKEEVGRSLKAENDKLQSEVLVAEEKCSKSAAEVERLTKELGALAEAKEAAAKEFNDEREKITLESEDLKMRLEEMLAIKDLTESENDKLRSEALIAAEKQNMYEAEIERLKKELSGLLEAKEAAAKAFDVQKAEITNELEELQRKLKEIEANKDLVEGENSKLQSEILTAQEKYRQSEAEVKCIKQVMCSVVEAKEAATRASEAEKAEIMEEMDNLKRTIEEIKANRDLVESQNQELRSKISSAEQERSLFEGEIKSVRMELGAVEEAKQILTREFDAEKAEILKELDDLEKKLEELQTNKGLLEAENDKLQLEVLTAQHKQSMSEAEAESLKMELGALVEAKEAATKAFGAEKAKTTKELEDLKRKVEEIQTKKDLVEGEKDKLRLEILIAEQRHAMAELEVKRLKMDLAASAEARETVVRSCDAEKAKFMAEIENLRRKIEEIHASKEAAEKAARNKDAEADRLKDELARIRLSVSQLQASCDELDAKQSRLNDEKNSVQKALVSEKVEGNKLKLKIEELENHIAGKDGEKGKLKAALEEKMTEINALSKDNAMLHRTILEAQEKNKGSILSFLSPCGSK

SEQ ID NO: 20759 - protein, 602 aa, Arabidopsis thaliana
  peptide (1)..(602): Ceres Seq. ID no. 14309944
  misc_feature (1)..(592): Pfam Name: Myosin tail Pfam Description: Myosin tail
  misc_feature (73)..(572): Homolog of NCBI NO: 38345173 NR Description: OSJNBa0089E12.15 [Oryza sativa (japonica
  misc_feature (22)..(522): Homolog of NCBI NO: 38345173 NR Description: OSJNBa0089E12.15 [Oryza sativa (japonica
  misc_feature (103)..(547): Homolog of NCBI NO: 38345173 NR Description: OSJNBa0089E12.15 [Oryza sativa (japonica
  misc_feature (79)..(588): Homolog of NCBI NO: 38345638 NR Description: OSJNBb0028M18.1 [Oryza sativa (japonica
  misc_feature (1)..(493): Homolog of NCBI NO: 38345173 NR Description: OSJNBa0089E12.15 [Oryza sativa (japonica
  misc_feature (1)..(579): Homolog of NCBI NO: 32487724 NR Description: OSJNBa0022F16.25 [Oryza sativa (japonica
  misc_feature (1)..(586): Homolog of NCBI NO: 32487724 NR Description: OSJNBa0022F16.25 [Oryza sativa (japonica
  misc_feature (1)..(538): Homolog of NCBI NO: 32487724 NR Description: OSJNBa0022F16.25 [Oryza sativa (japonica
  misc_feature (1)..(521): Homolog of NCBI NO: 38345638 NR Description: OSJNBb0028M18.1 [Oryza sativa (japonica
  misc_feature (1)..(602): Homolog of NCBI NO: 38346693 NR Description: OSJNBa0080E14.9 [Oryza sativa (japonica
MGEKAKLEKQLEEAKAISSHKEEVGRSLKAENDKLQSEVLVAEEKCSKSAAEVERLTKELGALAEAKEAAAKEFNDEREKITLESEDLKMRLEEMLAIKDLTESENDKLRSEALIAAEKQNMYEAEIERLKKELSGLLEAKEAAAKAFDVQKAEITNELEELQRKLKEIEANKDLVEGENSKLQSEILTAQEKYRQSEAEVKCIKQVMCSVVEAKEAATRASEAEKAEIMEEMDNLKRTIEEIKANRDLVESQNQELRSKISSAEQERSLFEGEIKSVRMELGAVEEAKQILTREFDAEKAEILKELDDLEKKLEELQTNKGLLEAENDKLQLEVLTAQHKQSMSEAEAESLKMELGALVEAKEAATKAFGAEKAKTTKELEDLKRKVEEIQTKKDLVEGEKDKLRLEILIAEQRHAMAELEVKRLKMDLAASAEARETVVRSCDAEKAKFMAEIENLRRKIEEIHASKEAAEKAARNKDAEADRLKDELARIRLSVSQLQASCDELDAKQSRLNDEKNSVQKALVSEKVEGNKLKLKIEELENHIAGKDGEKGKLKAALEEKMTEINALSKDNAMLHRTILEAQEKNKGSILSFLSPCGSK

SEQ ID NO: 20760 - protein, 513 aa, Arabidopsis thaliana
  peptide (1)..(513): Ceres Seq. ID no. 14309945
  misc_feature (1)..(503): Pfam Name: Myosin tail Pfam Description: Myosin tail
  misc_feature (1)..(483): Homolog of NCBI NO: 38345173 NR Description: OSJNBa0089E12.15 [Oryza sativa (japonica
  misc_feature (1)..(433): Homolog of NCBI NO: 38345173 NR Description: OSJNBa0089E12.15 [Oryza sativa (japonica
  misc_feature (14)..(458): Homolog of NCBI NO: 38345173 NR Description: OSJNBa0089E12.15 [Oryza sativa (japonica
  misc_feature (1)..(499): Homolog of NCBI NO: 38345638 NR Description: OSJNBb0028M18.1 [Oryza sativa (japonica
  misc_feature (1)..(404): Homolog of NCBI NO: 38345173 NR Description: OSJNBa0089E12.15 [Oryza sativa (japonica
  misc_feature (1)..(490): Homolog of NCBI NO: 32487724 NR Description: OSJNBa0022F16.25 [Oryza sativa (japonica
  misc_feature (1)..(497): Homolog of NCBI NO: 32487724 NR Description: OSJNBa0022F16.25 [Oryza sativa (japonica
  misc_feature (1)..(449): Homolog of NCBI NO: 32487724 NR Description: OSJNBa0022F16.25 [Oryza sativa (japonica
  misc_feature (1)..(432): Homolog of NCBI NO: 38345638 NR Description: OSJNBb0028M18.1 [Oryza sativa (japonica
  misc_feature (1)..(513): Homolog of NCBI NO: 38346693 NR Description: OSJNBa0080E14.9 [Oryza sativa (japonica
MRLEEMLAIKDLTESENDKLRSEALIAAEKQNMYEAEIERLKKELSGLLEAKEAAAKAFDVQKAEITNELEELQRKLKEIEANKDLVEGENSKLQSEILTAQEKYRQSEAEVKCIKQVMCSVVEAKEAATRASEAEKAEIMEEMDNLKRTIEEIKANRDLVESQNQELRSKISSAEQERSLFEGEIKSVRMELGAVEEAKQILTREFDAEKAEILKELDDLEKKLEELQTNKGLLEAENDKLQLEVLTAQHKQSMSEAEAESLKMELGALVEAKEAATKAFGAEKAKTTKELEDLKRKVEEIQTKKDLVEGEKDKLRLEILIAEQRHAMAELEVKRLKMDLAASAEARETVVRSCDAEKAKFMAEIENLRRKIEEIHASKEAAEKAARNKDAEADRLKDELARIRLSVSQLQASCDELDAKQSRLNDEKNSVQKALVSEKVEGNKLKLKIEELENHIAGKDGEKGKLKAALEEKMTEINALSKDNAMLHRTILEAQEKNKGSILSFLSPCGSK

SEQ ID NO: 20761 - DNA, 1725 bp, Arabidopsis thaliana
  misc_feature (1)..(1725): Ceres Seq. ID no. 14316553
  misc_feature: MA Experiment ID: 20000496 Result: Up-regulated in Transcription
  misc_feature: MA Experiment 20000496 PARAMETER Experiment Name: At_Guard_Cells_P Parameter: Harvest Date Value: 7/19/2002
  misc_feature: MA Experiment 20000496 PARAMETER Experiment Name: At_Guard_Cells_P Parameter: Organism Value: Canola
  misc_feature: MA Experiment 20000496 PARAMETER Experiment Name: At_Guard_Cells_P Parameter: Tissue Value: Guard Cells vs. Leaves
gaacaaaaaacaaatcaagcaaatttatttatcttggtcaagagacattgattctcttaaatttctgcaaaattaagctcagagattcacaccgcatctgaaattgtgctcagaggggttccaaatattaccagtcgttaggaagcaatcacgagttgttttaggaattagtgaacgtgataatggctagcaatgagatggaaaaatcgagtaaagagaaggaacctaaaacacctcctccttcttctactgcccctccctcttcacaggaaccttcatcggctgtgagtgctggcatggctactccagattggtctggttttcaggcatattctcctatgccgccgcctcatggttatgtggcatctagtccccaacctcacccttatatgtggggagttcagcatatgatgcctccttatggaactccgcctcatccttatgttgcaatgtatcccccaggtggcatgtacgcacatccttcaatgcctccgggttcttatccctatagcccttatgctatgccttctccaaatggaatgactgaagtttctggcaatactacaggcggcactgatggtgatgctaaacaatctgaagtgaaggaaaaattgcccatcaaaagatcaagaggaagcttaggaagtttgaacatgattacaggaaagaacaatgaacctgggaaaaactcaggagcatcagctaatggagcttactccaaaagtggggagagtgcttctgatggttcaagtgaaggaagtgatgggaactctcaaaatgattcgggatctggactagatggaaaggatgctgaagcagcatcagagaatggtggttctgccaatggtccgcaaaatggaagtgctggtacacctattctaccggtgagccagaccgtaccaatcatgccaatgacagctgcaggtgttcctggcccaccaacaaatttaaatattgggatggattactggggtgctccaacttcagctggtatccctggaatgcatgggaaagtatctacaccagttcctggagttgttgctccaggctcgcgagatggtggccattcacaaccctggttacaggacgatagagaacttaagcgacagagacggaagcagtccaatagggagtctgctcgaagatcaaggttgcgtaaacaggccgaatgtgatgagctggcccaacgcgctgaggtgttgaacgaagaaaacacaaatctcagagcagaaatcaacaagctcaaaagccaatgcgaagagcttaccaccgagaacacctctctcaaggaccaactttcattattacctccacttgaaggcataagcatggacaatgaccaccaagaaccagacaccaatcaaacaggtgccgcagagagaaaggttgattcatacaaagactcaacgtgagaagacatagagcaaaaccaattcctaacacaggtataaaaaagtagcagcagcagcaacaacaacactcggcggttctttgctaacagatggtttgtaggattttaggcatcagagatcgattggttccgaatagtttattgagggttgttggtccagtgtatgtgtgtgtaagttacgaaattagatattgggagaaaaaattccctcgtttaatgttttactttgcctttgctctacttgcagaagcgaatctgaggcaatgtgcttatctgtatcaaaattgttaccctttttattagattttcctatt

SEQ ID NO: 20762 - protein, 409 aa, Arabidopsis thaliana
  peptide (1)..(409): Ceres Seq. ID no. 14316554
  misc_feature (303)..(367): Pfam Name: bZIP transcription factor Pfam Description: bZIP transcription factor
  misc_feature (10)..(396): Homolog of NCBI NO: 7489475 NR Description: G-box binding factor 1A - rice
  misc_feature (1)..(372): Homolog of NCBI NO: 5381313 NR Description: G-Box binding protein 2 [Catharanthus roseus]
  misc_feature (1)..(399): Homolog of NCBI NO: 7488943 NR Description: bZIP DNA-binding protein - parsley
  misc_feature (1)..(399): Homolog of NCBI NO: 7488942 NR Description: bZIP DNA-binding protein - parsley
  misc_feature (1)..(376): Homolog of NCBI NO: 13775107 NR Description: bZIP transcription factor 2 [Phaseolus vulgaris]
  misc_feature (1)..(399): Homolog of NCBI NO: 13775109 NR Description: bZIP transcription factor 3 [Phaseolus vulgaris]
  misc_feature (1)..(390): Homolog of NCBI NO: 28393494 NR Description: putative G-Box binding protein [Arabidopsis
  misc_feature (1)..(390): Homolog of NCBI NO: 15222576 NR Description: G-Box binding protein -related [Arabidopsis
  misc_feature (1)..(369): Homolog of NCBI NO: 25344493 NR Description: hypothetical protein At2g35530 [imported] -
  misc_feature (1)..(409): Homolog of NCBI NO: 30686443 NR Description: G-box binding bZIP transcription factor -related
MASNEMEKSSKEKEPKTPPPSSTAPPSSQEPSSAVSAGMATPDWSGFQAYSPMPPPHGYVASSPQPHPYMWGVQHMMPPYGTPPHPYVAMYPPGGMYAHPSMPPGSYPYSPYAMPSPNGMTEVSGNTTGGTDGDAKQSEVKEKLPIKRSRGSLGSLNMITGKNNEPGKNSGASANGAYSKSGESASDGSSEGSDGNSQNDSGSGLDGKDAEAASENGGSANGPQNGSAGTPILPVSQTVPIMPMTAAGVPGPPTNLNIGMDYWGAPTSAGIPGMHGKVSTPVPGVVAPGSRDGGHSQPWLQDDRELKRQRRKQSNRESARRSRLRKQAECDELAQRAEVLNEENTNLRAEINKLKSQCEELTTENTSLKDQLSLLPPLEGISMDNDHQEPDTNQTGAAERKVDSYKDST

SEQ ID NO: 20763 - protein, 404 aa, Arabidopsis thaliana
  peptide (1)..(404): Ceres Seq. ID no. 14316555
  misc_feature (298)..(362): Pfam Name: bZIP transcription factor Pfam Description: bZIP transcription factor
  misc_feature (5)..(391): Homolog of NCBI NO: 7489475 NR Description: G-box binding factor 1A - rice
  misc_feature (1)..(367): Homolog of NCBI NO: 5381313 NR Description: G-Box binding protein 2 [Catharanthus roseus]
  misc_feature (1)..(394): Homolog of NCBI NO: 7488943 NR Description: bZIP DNA-binding protein - parsley
  misc_feature (1)..(394): Homolog of NCBI NO: 7488942 NR Description: bZIP DNA-binding protein - parsley
  misc_feature (1)..(371): Homolog of NCBI NO: 13775107 NR Description: bZIP transcription factor 2 [Phaseolus vulgaris]
  misc_feature (1)..(394): Homolog of NCBI NO: 13775109 NR Description: bZIP transcription factor 3 [Phaseolus vulgaris]
  misc_feature (1)..(385): Homolog of NCBI NO: 28393494 NR Description: putative G-Box binding protein [Arabidopsis
  misc_feature (1)..(385): Homolog of NCBI NO: 15222576 NR Description: G-Box binding protein -related [Arabidopsis
  misc_feature (1)..(364): Homolog of NCBI NO: 25344493 NR Description: hypothetical protein At2g35530 [imported] -
  misc_feature (1)..(404): Homolog of NCBI NO: 30686443 NR Description: G-box binding bZIP transcription factor -related
MEKSSKEKEPKTPPPSSTAPPSSQEPSSAVSAGMATPDWSGFQAYSPMPPPHGYVASSPQPHPYMWGVQHMMPPYGTPPHPYVAMYPPGGMYAHPSMPPGSYPYSPYAMPSPNGMTEVSGNTTGGTDGDAKQSEVKEKLPIKRSRGSLGSLNMITGKNNEPGKNSGASANGAYSKSGESASDGSSEGSDGNSQNDSGSGLDGKDAEAASENGGSANGPQNGSAGTPILPVSQTVPIMPMTAAGVPGPPTNLNIGMDYWGAPTSAGIPGMHGKVSTPVPGVVAPGSRDGGHSQPWLQDDRELKRQRRKQSNRESARRSRLRKQAECDELAQRAEVLNEENTNLRAEINKLKSQCEELTTENTSLKDQLSLLPPLEGISMDNDHQEPDTNQTGAAERKVDSYKDST

SEQ ID NO: 20764 - protein, 371 aa, Arabidopsis thaliana
  peptide (1)..(371): Ceres Seq. ID no. 14316556
  misc_feature (265)..(329): Pfam Name: bZIP transcription factor Pfam Description: bZIP transcription factor
  misc_feature (1)..(358): Homolog of NCBI NO: 7489475 NR Description: G-box binding factor 1A - rice
  misc_feature (1)..(334): Homolog of NCBI NO: 5381313 NR Description: G-Box binding protein 2 [Catharanthus roseus]
  misc_feature (1)..(361): Homolog of NCBI NO: 7488943 NR Description: bZIP DNA-binding protein - parsley
  misc_feature (1)..(361): Homolog of NCBI NO: 7488942 NR Description: bZIP DNA-binding protein - parsley
  misc_feature (1)..(338): Homolog of NCBI NO: 13775107 NR Description: bZIP transcription factor 2 [Phaseolus vulgaris]
  misc_feature (1)..(361): Homolog of NCBI NO: 13775109 NR Description: bZIP transcription factor 3 [Phaseolus vulgaris]
  misc_feature (1)..(352): Homolog of NCBI NO: 28393494 NR Description: putative G-Box binding protein [Arabidopsis
  misc_feature (1)..(352): Homolog of NCBI NO: 15222576 NR Description: G-Box binding protein -related [Arabidopsis
  misc_feature (1)..(331): Homolog of NCBI NO: 25344493 NR Description: hypothetical protein At2g35530 [imported] -
  misc_feature (1)..(371): Homolog of NCBI NO: 30686443 NR Description: G-box binding bZIP transcription factor -related
MATPDWSGFQAYSPMPPPHGYVASSPQPHPYMWGVQHMMPPYGTPPHPYVAMYPPGGMYAHPSMPPGSYPYSPYAMPSPNGMTEVSGNTTGGTDGDAKQSEVKEKLPIKRSRGSLGSLNMITGKNNEPGKNSGASANGAYSKSGESASDGSSEGSDGNSQNDSGSGLDGKDAEAASENGGSANGPQNGSAGTPILPVSQTVPIMPMTAAGVPGPPTNLNIGMDYWGAPTSAGIPGMHGKVSTPVPGVVAPGSRDGGHSQPWLQDDRELKRQRRKQSNRESARRSRLRKQAECDELAQRAEVLNEENTNLRAEINKLKSQCEELTTENTSLKDQLSLLPPLEGISMDNDHQEPDTNQTGAAERKVDSYKDST

SEQ ID NO: 20765 - DNA, 1770 bp, Arabidopsis thaliana
  misc_feature (1)..(1770): Ceres Seq. ID no. 15168908
  misc_feature: MA Experiment ID: 20000314 Result: Up-regulated in Transcription
  misc_feature: MA Experiment 20000314 PARAMETER Experiment Name: At_14day_Shoots-Roots_Sub_P Parameter: Age (day) Value: 14
  misc_feature: MA Experiment 20000314 PARAMETER Experiment Name: At_14day_Shoots-Roots_Sub_P Parameter: Organism Value: A. thaliana
  misc_feature: MA Experiment 20000314 PARAMETER Experiment Name: At_14day_Shoots-Roots_Sub_P Parameter: Plant Line Value: WS
  misc_feature: MA Experiment 20000314 PARAMETER Experiment Name: At_14day_Shoots-Roots_Sub_P Parameter: Tissue Value: Roots vs. Whole Plant
  misc_feature: MA Experiment ID: 20000440 Result: Up-regulated in Transcription
  misc_feature: MA Experiment 20000440 PARAMETER Experiment Name: At_Closed-Flower__Sub_P Parameter: Tissue Value: Closed Flower vs. Whole Plant
gatctcaacatctctcaatttttctctctacgttgaagaaactttcgaatttcccgttagttcttctccacgctttctctttccctttatctcttatctggttaagccaatcttgattgtttggattcgtaaccgatcagtgttgtgaggtttgaaagaatggtgttttttcgcagcgtatcagccatttcaagactacggtctcgagcagtgcaacaatcctcacttagtaactccgtcagatggctccactcttctgaattggacttgaagtcgcagatgcaagagatcattccagaacaacaggaccgtttgaagaaactgaaatcagaacatggaaaggttccagtggggaacatcaccgttgatatggtacttggtggaatgagagggatgactggattactctgggaaacctcattgcttgatgcagatgagggaatacggtttagaggcatgtcgattcctgaatgtcagaaagtattaccttcagctgagtctggagaagagcccttgcctgagagtcttctgtggcttctgttaactggaaaggtgccaactaaagagcaagctaatgctttgtcaacagagttggctcatcgtgcggctgtgccagattatgtatacaaagctatagatgctttgccttcaacagctcatccaatgactcaatttgctagtggtgttatggcccttcaggttcaaagtgagtttcaaaaggcgtatgagcagggtgatatttctaagtcaaagtactgggaaccaaccttcgaagatgccctaaacttgattgctcgtgttcctgttgtagcttcatacgtttatcggaggatgtacaaggatggtagcatcattccattagatgattctttggattatggtgcaaatttttcacacatgctgggatttgatagtcctcagatgaaagagctcatgaggctttatgtcactatccacagtgatcatgaaggtggaaatgttagtgctcacgctggtcacctggttgggagtgcactttcagatccatatctttcatttgctgctgcattgaatggtttagctgggccactccatggtttggctaatcaggaagttttgctgtggatcaaattagttgttgaggaatgtggagaaagtatatcaaaggaacagctaaaagattatgtctggaaaacgttaaacagtggcaaggttgttccaggatatggccatggtgttttgcgtaaaacggatccaagatatatatgccaaagagagtttgccttgaagcatctacctgatgatcctctttttcagctggtctcaaaactttatgaagtggtgcctcctattctaaccgagctgggaaaggtcaagaacccgtggcctaacgttgatgctcatagcggagtgcttctgaactactatggtctaaccgaagcaagatactacacggtgctttttggcgtctcaagaagtcttggaatctgctcgcagctgatatgggacagggcacttggactgccacttgagagaccaaagagtgtaaacatggactggctcgataacttcacgcgcttgaaccgctaagttaatccctgactgatgttggtcaaggttctctcttttatcacttcagccttctcttccatttgattgggtagcttttagagataaaaaaaaaacgatttttcgtcgaaattttgttctacagagttttcattttggttcttctgcaaaaacaataaagtcaaacaagtaaagaaacagtctttctcagattgggccccc

SEQ ID NO: 20766 - protein, 469 aa, Arabidopsis thaliana
  peptide (1)..(469): Ceres Seq. ID no. 15168909
  misc_feature (75)..(453): Pfam Name: Citrate synthase Pfam Description: Citrate synthase
  misc_feature (1)..(463): Homolog of NCBI NO: 11066954 NR Description: citrate synthase [Oryza sativa]
  misc_feature (1)..(463): Homolog of NCBI NO: 1556429 NR Description: citrate synthase [Nicotiana tabacum]
  misc_feature (1)..(462): Homolog of NCBI NO: 1352088 NR Description: Citrate synthase, mitochondrial precursor
  misc_feature (1)..(466): Homolog of NCBI NO: 15982952 NR Description: citrate synthase [Prunus persica]
  misc_feature (1)..(462): Homolog of NCBI NO: 40646744 NR Description: mitochondrial citrate synthase precursor [Citrus
  misc_feature (1)..(463): Homolog of NCBI NO: 8928010 NR Description: Citrate synthase, mitochondrial precursor
  misc_feature (1)..(462): Homolog of NCBI NO: 30689693 NR Description: citrate synthase [Arabidopsis thaliana]
  misc_feature (1)..(462): Homolog of NCBI NO: 21553775 NR Description: citrate synthase [Arabidopsis thaliana]
  misc_feature (1)..(462): Homolog of NCBI NO: 18406515 NR Description: citrate synthase [Arabidopsis thaliana]
  misc_feature (36)..(469): Homolog of NCBI NO: 15232248 NR Description: citrate synthase-related protein [Arabidopsis
MVFFRSVSAISRLRSRAVQQSSLSNSVRWLHSSELDLKSQMQEIIPEQQDRLKKLKSEHGKVPVGNITVDMVLGGMRGMTGLLWETSLLDADEGIRFRGMSIPECQKVLPSAESGEEPLPESLLWLLLTGKVPTKEQANALSTELAHRAAVPDYVYKAIDALPSTAHPMTQFASGVMALQVQSEFQKAYEQGDISKSKYWEPTFEDALNLIARVPVVASYVYRRMYKDGSIIPLDDSLDYGANFSHMLGFDSPQMKELMRLYVTIHSDHEGGNVSAHAGHLVGSALSDPYLSFAAALNGLAGPLHGLANQEVLLWIKLVVEECGESISKEQLKDYVWKTLNSGKVVPGYGHGVLRKTDPRYICQREFALKHLPDDPLFQLVSKLYEVVPPILTELGKVKNPWPNVDAHSGVLLNYYGLTEARYYTVLFGVSRSLGICSQLIWDRALGLPLERPKSVNMDWLDNFTRLNR

SEQ ID NO: 20767 - protein, 429 aa, Arabidopsis thaliana
  peptide (1)..(429): Ceres Seq. ID no. 15168910
  misc_feature (35)..(413): Pfam Name: Citrate synthase Pfam Description: Citrate synthase
  misc_feature (1)..(423): Homolog of NCBI NO: 11066954 NR Description: citrate synthase [Oryza sativa]
  misc_feature (1)..(423): Homolog of NCBI NO: 1556429 NR Description: citrate synthase [Nicotiana tabacum]
  misc_feature (1)..(422): Homolog of NCBI NO: 1352088 NR Description: Citrate synthase, mitochondrial precursor
  misc_feature (1)..(426): Homolog of NCBI NO: 15982952 NR Description: citrate synthase [Prunus persica]
  misc_feature (1)..(422): Homolog of NCBI NO: 40646744 NR Description: mitochondrial citrate synthase precursor [Citrus
  misc_feature (1)..(423): Homolog of NCBI NO: 8928010 NR Description: Citrate synthase, mitochondrial precursor
  misc_feature (1)..(422): Homolog of NCBI NO: 30689693 NR Description: citrate synthase [Arabidopsis thaliana]
  misc_feature (1)..(422): Homolog of NCBI NO: 21553775 NR Description: citrate synthase [Arabidopsis thaliana]
  misc_feature (1)..(422): Homolog of NCBI NO: 18406515 NR Description: citrate synthase [Arabidopsis thaliana]
  misc_feature (1)..(429): Homolog of NCBI NO: 15232248 NR Description: citrate synthase-related protein [Arabidopsis
MQEIIPEQQDRLKKLKSEHGKVPVGNITVDMVLGGMRGMTGLLWETSLLDADEGIRFRGMSIPECQKVLPSAESGEEPLPESLLWLLLTGKVPTKEQANALSTELAHRAAVPDYVYKAIDALPSTAHPMTQFASGVMALQVQSEFQKAYEQGDISKSKYWEPTFEDALNLIARVPVVASYVYRRMYKDGSIIPLDDSLDYGANFSHMLGFDSPQMKELMRLYVTIHSDHEGGNVSAHAGHLVGSALSDPYLSFAAALNGLAGPLHGLANQEVLLWIKLVVEECGESISKEQLKDYVWKTLNSGKVVPGYGHGVLRKTDPRYICQREFALKHLPDDPLFQLVSKLYEVVPPILTELGKVKNPWPNVDAHSGVLLNYYGLTEARYYTVLFGVSRSLGICSQLIWDRALGLPLERPKSVNMDWLDNFTRLNR

SEQ ID NO: 20768 - protein, 399 aa, Arabidopsis thaliana
  peptide (1)..(399): Ceres Seq. ID no. 15168911
  misc_feature (5)..(383): Pfam Name: Citrate synthase Pfam Description: Citrate synthase
  misc_feature (1)..(393): Homolog of NCBI NO: 11066954 NR Description: citrate synthase [Oryza sativa]
  misc_feature (1)..(393): Homolog of NCBI NO: 1556429 NR Description: citrate synthase [Nicotiana tabacum]
  misc_feature (1)..(392): Homolog of NCBI NO: 1352088 NR Description: Citrate synthase, mitochondrial precursor
  misc_feature (1)..(396): Homolog of NCBI NO: 15982952 NR Description: citrate synthase [Prunus persica]
  misc_feature (1)..(392): Homolog of NCBI NO: 40646744 NR Description: mitochondrial citrate synthase precursor [Citrus
  misc_feature (1)..(393): Homolog of NCBI NO: 8928010 NR Description: Citrate synthase, mitochondrial precursor
  misc_feature (1)..(392): Homolog of NCBI NO: 30689693 NR Description: citrate synthase [Arabidopsis thaliana]
  misc_feature (1)..(392): Homolog of NCBI NO: 21553775 NR Description: citrate synthase [Arabidopsis thaliana]
  misc_feature (1)..(392): Homolog of NCBI NO: 18406515 NR Description: citrate synthase [Arabidopsis thaliana]
  misc_feature (1)..(399): Homolog of NCBI NO: 15232248 NR Description: citrate synthase-related protein [Arabidopsis
MVLGGMRGMTGLLWETSLLDADEGIRFRGMSIPECQKVLPSAESGEEPLPESLLWLLLTGKVPTKEQANALSTELAHRAAVPDYVYKAIDALPSTAHPMTQFASGVMALQVQSEFQKAYEQGDISKSKYWEPTFEDALNLIARVPVVASYVYRRMYKDGSIIPLDDSLDYGANFSHMLGFDSPQMKELMRLYVTIHSDHEGGNVSAHAGHLVGSALSDPYLSFAAALNGLAGPLHGLANQEVLLWIKLVVEECGESISKEQLKDYVWKTLNSGKVVPGYGHGVLRKTDPRYICQREFALKHLPDDPLFQLVSKLYEVVPPILTELGKVKNPWPNVDAHSGVLLNYYGLTEARYYTVLFGVSRSLGICSQLIWDRALGLPLERPKSVNMDWLDNFTRLNR

SEQ ID NO: 20769 - DNA, 1657 bp, Arabidopsis thaliana
  misc_feature (1)..(1657): Ceres Seq. ID no. 14309919
  misc_feature: MA Experiment ID: 20000306 Result: Up-regulated in Transcription
  misc_feature: MA Experiment 20000306 PARAMETER Experiment Name: At_Germinating_Seeds_Sub_P Parameter: Age (hr) Value: 6 vs. 0
  misc_feature: MA Experiment 20000306 PARAMETER Experiment Name: At_Germinating_Seeds_Sub_P Parameter: Organism Value: A. thaliana
  misc_feature: MA Experiment 20000306 PARAMETER Experiment Name: At_Germinating_Seeds_Sub_P Parameter: Plant Line Value: WS
  misc_feature: MA Experiment 20000306 PARAMETER Experiment Name: At_Germinating_Seeds_Sub_P Parameter: Tissue Value: Germinating Seeds
  misc_feature: MA Experiment ID: 20000315 Result: Down-regulated in Transcription
  misc_feature: MA Experiment 20000315 PARAMETER Experiment Name: At_14day_Shoots-Roots_Sub_P Parameter: Age (day) Value: 14
  misc_feature: MA Experiment 20000315 PARAMETER Experiment Name: At_14day_Shoots-Roots_Sub_P Parameter: Organism Value: A. thaliana
  misc_feature: MA Experiment 20000315 PARAMETER Experiment Name: At_14day_Shoots-Roots_Sub_P Parameter: Plant Line Value: WS
  misc_feature: MA Experiment 20000315 PARAMETER Experiment Name: At_14day_Shoots-Roots_Sub_P Parameter: Tissue Value: Shoots vs. Whole Plant
  misc_feature: MA Experiment ID: 20000355 Result: Up-regulated in Transcription
  misc_feature: MA Experiment 20000355 PARAMETER Experiment Name: At_Siliques_Sub_P Parameter: Age (day) Value: 21
  misc_feature: MA Experiment 20000355 PARAMETER Experiment Name: At_Siliques_Sub_P Parameter: Organism Value: A. thaliana
  misc_feature: MA Experiment 20000355 PARAMETER Experiment Name: At_Siliques_Sub_P Parameter: Plant Line Value: WS
  misc_feature: MA Experiment 20000355 PARAMETER Experiment Name: At_Siliques_Sub_P Parameter: Tissue Value: Less Than 5mm Siliques vs. Whole Plant
  misc_feature: MA Experiment ID: 20000440 Result: Up-regulated in Transcription
  misc_feature: MA Experiment 20000440 PARAMETER Experiment Name: At_Closed-Flower__Sub_P Parameter: Tissue Value: Closed Flower vs. Whole Plant
  misc_feature: MA Experiment ID: 20001807 Result: Down-regulated in Transcription
  misc_feature: MA Experiment 20001807 PARAMETER Experiment Name: At_50mM_NH4NO3_L-to-H_Sub_P Parameter: Timepoint (hr) Value: 6
  misc_feature: MA Experiment 20001807 PARAMETER Experiment Name: At_50mM_NH4NO3_L-to-H_Sub_P Parameter: Tissue Value: Leaf
  misc_feature: MA Experiment 20001807 PARAMETER Experiment Name: At_50mM_NH4NO3_L-to-H_Sub_P Parameter: Treatment Value: 50mM NH4NO3 vs 100mM Mannitol
gagaagagcatttagaaaacaaaagcggaataagaaacaagattgaagaaagaagtcggagaagacagtagaagaaactgatacgaggagaacttactctcaactttaatggcagacgctggagataatcagagaagaagcgatgaaaaagagtcgatatcaactgaagaaacgaaggagaatgaagacttgggatctggaagaaacgacacaggtcatcatgtatacaacgagggacacgaagaggtactagagtatctgaaacaagagagactgaaagatgctgatatgcagaggaaaaggcatgaaacagagtcgaaatccattgagggcacaactcctgatattaggctgagtgattcagggaaagggtctgatgagagaactgataaaatacagaaagcagactcagtttacaaacgctctaacgctgacacgcgagtgagtctaccacaacagagacgactgaaagatgtggtggaggcgcatagggtacgccgtgaaacagagtcaagattatggcaccaagagagggtaaaacaactaacttcttacacagtatcttttgtttgatttacgtgttcctttgattttgattctcaggatagatctctggtttggggaggaagtgaacccaggatgagatttgatgaaagtactcagggttggagagatagtgactatgaatccaaatggaggtttcatgagagaactccggattgggattggagagatagtgaatccagaatgagatctcatgaaagaactcaggataggagagaaagtgaatcccaaggggtatttgatgagagaacagagaggagacaagaaccagtgcgatggcccggtgaagagtgttggtgtctgcggtgtcgaaacggaggaagttgccgttacaatcatcctactcaacttccacaggagcttccggtgaggaatcgtttgcagatttgcaggtattttctgaggggatattgtaagttcggctcagtttgtggatttcaacacataagggacagggatgttgcagaacctatgtatgagaattggagttttgatgtgagaactccaattctcattagaggttctatcctctgcttttcaagttctctgcggcaacagagattacaggggatgcgagagaatcagaacgtggattctcgaatgcatgatccaagacgccatgatacagagttgagactcgaacgagagaagatggtaaacagagaacttgaaaagcagaggatagaacctctaatcggtccactagtgaggcgatacatgcaagcaaagagagataaagaagttgaacagagagagagagctagcattgagagccagaggatagtggctcaagagaatctgcgacaacagagattgcaggggatgcgagagaatcagaacgtggatgctcatgatcaagagaaaactcaggaactcggtttcaaaggaaaagagggagatggagtttaagaggaaacggagttacgagaccaccaaagagaactctcaagatgatttcttttaccgcaagaaactgatgtgtttttcctttgaacgcaaataataagttcattttgataaactgatcgtttcggaatcaattgtgttattgattgattaaacgaatgatgaaacttttaatgcaaaatattcg

SEQ ID NO: 20770 - protein, 277 aa, Arabidopsis thaliana
  peptide (1)..(277): Ceres Seq. ID no. 14309920
  misc_feature (24)..(136): Homolog of NCBI NO: 18390466 NR Description: zinc finger protein 2 -related [Arabidopsis
  misc_feature (4)..(203): Homolog of NCBI NO: 15220490 NR Description: zinc finger protein -related [Arabidopsis
  misc_feature (32)..(277): Homolog of NCBI NO: 15220486 NR Description: zinc finger protein -related [Arabidopsis
  misc_feature (157)..(181): Homolog of NCBI NO: 15220484 NR Description: hypothetical protein [Arabidopsis thaliana]
  misc_feature (173)..(263): Homolog of NCBI NO: 15220484 NR Description: hypothetical protein [Arabidopsis thaliana]
  misc_feature (1)..(60): Homolog of NCBI NO: 15220484 NR Description: hypothetical protein [Arabidopsis thaliana]
  misc_feature (158)..(277): Homolog of NCBI NO: 15220484 NR Description: hypothetical protein [Arabidopsis thaliana]
MRFDESTQGWRDSDYESKWRFHERTPDWDWRDSESRMRSHERTQDRRESESQGVFDERTERRQEPVRWPGEECWCLRCRNGGSCRYNHPTQLPQELPVRNRLQICRYFLRGYCKFGSVCGFQHIRDRDVAEPMYENWSFDVRTPILIRGSILCFSSSLRQQRLQGMRENQNVDSRMHDPRRHDTELRLEREKMVNRELEKQRIEPLIGPLVRRYMQAKRDKEVEQRERASIESQRIVAQENLRQQRLQGMRENQNVDAHDQEKTQELGFKGKEGDGV

SEQ ID NO: 20771 - protein, 241 aa, Arabidopsis thaliana
  peptide (1)..(241): Ceres Seq. ID no. 14309921
  misc_feature (1)..(100): Homolog of NCBI NO: 18390466 NR Description: zinc finger protein 2 -related [Arabidopsis
  misc_feature (1)..(167): Homolog of NCBI NO: 15220490 NR Description: zinc finger protein -related [Arabidopsis
  misc_feature (1)..(241): Homolog of NCBI NO: 15220486 NR Description: zinc finger protein -related [Arabidopsis
  misc_feature (121)..(145): Homolog of NCBI NO: 15220484 NR Description: hypothetical protein [Arabidopsis thaliana]
  misc_feature (137)..(227): Homolog of NCBI NO: 15220484 NR Description: hypothetical protein [Arabidopsis thaliana]
  misc_feature (1)..(24): Homolog of NCBI NO: 15220484 NR Description: hypothetical protein [Arabidopsis thaliana]
  misc_feature (122)..(241): Homolog of NCBI NO: 15220484 NR Description: hypothetical protein [Arabidopsis thaliana]
MRSHERTQDRRESESQGVFDERTERRQEPVRWPGEECWCLRCRNGGSCRYNHPTQLPQELPVRNRLQICRYFLRGYCKFGSVCGFQHIRDRDVAEPMYENWSFDVRTPILIRGSILCFSSSLRQQRLQGMRENQNVDSRMHDPRRHDTELRLEREKMVNRELEKQRIEPLIGPLVRRYMQAKRDKEVEQRERASIESQRIVAQENLRQQRLQGMRENQNVDAHDQEKTQELGFKGKEGDGV

SEQ ID NO: 20772 - protein, 154 aa, Arabidopsis thaliana
  peptide (1)..(154): Ceres Seq. ID no. 14309922
  misc_feature (1)..(130): Homolog of NCBI NO: 15220484 NR Description: hypothetical protein [Arabidopsis thaliana]
MADAGDNQRRSDEKESISTEETKENEDLGSGRNDTGHHVYNEGHEEVLEYLKQERLKDADMQRKRHETESKSIEGTTPDIRLSDSGKGSDERTDKIQKADSVYKRSNADTRVSLPQQRRLKDVVEAHRVRRETESRLWHQERVKQLTSYTVSFV

SEQ ID NO: 20773 - DNA, 1817 bp, Arabidopsis thaliana
  misc_feature (1)..(1817): Ceres Seq. ID no. 15175515
gacaataatcgaggacctccatagattctattctccgacaccggcgaagccctcccctgccgacgtcgggacataagtcaccatatcttccctcgttctcgatctcgtgttcgtgctatctttttagatgaactttttttttaatctctttaaagcttttcgatctttctcgatccacatgtatctcccaagcagatggccagcgatgtccatctatcacgccctactcgaatcttcttccctgacatcataccctttgcccctcttgaccctgatttccctcactggagaaaccaaactcccatggtcttctacatgtgccttgaatcccgaatcaacccctcagtcaccgccttttcgttcaccggagatgcttgagccaccgcgaaacccatcaacatctaggccttgtcattcagatttcggatcggattcggtttggattatttcggatttggataattcggatgagaaagtttattatcagttcggattatatgactattcggttcggttttggtttggattgtgtcggattcggatcggtttcggataagtttttgagaattttttaataaaaagcgttgggttttattaaaatttgttttttttttgcaaaatattgtataattataacaaatataactaaaaaaaattcagatatcaagattattttggataatttttgctatttagtatttttgagtataaattataactaaatataactaatatttttatatatataattttattttggattagcggatattcgttcggtttttggtttggataggattcggttcggataattcgggtaggagaattcattatccgttcgaattttgtgactattcagttcggtttcgaagtcaaatttttcagatcgatttttggattttgaattttatgcccagccctaagcatctcagtacggccgtcgctctcagatccgtaatttgccaacctaagtgaaattaggttctcacttggtgggtttacaaatttcggtccaataagatgtctagagcctaacttcattagttgtgacccaaagcatattcagcaaatattcaggtctgatctaaactcatcttttcccaatcttaatcaatctttgtgttgcttcgtgataccgattgagaaaggatataaattaagacataagccgccatcgttaatagttaggtataaggattttttgagaaccatgccatcagttacaactaggaatatgattcacgaaatcattgcgtttgaaaccaaaagattgtaggaactcggcattatgataatgtctctactgagcagtgattaccgaagcttccctaaccatttttattcggtgtccttgaaccaacacttacgaatggtggatcttccgaaatttattttttaaagtgaactttttcttaagatatttggacaagatcatggatattttgcaaattaaaagtttgaagaagaacgacattatgatccagtctccaaggagaggtggttaccgaaacttttacactttttttgtttgctaacctcctccatggagccctttttcaaaggcttttatgcgttattcatgcaagccgtctatgaccactcgttggtcgaggatttcgtaaagttcgtcttcatggtcgaatctccaagagttcaacagatttttcaaactttgcaaactttttattggtgaacatattcttgaaaaactcataaagcttctatctttatttcttttatattattttatcttcaatttgtatgaacttccctcgtttgaggttttatatatatataaaaactacgggattattttt

SEQ ID NO: 20774 - protein, 142 aa, Arabidopsis thaliana
  peptide (1)..(142): Ceres Seq. ID no. 15175516
  misc_feature (18)..(142): Homolog of NCBI NO: 7939539 NR Description: gene_id:K5K13.1~unknown protein [Arabidopsis
MNFFFNLFKAFRSFSIHMYLPSRWPAMSIYHALLESSSLTSYPLPLLTLISLTGETKLPWSSTCALNPESTPQSPPFRSPEMLEPPRNPSTSRPCHSDFGSDSVWIISDLDNSDEKVYYQFGLYDYSVRFWFGLCRIRIGFG

SEQ ID NO: 20775 - protein, 125 aa, Arabidopsis thaliana
  peptide (1)..(125): Ceres Seq. ID no. 15175517
  misc_feature (1)..(125): Homolog of NCBI NO: 7939539 NR Description: gene_id:K5K13.1~unknown protein [Arabidopsis
MYLPSRWPAMSIYHALLESSSLTSYPLPLLTLISLTGETKLPWSSTCALNPESTPQSPPFRSPEMLEPPRNPSTSRPCHSDFGSDSVWIISDLDNSDEKVYYQFGLYDYSVRFWFGLCRIRIGFG

SEQ ID NO: 20776 - protein, 116 aa, Arabidopsis thaliana
  peptide (1)..(116): Ceres Seq. ID no. 15175518
  misc_feature (1)..(116): Homolog of NCBI NO: 7939539 NR Description: gene_id:K5K13.1~unknown protein [Arabidopsis
MSIYHALLESSSLTSYPLPLLTLISLTGETKLPWSSTCALNPESTPQSPPFRSPEMLEPPRNPSTSRPCHSDFGSDSVWIISDLDNSDEKVYYQFGLYDYSVRFWFGLCRIRIGFG

SEQ ID NO: 20777 - DNA, 2831 bp, Arabidopsis thaliana
  misc_feature (1)..(2831): Ceres Seq. ID no. 15174477
  misc_feature: MA Experiment ID: 20000794 Result: Up-regulated in Transcription
  misc_feature: MA Experiment 20000794 PARAMETER Experiment Name: At_Petals_P Parameter: Age (day) Value: 23-25 days
  misc_feature: MA Experiment 20000794 PARAMETER Experiment Name: At_Petals_P Parameter: Plant Line Value: WS
  misc_feature: MA Experiment 20000794 PARAMETER Experiment Name: At_Petals_P Parameter: Tissue Value: Petals vs. Whole plant
  misc_feature: MA Experiment ID: 20001451 Result: Down-regulated in Transcription
  misc_feature: MA Experiment 20001451 PARAMETER Experiment Name: At_Far-red-induction_P Parameter: Age (day) Value: 7
  misc_feature: MA Experiment 20001451 PARAMETER Experiment Name: At_Far-red-induction_P Parameter: Light Value: Far-red vs. White
  misc_feature: MA Experiment 20001451 PARAMETER Experiment Name: At_Far-red-induction_P Parameter: Organism Value: A. thaliana
  misc_feature: MA Experiment 20001451 PARAMETER Experiment Name: At_Far-red-induction_P Parameter: Plant Line Value: Columbia
  misc_feature: MA Experiment 20001451 PARAMETER Experiment Name: At_Far-red-induction_P Parameter: Timepoint (hr) Value: 24
  misc_feature: MA Experiment 20001451 PARAMETER Experiment Name: At_Far-red-induction_P Parameter: Tissue Value: Whole Plant
gatctggttttccggcggtttctcgttatctacgagagagtgagagaggaaatacctcggggtgaactcgctgcgtagccaaagcctcttcaattttgctcttttgttcaattccgtcgcttaattatctggttttgcgtattttgaagagtcagtttgacgaatttaagctgaaatttcgttctttctctgtttatctttcagcgacgatttttctgggtttttcagttttggatcaatccataatctgtcgtgattagggttttataccttgatgaggatttactgaattagttgtattaaagatggcgagaaaagctaacaatagttttttccttgaagaatggttaaggactgtgagtggaagtagtgtctctggtgatctagtgaagcaaaattctgctccatctgctaggtcgattattcaagcatggtctgagattcgtgaatctcttcaaaaccaaaactttgattcacgttaccttcaagctttgagagctttggttagctctgagtccactatccatgttgcagatccccaagcaaagctacttatttctatactagcttttcaagatgtatctcttccgtctgagtcttacacacttgttctcagactactctatgtgtggattaggaaagcatttcgaccgtctcaagcacttgttggtgtagcggttcaggccattcgtggcgttgttgatgacaggcgtaatctccaaccagccttagtagcgcagagtgttctggtttctggtgcgtttgcgtgtgttccttctctgtcaggagacgtgaaagtcttatgcttggaattgttatgcaggcttttggaagaagagtactctttagtgggatctcaagaagaacttgttcctgtagtgcttgcaggaattgggtatgctttatcttcttcgttggatgttcattacgtcagactattggatttattgtttggcatttggttaaaagacgagggtcctcgtggcactgtcacttacggtctgatgattcttcatttgattgagtgggttgtgtcaggttatatgcggtctaattctatcaacaagatgtctctttttgctaacgaggtactagagacttctaaggaaaagtatgctgttttcgctgtcttcatggcagcagctggggtagtgagagcttccacggcaggattcagtagtggtgcacagagtttggagatttctaaactaagaaattcagctgaaaagcgaatagaatttgtagctcaaattttagtttctaatggtaatgttgttacacttccaaccacacagagagaaggtcccctgttgaagtgctttgctattgcattggctcgatgtgggtctgtttcttcctctgctcctctgcttttgtgtctcacttctgcattgttaactcaggtatttcctttaggccagatatatgaatcattttgcaatgcttttggcaaagagcctattggaccaagactcatttgggtcagggagcatctttctgatgttcttttcaaggaatcaggggccatatctggggctttctgcaatcaatattcatcagcaagtgaagagaacaagtatattgtggagaatatgatttgggatttctgtcaaaatctctacttacagcaccgtcaaattgctatgttgctttgtggtatagaagatacattgcttggagacatcgagaaaattgcagaatcatctttccttatggttgtcgtctttgcgctagctgttacgaaacaatggctaaaaccaatagtgtctaaagaaagaaaaatggagacatcagttaagatattagtttcgttctcctgtgtagagtatttcaggcatattcgtttacctgaatacatggagacaattagagaggtgattacatgtgtccaggagaatgatgctccttgtgtttcatttgtagagtccattcctgcctatgatagcttgacgaatccgaaagacttgtttacgcaaaggataaaatatgaatggtcaagagatgatgtgcagacatctcgaatattgttttatcttcgagtaatcccaacttgcatcggacggttatctgcttctgccttcaggggagtggttgcatcaaccatgtttttatatattggacatcctaacagaaaagtggcgcgagcatctcatacgttgttggcagcatttctctcttcagcaaaagaatcagaggaggacgaacgaaatcaattcaaagaacaacttgttttctattacatgcaacgatctttggaggtttaccctgagatcacaccttttgaaggtttagcttccggcgttgcaaccttggtccagcatctacctgcgggaagtcctgctatattttattctgttcatagccttgttgagaaggcttctacatttagcaccgaatcattgcaaggcagaaagtctgatcctggtaatcagattcttgagttgcttttgcgacttgtctctttggttgatatacaagtgttgccatatcttatgaagtcattggcagagctagttataaagttaccaaaagaaagacagaacgttgtgcttggtgaattgtatggtcaagtggctgagtcagacgatgtgattcgcaagccttctttggtctcttggctacagtcactgaactacttatgttctaataaccgtactgaagttttagcttctggatcaacgatagacacttcgaaccagttggctgctcgactctagggatctcctcatagtttacaaacatgtgaaatagaataaagtttgtatgacttgtatcatggaattatgttgaaaagaattataaattaacatcatctccattttttgatcagt

SEQ ID NO: 20778 - protein, 803 aa, Arabidopsis thaliana
  peptide (1)..(803): Ceres Seq. ID no. 15174478
  misc_feature (530)..(674): Homolog of NCBI NO: 15221101 NR Description: expressed protein [Arabidopsis thaliana]
MARKANNSFFLEEWLRTVSGSSVSGDLVKQNSAPSARSIIQAWSEIRESLQNQNFDSRYLQALRALVSSESTIHVADPQAKLLISILAFQDVSLPSESYTLVLRLLYVWIRKAFRPSQALVGVAVQAIRGVVDDRRNLQPALVAQSVLVSGAFACVPSLSGDVKVLCLELLCRLLEEEYSLVGSQEELVPVVLAGIGYALSSSLDVHYVRLLDLLFGIWLKDEGPRGTVTYGLMILHLIEWVVSGYMRSNSINKMSLFANEVLETSKEKYAVFAVFMAAAGVVRASTAGFSSGAQSLEISKLRNSAEKRIEFVAQILVSNGNVVTLPTTQREGPLLKCFAIALARCGSVSSSAPLLLCLTSALLTQVFPLGQIYESFCNAFGKEPIGPRLIWVREHLSDVLFKESGAISGAFCNQYSSASEENKYIVENMIWDFCQNLYLQHRQIAMLLCGIEDTLLGDIEKIAESSFLMVVVFALAVTKQWLKPIVSKERKMETSVKILVSFSCVEYFRHIRLPEYMETIREVITCVQENDAPCVSFVESIPAYDSLTNPKDLFTQRIKYEWSRDDVQTSRILFYLRVIPTCIGRLSASAFRGVVASTMFLYIGHPNRKVARASHTLLAAFLSSAKESEEDERNQFKEQLVFYYMQRSLEVYPEITPFEGLASGVATLVQHLPAGSPAIFYSVHSLVEKASTFSTESLQGRKSDPGNQILELLLRLVSLVDIQVLPYLMKSLAELVIKLPKERQNVVLGELYGQVAESDDVIRKPSLVSWLQSLNYLCSNNRTEVLASGSTIDTSNQLAARL

SEQ ID NO: 20779 - protein, 570 aa, Arabidopsis thaliana
  peptide (1)..(570): Ceres Seq. ID no. 15174479
  misc_feature (297)..(441): Homolog of NCBI NO: 15221101 NR Description: expressed protein [Arabidopsis thaliana]
MILHLIEWVVSGYMRSNSINKMSLFANEVLETSKEKYAVFAVFMAAAGVVRASTAGFSSGAQSLEISKLRNSAEKRIEFVAQILVSNGNVVTLPTTQREGPLLKCFAIALARCGSVSSSAPLLLCLTSALLTQVFPLGQIYESFCNAFGKEPIGPRLIWVREHLSDVLFKESGAISGAFCNQYSSASEENKYIVENMIWDFCQNLYLQHRQIAMLLCGIEDTLLGDIEKIAESSFLMVVVFALAVTKQWLKPIVSKERKMETSVKILVSFSCVEYFRHIRLPEYMETIREVITCVQENDAPCVSFVESIPAYDSLTNPKDLFTQRIKYEWSRDDVQTSRILFYLRVIPTCIGRLSASAFRGVVASTMFLYIGHPNRKVARASHTLLAAFLSSAKESEEDERNQFKEQLVFYYMQRSLEVYPEITPFEGLASGVATLVQHLPAGSPAIFYSVHSLVEKASTFSTESLQGRKSDPGNQILELLLRLVSLVDIQVLPYLMKSLAELVIKLPKERQNVVLGELYGQVAESDDVIRKPSLVSWLQSLNYLCSNNRTEVLASGSTIDTSNQLAARL

SEQ ID NO: 20780 - protein, 557 aa, Arabidopsis thaliana
  peptide (1)..(557): Ceres Seq. ID no. 15174480
  misc_feature (284)..(428): Homolog of NCBI NO: 15221101 NR Description: expressed protein [Arabidopsis thaliana]
MRSNSINKMSLFANEVLETSKEKYAVFAVFMAAAGVVRASTAGFSSGAQSLEISKLRNSAEKRIEFVAQILVSNGNVVTLPTTQREGPLLKCFAIALARCGSVSSSAPLLLCLTSALLTQVFPLGQIYESFCNAFGKEPIGPRLIWVREHLSDVLFKESGAISGAFCNQYSSASEENKYIVENMIWDFCQNLYLQHRQIAMLLCGIEDTLLGDIEKIAESSFLMVVVFALAVTKQWLKPIVSKERKMETSVKILVSFSCVEYFRHIRLPEYMETIREVITCVQENDAPCVSFVESIPAYDSLTNPKDLFTQRIKYEWSRDDVQTSRILFYLRVIPTCIGRLSASAFRGVVASTMFLYIGHPNRKVARASHTLLAAFLSSAKESEEDERNQFKEQLVFYYMQRSLEVYPEITPFEGLASGVATLVQHLPAGSPAIFYSVHSLVEKASTFSTESLQGRKSDPGNQILELLLRLVSLVDIQVLPYLMKSLAELVIKLPKERQNVVLGELYGQVAESDDVIRKPSLVSWLQSLNYLCSNNRTEVLASGSTIDTSNQLAARL

SEQ ID NO: 20781 - DNA, 1172 bp, Arabidopsis thaliana
  misc_feature (1)..(1172): Ceres Seq. ID no. 14310125
gggaggaagcggccattgaagcgccacgaagtctcattcttctttctccaataataacagagagcgattctttttactattccaatttcattttcaatgttaccaacacgagctcagattttcatacaccaatttttctatacgcatcgttatacacagaagcagtcgcggatctcaatttcaggtgtttgcgattccgatttaggtttgatcggttgaaattttttccgatggtggatcattagcaagttctaggcgttacgagaaacgcgacgaagaaggaggttaaagatgcgtttaggagattggcgattaagtatcatccggataagcacgctcagtctccggagcatgttcgtcataacgccaccgtgcggtttaagcttgtatcggaggcgtacgaagttttgaatgatgatctgaaacgcgcgtcttataacgctggtagcgattctgattgctttcgccgtacgagcggttcgtatagtaatccgtatggaaatcgtggtggcagagcgcaaggttctggttacggttatggttatggttactctacgaggaatcgtcaggcctctagcttcagcagcgggtttgattcgacgtttcgttatttgactacgcgagcgtttctattgaatctcgcattagctggtggtctgtactttgcgtttactgcgattgatacaagcggagaaacactatggaaaatgcgtaactcagggaaatcattcgaagaagcaatggaatcaatcgagaaatcaaagtcacataaagatgaagggtgaaagagaagaatcaaaggtacttctaaagactttgactttttaagctgcttctgtgggcctggtgggtttgtgtgggtcattgctagggacttttatagatttcactctcttagacaggagatgtgaaaatgtaagtaaatttatcaaaaatgaaccatgagaagttgaaaaccctaatttatcatgaagtgtaatagataggtttttatgttcttgtaacaaatattcatctctccagataataatcgattatgagagaagtcctagtacacgcaattgtatttgaatgcataatgggcaagcagaggtgggatgttgtaataaaacaaaaacttattttggctttgtatcagtaatggagacattattgtattagtggtcgtaacg

SEQ ID NO: 20782 - protein, 80 aa, Arabidopsis thaliana
  peptide (1)..(80): Ceres Seq. ID no. 14310126
  misc_feature (56)..(80): Homolog of NCBI NO: 19113582 NR Description: DNAJ domain protein similar to human
  misc_feature (10)..(80): Homolog of NCBI NO: 7441921 NR Description: heat shock protein dnaJ - garden pea
  misc_feature (46)..(80): Homolog of NCBI NO: 31238241 NR Description: ENSANGP00000023619 [Anopheles gambiae]
  misc_feature (51)..(80): Homolog of NCBI NO: 7487626 NR Description: probable DnaJ protein [imported] - Arabidopsis
  misc_feature (51)..(80): Homolog of NCBI NO: 30688494 NR Description: DnaJ protein family [Arabidopsis thaliana]
EEAAIEAPRSLILLSPIITESDSFYYSNFIFNVTNTSSDFHTPIFLYASLYTEAVADLNFRCLRFRFRFDRLKFFPMVDH

SEQ ID NO: 20783 - protein, 40 aa, Arabidopsis thaliana
  peptide (1)..(40): Ceres Seq. ID no. 14310127
MLPTRAQIFIHQFFYTHRYTQKQSRISISGVCDSDLGLIG

SEQ ID NO: 20784 - DNA, 713 bp, Arabidopsis thaliana
  misc_feature (1)..(713): Ceres Seq. ID no. 13592738
  misc_feature: MA Experiment ID: 20000171 Result: Up-regulated in Transcription
  misc_feature: MA Experiment 20000171 PARAMETER Experiment Name: At_42deg_Heat_P Parameter: Age (day) Value: 14
  misc_feature: MA Experiment 20000171 PARAMETER Experiment Name: At_42deg_Heat_P Parameter: Organism Value: A. thaliana
  misc_feature: MA Experiment 20000171 PARAMETER Experiment Name: At_42deg_Heat_P Parameter: Plant Line Value: WS
  misc_feature: MA Experiment 20000171 PARAMETER Experiment Name: At_42deg_Heat_P Parameter: Temperature (deg C) Value: 42 vs. 22
  misc_feature: MA Experiment 20000171 PARAMETER Experiment Name: At_42deg_Heat_P Parameter: Timepoint (hr) Value: 1
  misc_feature: MA Experiment 20000171 PARAMETER Experiment Name: At_42deg_Heat_P Parameter: Tissue Value: Aerial
  misc_feature: MA Experiment ID: 20000173 Result: Up-regulated in Transcription
  misc_feature: MA Experiment 20000173 PARAMETER Experiment Name: At_42deg_Heat_P Parameter: Age (day) Value: 14
  misc_feature: MA Experiment 20000173 PARAMETER Experiment Name: At_42deg_Heat_P Parameter: Organism Value: A. thaliana
  misc_feature: MA Experiment 20000173 PARAMETER Experiment Name: At_42deg_Heat_P Parameter: Plant Line Value: WS
  misc_feature: MA Experiment 20000173 PARAMETER Experiment Name: At_42deg_Heat_P Parameter: Temperature (deg C) Value: 42 vs. 22
  misc_feature: MA Experiment 20000173 PARAMETER Experiment Name: At_42deg_Heat_P Parameter: Timepoint (hr) Value: 6
  misc_feature: MA Experiment 20000173 PARAMETER Experiment Name: At_42deg_Heat_P Parameter: Tissue Value: Aerial
  misc_feature: MA Experiment ID: 20000214 Result: Down-regulated in Transcription
  misc_feature: MA Experiment 20000214 PARAMETER Experiment Name: At_4deg_Cold_P Parameter: Timepoint (hr) Value: 6
  misc_feature: MA Experiment ID: 20001450 Result: Up-regulated in Transcription
  misc_feature: MA Experiment 20001450 PARAMETER Experiment Name: At_Far-red-induction_P Parameter: Age (day) Value: 7
  misc_feature: MA Experiment 20001450 PARAMETER Experiment Name: At_Far-red-induction_P Parameter: Light Value: Far-red vs. White
  misc_feature: MA Experiment 20001450 PARAMETER Experiment Name: At_Far-red-induction_P Parameter: Organism Value: A. thaliana
  misc_feature: MA Experiment 20001450 PARAMETER Experiment Name: At_Far-red-induction_P Parameter: Plant Line Value: Columbia
  misc_feature: MA Experiment 20001450 PARAMETER Experiment Name: At_Far-red-induction_P Parameter: Timepoint (hr) Value: 8
  misc_feature: MA Experiment 20001450 PARAMETER Experiment Name: At_Far-red-induction_P Parameter: Tissue Value: Whole Plant
gaacatcctaatcgaaaagcttcttcgacgacgttggttcttcttcctttgtcctgcgccgcgatctctccttctccaacttcccccgtcctgtccaaagaaaatgccaaaggttaaaactaaccgagtcaagtacccagaaggatgggagttgatcgagcctactcttcgagagcttgatgccaagatgagagaagctgagacagattcacacgatggtaagagaaagtgtgaaactttatggccaatcttcaaagtctctcatcagaggagtcggtatgtatatgacctttattaccgaagggaagaaatatctaaagagctctatgagttctgcttggaccagggctatgcagatcgcagtctgattgccaaatggaaaaagtcgggatatgaacgtttatgctgcttgcgctgcatacagccaagagaccacaactatggaacaacatgtgtatgccgtgttcccaaacacttgcgtgaagagaaagtggtcgaatgcgttcactgcggctgtcaaggatgcgcgagtggcgattaaattcaacatagctttattcgcaatctctgactgtttgttacaatcttgtcacttgttaaatctggattatgtattattccataaaggctttaaaaccctgactaaaaatccccttgctcttacttatcaactctgggtggtattgcaaataaaaagaacgttccggtttggt

SEQ ID NO: 20785 - protein, 179 aa, Arabidopsis thaliana
  peptide (1)..(179): Ceres Seq. ID no. 13592739
  misc_feature (35)..(177): Pfam Name: G10 protein Pfam Description: G10 protein
  misc_feature (102)..(176): Homolog of NCBI NO: 34784956 NR Description: Unknown (protein for MGC:67182) [Mus musculus]
  misc_feature (35)..(176): Homolog of NCBI NO: 17737310 NR Description: lethal (1) 10Bb CG1639-PA [Drosophila
  misc_feature (35)..(176): Homolog of NCBI NO: 32171175 NR Description: maternal G10 transcript [Homo sapiens]
  misc_feature (35)..(176): Homolog of NCBI NO: 120625 NR Description: G10 PROTEIN
  misc_feature (36)..(176): Homolog of NCBI NO: 15128111 NR Description: G10-like protein [Branchiostoma belcheri]
  misc_feature (35)..(176): Homolog of NCBI NO: 15029378 NR Description: G10 protein [Branchiostoma belcheri]
  misc_feature (35)..(178): Homolog of NCBI NO: 544359 NR Description: G10 PROTEIN HOMOLOG
  misc_feature (35)..(178): Homolog of NCBI NO: 5852181 NR Description: zhb0011.1 [Oryza sativa (indica cultivar-group)]
  misc_feature (35)..(179): Homolog of NCBI NO: 34908438 NR Description: putative G10 protein [Oryza sativa (japonica
  misc_feature (35)..(179): Homolog of NCBI NO: 15233517 NR Description: G10 - like protein [Arabidopsis thaliana]
NILIEKLLRRRWFFFLCPAPRSLLLQLPPSCPKKMPKVKTNRVKYPEGWELIEPTLRELDAKMREAETDSHDGKRKCETLWPIFKVSHQRSRYVYDLYYRREEISKELYEFCLDQGYADRSLIAKWKKSGYERLCCLRCIQPRDHNYGTTCVCRVPKHLREEKVVECVHCGCQGCASGD

SEQ ID NO: 20786 - protein, 145 aa, Arabidopsis thaliana; identical to SEQ ID NO: 20704
  peptide (1)..(145): Ceres Seq. ID no. 13592740
  misc_feature (1)..(143): Pfam Name: G10 protein Pfam Description: G10 protein
  misc_feature (68)..(142): Homolog of NCBI NO: 34784956 NR Description: Unknown (protein for MGC:67182) [Mus musculus]
  misc_feature (1)..(142): Homolog of NCBI NO: 17737310 NR Description: lethal (1) 10Bb CG1639-PA [Drosophila
  misc_feature (1)..(142): Homolog of NCBI NO: 32171175 NR Description: maternal G10 transcript [Homo sapiens]
  misc_feature (1)..(142): Homolog of NCBI NO: 120625 NR Description: G10 PROTEIN
  misc_feature (2)..(142): Homolog of NCBI NO: 15128111 NR Description: G10-like protein [Branchiostoma belcheri]
  misc_feature (1)..(142): Homolog of NCBI NO: 15029378 NR Description: G10 protein [Branchiostoma belcheri]
  misc_feature (1)..(144): Homolog of NCBI NO: 544359 NR Description: G10 PROTEIN HOMOLOG
  misc_feature (1)..(144): Homolog of NCBI NO: 5852181 NR Description: zhb0011.1 [Oryza sativa (indica cultivar-group)]
  misc_feature (1)..(145): Homolog of NCBI NO: 34908438 NR Description: putative G10 protein [Oryza sativa (japonica
  misc_feature (1)..(145): Homolog of NCBI NO: 15233517 NR Description: G10 - like protein [Arabidopsis thaliana]

SEQ ID NO: 20787 - protein, 117 aa, Arabidopsis thaliana; identical to SEQ ID NO: 20705
  peptide (1)..(117): Ceres Seq. ID no. 13592741
  misc_feature (1)..(115): Pfam Name: G10 protein Pfam Description: G10 protein
  misc_feature (40)..(114): Homolog of NCBI NO: 34784956 NR Description: Unknown (protein for MGC:67182) [Mus musculus]
  misc_feature (1)..(114): Homolog of NCBI NO: 17737310 NR Description: lethal (1) 10Bb CG1639-PA [Drosophila
  misc_feature (1)..(114): Homolog of NCBI NO: 32171175 NR Description: maternal G10 transcript [Homo sapiens]
  misc_feature (1)..(114): Homolog of NCBI NO: 120625 NR Description: G10 PROTEIN
  misc_feature (1)..(114): Homolog of NCBI NO: 15128111 NR Description: G10-like protein [Branchiostoma belcheri]
  misc_feature (1)..(114): Homolog of NCBI NO: 15029378 NR Description: G10 protein [Branchiostoma belcheri]
  misc_feature (1)..(116): Homolog of NCBI NO: 544359 NR Description: G10 PROTEIN HOMOLOG
  misc_feature (1)..(116): Homolog of NCBI NO: 5852181 NR Description: zhb0011.1 [Oryza sativa (indica cultivar-group)]
  misc_feature (1)..(117): Homolog of NCBI NO: 34908438 NR Description: putative G10 protein [Oryza sativa (japonica
  misc_feature (1)..(117): Homolog of NCBI NO: 15233517 NR Description: G10 - like protein [Arabidopsis thaliana]

SEQ ID NO: 20788 - DNA, 740 bp, Arabidopsis thaliana
  misc_feature (1)..(740): Ceres Seq. ID no. 13496800
  misc_feature: MA Experiment ID: 108434 Result: Down-regulated in Transcription
  misc_feature: MA Experiment 108434 PARAMETER Experiment Name: At_Root_Tips_cDNA_P Parameter: Tissue Value: Root Tips
  misc_feature: MA Experiment ID: 108464 Result: Up-regulated in Transcription
  misc_feature: MA Experiment 108464 PARAMETER Experiment Name: At_Germinating_Seeds_cDNA_P Parameter: Age (day) Value: 4 vs. 0
  misc_feature: MA Experiment 108464 PARAMETER Experiment Name: At_Germinating_Seeds_cDNA_P Parameter: Tissue Value: Germinating Seeds
  misc_feature: MA Experiment ID: 108573 Result: Down-regulated in Transcription
  misc_feature: MA Experiment 108573 PARAMETER Experiment Name: At_Drought_cDNA_P Parameter: Timepoint (hr) Value: 6
  misc_feature: MA Experiment 108573 PARAMETER Experiment Name: At_Drought_cDNA_P Parameter: Tissue Value: Aerial
  misc_feature: MA Experiment 108573 PARAMETER Experiment Name: At_Drought_cDNA_P Parameter: Treatment Value: Drought vs. No Drought
  misc_feature: MA Experiment ID: 20000179 Result: Down-regulated in Transcription
  misc_feature: MA Experiment 20000179 PARAMETER Experiment Name: At_Germinating_Seeds_P Parameter: Age (hr) Value: 6 vs. 0
  misc_feature: MA Experiment 20000179 PARAMETER Experiment Name: At_Germinating_Seeds_P Parameter: Tissue Value: Germinating Seeds
  misc_feature: MA Experiment ID: 20000185 Result: Up-regulated in Transcription
  misc_feature: MA Experiment 20000185 PARAMETER Experiment Name: At_Roots__P Parameter: Age (day) Value: 7 vs. 21
  misc_feature: MA Experiment 20000185 PARAMETER Experiment Name: At_Roots__P Parameter: Organism Value: A. thaliana
  misc_feature: MA Experiment 20000185 PARAMETER Experiment Name: At_Roots__P Parameter: Tissue Value: Roots vs. Whole Plant
  misc_feature: MA Experiment ID: 20000227 Result: Down-regulated in Transcription
  misc_feature: MA Experiment 20000227 PARAMETER Experiment Name: At_Root-Tips-vs-Tops_P Parameter: Tissue Value: Root Tips vs. Root Tops
  misc_feature: MA Experiment ID: 20000234 Result: Down-regulated in Transcription
  misc_feature: MA Experiment 20000234 PARAMETER Experiment Name: At_Siliques_P Parameter: Age (day) Value: 21
  misc_feature: MA Experiment 20000234 PARAMETER Experiment Name: At_Siliques_P Parameter: Organism Value: A. thaliana
  misc_feature: MA Experiment 20000234 PARAMETER Experiment Name: At_Siliques_P Parameter: Plant Line Value: WS
  misc_feature: MA Experiment 20000234 PARAMETER Experiment Name: At_Siliques_P Parameter: Tissue Value: Less Than 5mm Siliques vs. Whole Plant
  misc_feature: MA Experiment ID: 20000286 Result: Down-regulated in Transcription
  misc_feature: MA Experiment 20000286 PARAMETER Experiment Name: At_Open_Flower_P Parameter: Age (day) Value: 21
  misc_feature: MA Experiment 20000286 PARAMETER Experiment Name: At_Open_Flower_P Parameter: Plant Line Value: WS
  misc_feature: MA Experiment 20000286 PARAMETER Experiment Name: At_Open_Flower_P Parameter: Tissue Value: Half Open vs. Whole Plant
  misc_feature: MA Experiment ID: 20000439 Result: Up-regulated in Transcription
  misc_feature: MA Experiment 20000439 PARAMETER Experiment Name: At_Roots__P Parameter: Age (day) Value: 14 vs. 21
  misc_feature: MA Experiment 20000439 PARAMETER Experiment Name: At_Roots__P Parameter: Organism Value: A. thaliana
  misc_feature: MA Experiment 20000439 PARAMETER Experiment Name: At_Roots__P Parameter: Tissue Value: Roots vs. Whole Plant
  misc_feature: MA Experiment ID: 20000456 Result: Up-regulated in Transcription
  misc_feature: MA Experiment 20000456 PARAMETER Experiment Name: At_100uM_BA_P Parameter: Age (day) Value: 14
  misc_feature: MA Experiment 20000456 PARAMETER Experiment Name: At_100uM_BA_P Parameter: Organism Value: A. thaliana
  misc_feature: MA Experiment 20000456 PARAMETER Experiment Name: At_100uM_BA_P Parameter: Plant Line Value: WS
  misc_feature: MA Experiment 20000456 PARAMETER Experiment Name: At_100uM_BA_P Parameter: Timepoint (hr) Value: 6
  misc_feature: MA Experiment 20000456 PARAMETER Experiment Name: At_100uM_BA_P Parameter: Tissue Value: Aerial
  misc_feature: MA Experiment 20000456 PARAMETER Experiment Name: At_100uM_BA_P Parameter: Treatment Value: 100uM BA vs. No Treatment
  misc_feature: MA Experiment ID: 20001557 Result: Down-regulated in Transcription
  misc_feature: MA Experiment 20001557 PARAMETER Experiment Name: At_Drought_Soil_Dry_P Parameter: Age (day) Value: 27
  misc_feature: MA Experiment 20001557 PARAMETER Experiment Name: At_Drought_Soil_Dry_P Parameter: Organism Value: A. thaliana
  misc_feature: MA Experiment 20001557 PARAMETER Experiment Name: At_Drought_Soil_Dry_P Parameter: Plant Line Value: WS
  misc_feature: MA Experiment 20001557 PARAMETER Experiment Name: At_Drought_Soil_Dry_P Parameter: Post Timepoint (hr) Value: 3
  misc_feature: MA Experiment 20001557 PARAMETER Experiment Name: At_Drought_Soil_Dry_P Parameter: Post-Treatment Value: Re-Water vs. No Drought
  misc_feature: MA Experiment 20001557 PARAMETER Experiment Name: At_Drought_Soil_Dry_P Parameter: Timepoint (day) Value: 13
  misc_feature: MA Experiment 20001557 PARAMETER Experiment Name: At_Drought_Soil_Dry_P Parameter: Treatment Value: Drought vs. No Drought
  misc_feature: MA Experiment ID: 20001558 Result: Down-regulated in Transcription
  misc_feature: MA Experiment 20001558 PARAMETER Experiment Name: At_Drought_Soil_Dry_P Parameter: Age (day) Value: 27
  misc_feature: MA Experiment 20001558 PARAMETER Experiment Name: At_Drought_Soil_Dry_P Parameter: Organism Value: A. thaliana
  misc_feature: MA Experiment 20001558 PARAMETER Experiment Name: At_Drought_Soil_Dry_P Parameter: Plant Line Value: WS
  misc_feature: MA Experiment 20001558 PARAMETER Experiment Name: At_Drought_Soil_Dry_P Parameter: Post Timepoint (hr) Value: 6
  misc_feature: MA Experiment 20001558 PARAMETER Experiment Name: At_Drought_Soil_Dry_P Parameter: Post-Treatment Value: Re-Water vs. No Drought
  misc_feature: MA Experiment 20001558 PARAMETER Experiment Name: At_Drought_Soil_Dry_P Parameter: Timepoint (day) Value: 13
  misc_feature: MA Experiment 20001558 PARAMETER Experiment Name: At_Drought_Soil_Dry_P Parameter: Treatment Value: Drought vs. No Drought
  misc_feature: MA Experiment ID: 20001560 Result: Down-regulated in Transcription
  misc_feature: MA Experiment 20001560 PARAMETER Experiment Name: At_Drought_Soil_Dry_P Parameter: Age (day) Value: 28
  misc_feature: MA Experiment 20001560 PARAMETER Experiment Name: At_Drought_Soil_Dry_P Parameter: Organism Value: A. thaliana
  misc_feature: MA Experiment 20001560 PARAMETER Experiment Name: At_Drought_Soil_Dry_P Parameter: Plant Line Value: WS
  misc_feature: MA Experiment 20001560 PARAMETER Experiment Name: At_Drought_Soil_Dry_P Parameter: Post Timepoint (hr) Value: None
  misc_feature: MA Experiment 20001560 PARAMETER Experiment Name: At_Drought_Soil_Dry_P Parameter: Post-Treatment Value: None
  misc_feature: MA Experiment 20001560 PARAMETER Experiment Name: At_Drought_Soil_Dry_P Parameter: Timepoint (day) Value: 14
  misc_feature: MA Experiment 20001560 PARAMETER Experiment Name: At_Drought_Soil_Dry_P Parameter: Treatment Value: Drought vs. No Drought
  misc_feature: MA Experiment ID: 20001905 Result: Down-regulated in Transcription
  misc_feature: MA Experiment 20001905 PARAMETER Experiment Name: At_Drought_Reproduction_P Parameter: Age (day) Value: 40
  misc_feature: MA Experiment 20001905 PARAMETER Experiment Name: At_Drought_Reproduction_P Parameter: Organism Value: A. thaliana
  misc_feature: MA Experiment 20001905 PARAMETER Experiment Name: At_Drought_Reproduction_P Parameter: Plant Line Value: WS
  misc_feature: MA Experiment 20001905 PARAMETER Experiment Name: At_Drought_Reproduction_P Parameter: Timepoint (day) Value: 10
  misc_feature: MA Experiment 20001905 PARAMETER Experiment Name: At_Drought_Reproduction_P Parameter: Tissue Value: Rosettes
  misc_feature: MA Experiment 20001905 PARAMETER Experiment Name: At_Drought_Reproduction_P Parameter: Treatment Value: Drought vs. No Drought
aaaatctgaacccttcgattttcgattcttcctcgagccttccttccttccttcttcttctccaagaggattttgattgtctcctttactctctccatgtcaagttctggtgctccttcacgcaagactctgagtaagatcgcgactaatcgtcttcagaaagagcttgtggaatggcagatgaatccacctactggtttcaaacacaaagtcactgataatctccaaagatggataattgaagttattggagctccaggaactctatatgccaacgatacttatcagcttcaagttgattttccagaacattatcctatggaatcgccacaagtgatttttcttcatccagctcctctgcatcctcacatttacagcaatgggcatatttgtctagatattttgtatgattcgtggtctccagccatgacggtgagttctatctgcattagcatcctctccatgctctcaagctcgactgaaaagcaacgaccaaccgataatgaccgatatgtgaagaattgtaagaacggaagatctccaaaggagacccgatggtggttccacgacgataaagtataaacctcgatcaaccaaaaaaaatgtaaaatagtccaaaacagtctttgaggtttgttgtctatttttaatttaattgggtttaagctgtcccaaacccatttccaaaatccgtgatgtataaaaacaacacaataaatttgactaattttgaatcttct

SEQ ID NO: 20789 - protein, 161 aa, Arabidopsis thaliana
  peptide (1)..(161): Ceres Seq. ID no. 13496801
  misc_feature (1)..(102): Homolog of NCBI NO: 25293672 NR Description: protein F27F5.13 [imported] - Arabidopsis
  misc_feature (65)..(161): Homolog of NCBI NO: 25293670 NR Description: ubiquitin-conjugating enzyme 18
  misc_feature (1)..(130): Homolog of NCBI NO: 34897008 NR Description: putative ubiquitin-conjugating enzyme E2 [Oryza
  misc_feature (1)..(161): Homolog of NCBI NO: 18419831 NR Description: ubiquitin-conjugating enzyme 17 (UBC17)
  misc_feature (1)..(161): Homolog of NCBI NO: 4090259 NR Description: ubiquitin-conjugating enzyme E2 [Pseudotsuga
  misc_feature (1)..(161): Homolog of NCBI NO: 481811 NR Description: ubiquitin-conjugating enzyme UBC2-1 - Arabidopsis
  misc_feature (1)..(161): Homolog of NCBI NO: 18401461 NR Description: ubiquitin-conjugating enzyme 15 (UBC15)
  misc_feature (1)..(161): Homolog of NCBI NO: 18422281 NR Description: ubiquitin-conjugating enzyme 18 (UBC18)
  misc_feature (1)..(161): Homolog of NCBI NO: 2801444 NR Description: ubiquitin-conjugating enzyme 16 [Arabidopsis
  misc_feature (1)..(161): Homolog of NCBI NO: 18410856 NR Description: ubiquitin-conjugating enzyme 16 (UBC16)
MSSSGAPSRKTLSKIATNRLQKELVEWQMNPPTGFKHKVTDNLQRWIIEVIGAPGTLYANDTYQLQVDFPEHYPMESPQVIFLHPAPLHPHIYSNGHICLDILYDSWSPAMTVSSICISILSMLSSSTEKQRPTDNDRYVKNCKNGRSPKETRWWFHDDKV

SEQ ID NO: 20790 - protein, 133 aa, Arabidopsis thaliana
  peptide (1)..(133): Ceres Seq. ID no. 13496802
  misc_feature (1)..(74): Homolog of NCBI NO: 25293672 NR Description: protein F27F5.13 [imported] - Arabidopsis
  misc_feature (37)..(133): Homolog of NCBI NO: 25293670 NR Description: ubiquitin-conjugating enzyme 18
  misc_feature (1)..(102): Homolog of NCBI NO: 34897008 NR Description: putative ubiquitin-conjugating enzyme E2 [Oryza
  misc_feature (1)..(133): Homolog of NCBI NO: 18419831 NR Description: ubiquitin-conjugating enzyme 17 (UBC17)
  misc_feature (1)..(133): Homolog of NCBI NO: 4090259 NR Description: ubiquitin-conjugating enzyme E2 [Pseudotsuga
  misc_feature (1)..(133): Homolog of NCBI NO: 481811 NR Description: ubiquitin-conjugating enzyme UBC2-1 - Arabidopsis
  misc_feature (1)..(133): Homolog of NCBI NO: 18401461 NR Description: ubiquitin-conjugating enzyme 15 (UBC15)
  misc_feature (1)..(133): Homolog of NCBI NO: 18422281 NR Description: ubiquitin-conjugating enzyme 18 (UBC18)
  misc_feature (1)..(133): Homolog of NCBI NO: 2801444 NR Description: ubiquitin-conjugating enzyme 16 [Arabidopsis
  misc_feature (1)..(133): Homolog of NCBI NO: 18410856 NR Description: ubiquitin-conjugating enzyme 16 (UBC16)
MNPPTGFKHKVTDNLQRWIIEVIGAPGTLYANDTYQLQVDFPEHYPMESPQVIFLHPAPLHPHIYSNGHICLDILYDSWSPAMTVSSICISILSMLSSSTEKQRPTDNDRYVKNCKNGRSPKETRWWFHDDKV

SEQ ID NO: 20791 - protein, 87 aa, Arabidopsis thaliana
  peptide (1)..(87): Ceres Seq. ID no. 13496803
  misc_feature (1)..(28): Homolog of NCBI NO: 25293672 NR Description: protein F27F5.13 [imported] - Arabidopsis
  misc_feature (1)..(87): Homolog of NCBI NO: 25293670 NR Description: ubiquitin-conjugating enzyme 18
  misc_feature (1)..(56): Homolog of NCBI NO: 34897008 NR Description: putative ubiquitin-conjugating enzyme E2 [Oryza
  misc_feature (1)..(87): Homolog of NCBI NO: 18419831 NR Description: ubiquitin-conjugating enzyme 17 (UBC17)
  misc_feature (1)..(87): Homolog of NCBI NO: 4090259 NR Description: ubiquitin-conjugating enzyme E2 [Pseudotsuga
  misc_feature (1)..(87): Homolog of NCBI NO: 481811 NR Description: ubiquitin-conjugating enzyme UBC2-1 - Arabidopsis
  misc_feature (1)..(87): Homolog of NCBI NO: 18401461 NR Description: ubiquitin-conjugating enzyme 15 (UBC15)
  misc_feature (1)..(87): Homolog of NCBI NO: 18422281 NR Description: ubiquitin-conjugating enzyme 18 (UBC18)
  misc_feature (1)..(87): Homolog of NCBI NO: 2801444 NR Description: ubiquitin-conjugating enzyme 16 [Arabidopsis
  misc_feature (1)..(87): Homolog of NCBI NO: 18410856 NR Description: ubiquitin-conjugating enzyme 16 (UBC16)
MESPQVIFLHPAPLHPHIYSNGHICLDILYDSWSPAMTVSSICISILSMLSSSTEKQRPTDNDRYVKNCKNGRSPKETRWWFHDDKV

SEQ ID NO: 20792 - DNA, 730 bp, Arabidopsis thaliana
  misc_feature (1)..(730): Ceres Seq. ID no. 13489893
  misc_feature: MA Experiment ID: 108434 Result: Down-regulated in Transcription
  misc_feature: MA Experiment 108434 PARAMETER Experiment Name: At_Root_Tips_cDNA_P Parameter: Tissue Value: Root Tips
  misc_feature: MA Experiment ID: 108463 Result: Up-regulated in Transcription
  misc_feature: MA Experiment 108463 PARAMETER Experiment Name: At_Germinating_Seeds_cDNA_P Parameter: Age (day) Value: 3 vs. 0
  misc_feature: MA Experiment 108463 PARAMETER Experiment Name: At_Germinating_Seeds_cDNA_P Parameter: Tissue Value: Germinating Seeds
  misc_feature: MA Experiment ID: 108576 Result: Up-regulated in Transcription
  misc_feature: MA Experiment 108576 PARAMETER Experiment Name: At_42deg_Heat_cDNA_P Parameter: Temperature (deg C) Value: 42 vs. 22
  misc_feature: MA Experiment 108576 PARAMETER Experiment Name: At_42deg_Heat_cDNA_P Parameter: Timepoint (hr) Value: 1
  misc_feature: MA Experiment 108576 PARAMETER Experiment Name: At_42deg_Heat_cDNA_P Parameter: Tissue Value: Aerial
  misc_feature: MA Experiment ID: 20000184 Result: Up-regulated in Transcription
  misc_feature: MA Experiment 20000184 PARAMETER Experiment Name: At_Shoots__P Parameter: Age (day) Value: 7
  misc_feature: MA Experiment 20000184 PARAMETER Experiment Name: At_Shoots__P Parameter: Tissue Value: Shoots vs. Whole Plant
  misc_feature: MA Experiment ID: 20000185 Result: Up-regulated in Transcription
  misc_feature: MA Experiment 20000185 PARAMETER Experiment Name: At_Roots__P Parameter: Age (day) Value: 7 vs. 21
  misc_feature: MA Experiment 20000185 PARAMETER Experiment Name: At_Roots__P Parameter: Organism Value: A. thaliana
  misc_feature: MA Experiment 20000185 PARAMETER Experiment Name: At_Roots__P Parameter: Tissue Value: Roots vs. Whole Plant
  misc_feature: MA Experiment ID: 20000227 Result: Down-regulated in Transcription
  misc_feature: MA Experiment 20000227 PARAMETER Experiment Name: At_Root-Tips-vs-Tops_P Parameter: Tissue Value: Root Tips vs. Root Tops
  misc_feature: MA Experiment ID: 20000438 Result: Up-regulated in Transcription
  misc_feature: MA Experiment 20000438 PARAMETER Experiment Name: At_Shoots__P Parameter: Age (day) Value: 14
  misc_feature: MA Experiment 20000438 PARAMETER Experiment Name: At_Shoots__P Parameter: Tissue Value: Shoots vs. Whole Plant
  misc_feature: MA Experiment ID: 20000439 Result: Up-regulated in Transcription
  misc_feature: MA Experiment 20000439 PARAMETER Experiment Name: At_Roots__P Parameter: Age (day) Value: 14 vs. 21
  misc_feature: MA Experiment 20000439 PARAMETER Experiment Name: At_Roots__P Parameter: Organism Value: A. thaliana
  misc_feature: MA Experiment 20000439 PARAMETER Experiment Name: At_Roots__P Parameter: Tissue Value: Roots vs. Whole Plant
  misc_feature: MA Experiment ID: 20000460 Result: Down-regulated in Transcription
  misc_feature: MA Experiment 20000460 PARAMETER Experiment Name: At_10percent_PEG_P Parameter: Age (day) Value: 12
  misc_feature: MA Experiment 20000460 PARAMETER Experiment Name: At_10percent_PEG_P Parameter: Organism Value: A. thaliana
  misc_feature: MA Experiment 20000460 PARAMETER Experiment Name: At_10percent_PEG_P Parameter: Plant Line Value: WS
  misc_feature: MA Experiment 20000460 PARAMETER Experiment Name: At_10percent_PEG_P Parameter: Timepoint (day) Value: 12
  misc_feature: MA Experiment 20000460 PARAMETER Experiment Name: At_10percent_PEG_P Parameter: Tissue Value: Whole Plant
  misc_feature: MA Experiment 20000460 PARAMETER Experiment Name: At_10percent_PEG_P Parameter: Treatment Value: 10percent PEG vs. No Treatment
  misc_feature: MA Experiment ID: 20000527 Result: Down-regulated in Transcription
  misc_feature: MA Experiment 20000527 PARAMETER Experiment Name: At_10percent_PEG_P Parameter: Age (day) Value: 20
  misc_feature: MA Experiment 20000527 PARAMETER Experiment Name: At_10percent_PEG_P Parameter: Organism Value: A. thaliana
  misc_feature: MA Experiment 20000527 PARAMETER Experiment Name: At_10percent_PEG_P Parameter: Plant Line Value: WS
  misc_feature: MA Experiment 20000527 PARAMETER Experiment Name: At_10percent_PEG_P Parameter: Timepoint (day) Value: 20
  misc_feature: MA Experiment 20000527 PARAMETER Experiment Name: At_10percent_PEG_P Parameter: Tissue Value: Whole Plant
  misc_feature: MA Experiment 20000527 PARAMETER Experiment Name: At_10percent_PEG_P Parameter: Treatment Value: 10percent PEG vs. No Treatment
  misc_feature: MA Experiment ID: 20000573 Result: Down-regulated in Transcription
  misc_feature: MA Experiment 20000573 PARAMETER Experiment Name: At_100uM_ABA_Mutants__P Parameter: Organism Value: A. thaliana
  misc_feature: MA Experiment 20000573 PARAMETER Experiment Name: At_100uM_ABA_Mutants__P Parameter: Plant Line Value: CS22 vs. Ler wt
  misc_feature: MA Experiment 20000573 PARAMETER Experiment Name: At_100uM_ABA_Mutants__P Parameter: Timepoint (hr) Value: N/A
  misc_feature: MA Experiment 20000573 PARAMETER Experiment Name: At_100uM_ABA_Mutants__P Parameter: Tissue Value: Whole Plant
  misc_feature: MA Experiment 20000573 PARAMETER Experiment Name: At_100uM_ABA_Mutants__P Parameter: Treatment Value: None
  misc_feature: MA Experiment ID: 20000576 Result: Up-regulated in Transcription
  misc_feature: MA Experiment 20000576 PARAMETER Experiment Name: At_100uM_ABA_Mutants__P Parameter: Organism Value: A. thaliana
  misc_feature: MA Experiment 20000576 PARAMETER Experiment Name: At_100uM_ABA_Mutants__P Parameter: Plant Line Value: CS23
  misc_feature: MA Experiment 20000576 PARAMETER Experiment Name: At_100uM_ABA_Mutants__P Parameter: Timepoint (hr) Value: 6
  misc_feature: MA Experiment 20000576 PARAMETER Experiment Name: At_100uM_ABA_Mutants__P Parameter: Tissue Value: Whole Plant
  misc_feature: MA Experiment 20000576 PARAMETER Experiment Name: At_100uM_ABA_Mutants__P Parameter: Treatment Value: 1uM ABA vs. No Treatment
  misc_feature: MA Experiment ID: 20001457 Result: Down-regulated in Transcription
  misc_feature: MA Experiment 20001457 PARAMETER Experiment Name: At_50mM_NH4NO3_L-to-H_P Parameter: Age (day) Value: Undefined
  misc_feature: MA Experiment 20001457 PARAMETER Experiment Name: At_50mM_NH4NO3_L-to-H_P Parameter: Organism Value: Undefined
  misc_feature: MA Experiment 20001457 PARAMETER Experiment Name: At_50mM_NH4NO3_L-to-H_P Parameter: Plant Line Value: Undefined
  misc_feature: MA Experiment 20001457 PARAMETER Experiment Name: At_50mM_NH4NO3_L-to-H_P Parameter: Timepoint (hr) Value: 0.5
  misc_feature: MA Experiment 20001457 PARAMETER Experiment Name: At_50mM_NH4NO3_L-to-H_P Parameter: Tissue Value: Siliques
  misc_feature: MA Experiment 20001457 PARAMETER Experiment Name: At_50mM_NH4NO3_L-to-H_P Parameter: Treatment Value: 50mM NH4NO3 vs. 100mM Manitol
  misc_feature: MA Experiment ID: 20001904 Result: Up-regulated in Transcription
  misc_feature: MA Experiment 20001904 PARAMETER Experiment Name: At_Drought_Reproduction_P Parameter: Age (day) Value: 37
  misc_feature: MA Experiment 20001904 PARAMETER Experiment Name: At_Drought_Reproduction_P Parameter: Organism Value: A. thaliana
  misc_feature: MA Experiment 20001904 PARAMETER Experiment Name: At_Drought_Reproduction_P Parameter: Plant Line Value: WS
  misc_feature: MA Experiment 20001904 PARAMETER Experiment Name: At_Drought_Reproduction_P Parameter: Timepoint (day) Value: 7
  misc_feature: MA Experiment 20001904 PARAMETER Experiment Name: At_Drought_Reproduction_P Parameter: Tissue Value: Rosettes
  misc_feature: MA Experiment 20001904 PARAMETER Experiment Name: At_Drought_Reproduction_P Parameter: Treatment Value: Drought vs. No Drought
agaaacaagtcttataaaaagccacattaagttcttactctgctgcattaactgatggctagattcatggcttacaatcaaaatccacaaatgttggctctatgcataacagtagcagtaatgttccttggtgtgagatcagaattgagtcaggatataaagggatgtcaggatgcgatgtctgatctctactcttgtcttccttttgtcactaacaaagctaaagcaccagactcaacatgttgcagcacactcaaggtaaaaatagacaaagggcagaccaggaaatgtctatgtactctagtcaaagacagggatgatcctggtttggggttcaaagttgatgccaaccgtgcaatgagcctcccttccgcttgtcatgtccctgcaaacatctctcaatgcccagatcttctacatctgcttccagattcaccagcctctcaaatatttaagcaattcactgaatcttcttctcagactgttggacataaagcggtctccacaagctcaagcatcaaaggaagagacaacaagcaatttggtttaatgatggctggtgctctctcaatatggtatataatgtaaaatcctctgtgatctaaagttgatgaacacaataaccaaaatcattatacgagtcatatctactagctgaagcagatgtatcatggcttattaataagaacttattgagaaactcttaagcatcatagaatgcgattagaag

SEQ ID NO: 20793 - protein, 177 aa, Arabidopsis thaliana
  peptide (1)..(177): Ceres Seq. ID no. 13489894
  misc_feature (38)..(117): Pfam Name: Protease inhibitor/seed storage/LTP family Pfam Description: Protease inhibitor/seed storage/LTP family
  misc_feature (5)..(174): Homolog of NCBI NO: 34394084 NR Description: lipid transfer protein-like
  misc_feature (13)..(177): Homolog of NCBI NO: 21555220 NR Description: unknown [Arabidopsis thaliana]
  misc_feature (15)..(117): Homolog of NCBI NO: 25553602 NR Description: OJ1656_E11.34 [Oryza sativa (japonica
  misc_feature (23)..(134): Homolog of NCBI NO: 21537387 NR Description: unknown [Arabidopsis thaliana]
  misc_feature (14)..(154): Homolog of NCBI NO: 15224862 NR Description: lipid transfer protein family [Arabidopsis
  misc_feature (10)..(154): Homolog of NCBI NO: 15224863 NR Description: lipid transfer protein - related [Arabidopsis
  misc_feature (9)..(134): Homolog of NCBI NO: 18405294 NR Description: protease inhibitor/seed storage/lipid transfer
  misc_feature (11)..(171): Homolog of NCBI NO: 25553596 NR Description: OJ1656_E11.27 [Oryza sativa (japonica
  misc_feature (17)..(117): Homolog of NCBI NO: 28269454 NR Description: putative protease inhibitor
  misc_feature (1)..(177): Homolog of NCBI NO: 15231070 NR Description: protease inhibitor/seed storage/lipid transfer
MARFMAYNQNPQMLALCITVAVMFLGVRSELSQDIKGCQDAMSDLYSCLPFVTNKAKAPDSTCCSTLKVKIDKGQTRKCLCTLVKDRDDPGLGFKVDANRAMSLPSACHVPANISQCPDLLHLLPDSPASQIFKQFTESSSQTVGHKAVSTSSSIKGRDNKQFGLMMAGALSIWYIM

SEQ ID NO: 20794 - protein, 173 aa, Arabidopsis thaliana
  peptide (1)..(173): Ceres Seq. ID no. 13489895
  misc_feature (34)..(113): Pfam Name: Protease inhibitor/seed storage/LTP family Pfam Description: Protease inhibitor/seed storage/LTP family
  misc_feature (13)..(113): Homolog of NCBI NO: 28269454 NR Description: putative protease inhibitor
  misc_feature (11)..(113): Homolog of NCBI NO: 25553602 NR Description: OJ1656_E11.34 [Oryza sativa (japonica
  misc_feature (7)..(167): Homolog of NCBI NO: 25553596 NR Description: OJ1656_E11.27 [Oryza sativa (japonica
  misc_feature (19)..(130): Homolog of NCBI NO: 21537387 NR Description: unknown [Arabidopsis thaliana]
  misc_feature (5)..(130): Homolog of NCBI NO: 18405294 NR Description: protease inhibitor/seed storage/lipid transfer
  misc_feature (10)..(150): Homolog of NCBI NO: 15224862 NR Description: lipid transfer protein family [Arabidopsis
  misc_feature (6)..(150): Homolog of NCBI NO: 15224863 NR Description: lipid transfer protein - related [Arabidopsis
  misc_feature (1)..(170): Homolog of NCBI NO: 34394084 NR Description: lipid transfer protein-like
  misc_feature (9)..(173): Homolog of NCBI NO: 21555220 NR Description: unknown [Arabidopsis thaliana]
  misc_feature (1)..(173): Homolog of NCBI NO: 15231070 NR Description: protease inhibitor/seed storage/lipid transfer
MAYNQNPQMLALCITVAVMFLGVRSELSQDIKGCQDAMSDLYSCLPFVTNKAKAPDSTCCSTLKVKIDKGQTRKCLCTLVKDRDDPGLGFKVDANRAMSLPSACHVPANISQCPDLLHLLPDSPASQIFKQFTESSSQTVGHKAVSTSSSIKGRDNKQFGLMMAGALSIWYIM

SEQ ID NO: 20795 - protein, 165 aa, Arabidopsis thaliana
  peptide (1)..(165): Ceres Seq. ID no. 13489896
  misc_feature (26)..(105): Pfam Name: Protease inhibitor/seed storage/LTP family Pfam Description: Protease inhibitor/seed storage/LTP family
  misc_feature (5)..(105): Homolog of NCBI NO: 28269454 NR Description: putative protease inhibitor
  misc_feature (3)..(105): Homolog of NCBI NO: 25553602 NR Description: OJ1656_E11.34 [Oryza sativa (japonica
  misc_feature (1)..(159): Homolog of NCBI NO: 25553596 NR Description: OJ1656_E11.27 [Oryza sativa (japonica
  misc_feature (11)..(122): Homolog of NCBI NO: 21537387 NR Description: unknown [Arabidopsis thaliana]
  misc_feature (1)..(122): Homolog of NCBI NO: 18405294 NR Description: protease inhibitor/seed storage/lipid transfer
  misc_feature (2)..(142): Homolog of NCBI NO: 15224862 NR Description: lipid transfer protein family [Arabidopsis
  misc_feature (1)..(142): Homolog of NCBI NO: 15224863 NR Description: lipid transfer protein - related [Arabidopsis
  misc_feature (1)..(162): Homolog of NCBI NO: 34394084 NR Description: lipid transfer protein-like
  misc_feature (1)..(165): Homolog of NCBI NO: 21555220 NR Description: unknown [Arabidopsis thaliana]
  misc_feature (1)..(165): Homolog of NCBI NO: 15231070 NR Description: protease inhibitor/seed storage/lipid transfer
MLALCITVAVMFLGVRSELSQDIKGCQDAMSDLYSCLPFVTNKAKAPDSTCCSTLKVKIDKGQTRKCLCTLVKDRDDPGLGFKVDANRAMSLPSACHVPANISQCPDLLHLLPDSPASQIFKQFTESSSQTVGHKAVSTSSSIKGRDNKQFGLMMAGALSIWYIM

SEQ ID NO: 20796 - DNA, 1025 bp, Arabidopsis thaliana
  misc_feature (1)..(1025): Ceres Seq. ID no. 12738513
  misc_feature: MA Experiment ID: 20000113 Result: Down-regulated in Transcription
  misc_feature: MA Experiment 20000113 PARAMETER Experiment Name: At_42deg_Heat_cDNA_P Parameter: Temperature (deg C) Value: 42 vs. 22
  misc_feature: MA Experiment 20000113 PARAMETER Experiment Name: At_42deg_Heat_cDNA_P Parameter: Timepoint (hr) Value: 8
  misc_feature: MA Experiment 20000113 PARAMETER Experiment Name: At_42deg_Heat_cDNA_P Parameter: Tissue Value: Aerial
  misc_feature: MA Experiment ID: 20000173 Result: Down-regulated in Transcription
  misc_feature: MA Experiment 20000173 PARAMETER Experiment Name: At_42deg_Heat_P Parameter: Age (day) Value: 14
  misc_feature: MA Experiment 20000173 PARAMETER Experiment Name: At_42deg_Heat_P Parameter: Organism Value: A. thaliana
  misc_feature: MA Experiment 20000173 PARAMETER Experiment Name: At_42deg_Heat_P Parameter: Plant Line Value: WS
  misc_feature: MA Experiment 20000173 PARAMETER Experiment Name: At_42deg_Heat_P Parameter: Temperature (deg C) Value: 42 vs. 22
  misc_feature: MA Experiment 20000173 PARAMETER Experiment Name: At_42deg_Heat_P Parameter: Timepoint (hr) Value: 6
  misc_feature: MA Experiment 20000173 PARAMETER Experiment Name: At_42deg_Heat_P Parameter: Tissue Value: Aerial
  misc_feature: MA Experiment ID: 20000180 Result: Up-regulated in Transcription
  misc_feature: MA Experiment 20000180 PARAMETER Experiment Name: At_Germinating_Seeds_P Parameter: Age (hr) Value: 24 vs. 0
  misc_feature: MA Experiment 20000180 PARAMETER Experiment Name: At_Germinating_Seeds_P Parameter: Tissue Value: Germinating Seeds
  misc_feature: MA Experiment ID: 20001911 Result: Down-regulated in Transcription
  misc_feature: MA Experiment 20001911 PARAMETER Experiment Name: At_Drought_Reproduction_P Parameter: Age (day) Value: 40
  misc_feature: MA Experiment 20001911 PARAMETER Experiment Name: At_Drought_Reproduction_P Parameter: Organism Value: A. thaliana
  misc_feature: MA Experiment 20001911 PARAMETER Experiment Name: At_Drought_Reproduction_P Parameter: Plant Line Value: WS
  misc_feature: MA Experiment 20001911 PARAMETER Experiment Name: At_Drought_Reproduction_P Parameter: Timepoint (day) Value: 10
  misc_feature: MA Experiment 20001911 PARAMETER Experiment Name: At_Drought_Reproduction_P Parameter: Tissue Value: Flowers
  misc_feature: MA Experiment 20001911 PARAMETER Experiment Name: At_Drought_Reproduction_P Parameter: Treatment Value: Drought vs. No Drought
aaaaaaacttctgaatctccgaaaaaagccaatcgggggaagaaaaaaattcaacggccgtctggttactgtcttgcttgcttccgacgatctatcttccccgagtagatttgaaatggctgctcctcctgctagagctcgtgctgattacgattacctcattaaacttctgctgatcggagacagcggtgttggtaagagttgccttctcttacgtttctcagatggctcgtttaccaccagtttcattacaactattgggattgattttaagatacggactattgagctcgatgggaagagaattaagctgcaaatctgggatactgccggacaggagcggttccgcacaatcacaactgcgtactaccgtggagccatggggattttgcttgtgtatgatgtgactgatgaatcatctttcaacaacatcaggaattggatccgtaacattgagcagcatgcttctgatagtgtcaacaagattctagttgggaacaaagcagatatggatgaaagcaaaagagctgtgccaaaatctaagggccaagctcttgcagatgaatatggaatgaagtttttcgagactagtgctaagactaacttaaacgttgaggaagttttcttctctattgctaaagacattaagcaaagacttgcagataccgatgcacgagctgagccgcaaacaatcaaaatcaaccaatccgaccaaggtgcgggaacatctcaagctactcagaaatcagcatgttgcggcacataaaaattgggtccacgacgcctgtcaaaggagagaatctggctagtgaaagagaaatggtatttggaaagaaaaaatgaaaaaggaaatcaatcttcttttgcttttcttctatatgagatggtgtttctacgtattcttttaagattctctctttccctaatggtatagtgtgactgtgaaggacacaattcgtattccatatttctggaatggattctctgacatcagattatgacttatgataatatcagtttatctc

SEQ ID NO: 20797 - protein, 254 aa, Arabidopsis thaliana
  peptide (1)..(254): Ceres Seq. ID no. 12738514
  misc_feature (55)..(217): Pfam Name: Ras family Pfam Description: Ras family
  misc_feature (39)..(254): Homolog of NCBI NO: 18447915 NR Description: ras-related protein RAB8-2 [Nicotiana tabacum]
  misc_feature (39)..(254): Homolog of NCBI NO: 18447921 NR Description: ras-related protein RAB8-5 [Nicotiana tabacum]
  misc_feature (39)..(254): Homolog of NCBI NO: 5669640 NR Description: ethylene-responsive small GTP-binding protein
  misc_feature (39)..(254): Homolog of NCBI NO: 18447917 NR Description: ras-related protein RAB8-3 [Nicotiana tabacum]
  misc_feature (39)..(254): Homolog of NCBI NO: 18447913 NR Description: ras-related protein RAB8-1 [Nicotiana tabacum]
  misc_feature (39)..(254): Homolog of NCBI NO: 2808638 NR Description: small GTP-binding protein [Daucus carota]
  misc_feature (39)..(254): Homolog of NCBI NO: 1362066 NR Description: GTP-binding protein GTP6 - garden pea
  misc_feature (39)..(254): Homolog of NCBI NO: 15231322 NR Description: GTP-binding protein ara-3
  misc_feature (39)..(254): Homolog of NCBI NO: 15238542 NR Description: GTP-binding protein ara-3; protein id:
  misc_feature (39)..(254): Homolog of NCBI NO: 15231847 NR Description: Ras-related GTP-binding protein, putative
KKLLNLRKKPIGGRKKFNGRLVTVLLASDDLSSPSRFEMAAPPARARADYDYLIKLLLIGDSGVGKSCLLLRFSDGSFTTSFITTIGIDFKIRTIELDGKRIKLQIWDTAGQERFRTITTAYYRGAMGILLVYDVTDESSFNNIRNWIRNIEQHASDSVNKILVGNKADMDESKRAVPKSKGQALADEYGMKFFETSAKTNLNVEEVFFSIAKDIKQRLADTDARAEPQTIKINQSDQGAGTSQATQKSACCGT

SEQ ID NO: 20798 - protein, 216 aa, Arabidopsis thaliana
  peptide (1)..(216): Ceres Seq. ID no. 12738515
  misc_feature (17)..(179): Pfam Name: Ras family Pfam Description: Ras family
  misc_feature (1)..(216): Homolog of NCBI NO: 18447915 NR Description: ras-related protein RAB8-2 [Nicotiana tabacum]
  misc_feature (1)..(216): Homolog of NCBI NO: 18447921 NR Description: ras-related protein RAB8-5 [Nicotiana tabacum]
  misc_feature (1)..(216): Homolog of NCBI NO: 5669640 NR Description: ethylene-responsive small GTP-binding protein
  misc_feature (1)..(216): Homolog of NCBI NO: 18447917 NR Description: ras-related protein RAB8-3 [Nicotiana tabacum]
  misc_feature (1)..(216): Homolog of NCBI NO: 18447913 NR Description: ras-related protein RAB8-1 [Nicotiana tabacum]
  misc_feature (1)..(216): Homolog of NCBI NO: 2808638 NR Description: small GTP-binding protein [Daucus carota]
  misc_feature (1)..(216): Homolog of NCBI NO: 1362066 NR Description: GTP-binding protein GTP6 - garden pea
  misc_feature (1)..(216): Homolog of NCBI NO: 15231322 NR Description: GTP-binding protein ara-3
  misc_feature (1)..(216): Homolog of NCBI NO: 15238542 NR Description: GTP-binding protein ara-3; protein id:
  misc_feature (1)..(216): Homolog of NCBI NO: 15231847 NR Description: Ras-related GTP-binding protein, putative
MAAPPARARADYDYLIKLLLIGDSGVGKSCLLLRFSDGSFTTSFITTIGIDFKIRTIELDGKRIKLQIWDTAGQERFRTITTAYYRGAMGILLVYDVTDESSFNNIRNWIRNIEQHASDSVNKILVGNKADMDESKRAVPKSKGQALADEYGMKFFETSAKTNLNVEEVFFSIAKDIKQRLADTDARAEPQTIKINQSDQGAGTSQATQKSACCGT

SEQ ID NO: 20799 - protein, 128 aa, Arabidopsis thaliana
  peptide (1)..(128): Ceres Seq. ID no. 12738516
  misc_feature (1)..(91): Pfam Name: Ras family Pfam Description: Ras family
  misc_feature (1)..(128): Homolog of NCBI NO: 18447915 NR Description: ras-related protein RAB8-2 [Nicotiana tabacum]
  misc_feature (1)..(128): Homolog of NCBI NO: 18447921 NR Description: ras-related protein RAB8-5 [Nicotiana tabacum]
  misc_feature (1)..(128): Homolog of NCBI NO: 5669640 NR Description: ethylene-responsive small GTP-binding protein
  misc_feature (1)..(128): Homolog of NCBI NO: 18447913 NR Description: ras-related protein RAB8-1 [Nicotiana tabacum]
  misc_feature (1)..(128): Homolog of NCBI NO: 18447917 NR Description: ras-related protein RAB8-3 [Nicotiana tabacum]
  misc_feature (1)..(128): Homolog of NCBI NO: 2808638 NR Description: small GTP-binding protein [Daucus carota]
  misc_feature (1)..(128): Homolog of NCBI NO: 1362066 NR Description: GTP-binding protein GTP6 - garden pea
  misc_feature (1)..(128): Homolog of NCBI NO: 15231322 NR Description: GTP-binding protein ara-3
  misc_feature (1)..(128): Homolog of NCBI NO: 15238542 NR Description: GTP-binding protein ara-3; protein id:
  misc_feature (1)..(128): Homolog of NCBI NO: 15231847 NR Description: Ras-related GTP-binding protein, putative
MGILLVYDVTDESSFNNIRNWIRNIEQHASDSVNKILVGNKADMDESKRAVPKSKGQALADEYGMKFFETSAKTNLNVEEVFFSIAKDIKQRLADTDARAEPQTIKINQSDQGAGTSQATQKSACCGT

SEQ ID NO: 20800 - DNA, 893 bp, Arabidopsis thaliana
  misc_feature (1)..(893): Ceres Seq. ID no. 12489296
  misc_feature: MA Experiment ID: 108434 Result: Down-regulated in Transcription
  misc_feature: MA Experiment 108434 PARAMETER Experiment Name: At_Root_Tips_cDNA_P Parameter: Tissue Value: Root Tips
  misc_feature: MA Experiment ID: 108462 Result: Up-regulated in Transcription
  misc_feature: MA Experiment 108462 PARAMETER Experiment Name: At_Germinating_Seeds_cDNA_P Parameter: Age (day) Value: 2 vs. 0
  misc_feature: MA Experiment 108462 PARAMETER Experiment Name: At_Germinating_Seeds_cDNA_P Parameter: Tissue Value: Germinating Seeds
  misc_feature: MA Experiment ID: 108463 Result: Up-regulated in Transcription
  misc_feature: MA Experiment 108463 PARAMETER Experiment Name: At_Germinating_Seeds_cDNA_P Parameter: Age (day) Value: 3 vs. 0
  misc_feature: MA Experiment 108463 PARAMETER Experiment Name: At_Germinating_Seeds_cDNA_P Parameter: Tissue Value: Germinating Seeds
  misc_feature: MA Experiment ID: 108464 Result: Up-regulated in Transcription
  misc_feature: MA Experiment 108464 PARAMETER Experiment Name: At_Germinating_Seeds_cDNA_P Parameter: Age (day) Value: 4 vs. 0
  misc_feature: MA Experiment 108464 PARAMETER Experiment Name: At_Germinating_Seeds_cDNA_P Parameter: Tissue Value: Germinating Seeds
  misc_feature: MA Experiment ID: 108501 Result: Down-regulated in Transcription
  misc_feature: MA Experiment 108501 PARAMETER Experiment Name: At_ap2_floral_buds_cDNA_P Parameter: Plant Line Value: ap2 (Ler.)
  misc_feature: MA Experiment 108501 PARAMETER Experiment Name: At_ap2_floral_buds_cDNA_P Parameter: Tissue Value: Closed Flower
  misc_feature: MA Experiment ID: 108577 Result: Down-regulated in Transcription
  misc_feature: MA Experiment 108577 PARAMETER Experiment Name: At_42deg_Heat_cDNA_P Parameter: Temperature (deg C) Value: 42 vs. 22
  misc_feature: MA Experiment 108577 PARAMETER Experiment Name: At_42deg_Heat_cDNA_P Parameter: Timepoint (hr) Value: 6
  misc_feature: MA Experiment 108577 PARAMETER Experiment Name: At_42deg_Heat_cDNA_P Parameter: Tissue Value: Aerial
  misc_feature: MA Experiment ID: 20000111 Result: Down-regulated in Transcription
  misc_feature: MA Experiment 20000111 PARAMETER Experiment Name: At_42deg_Heat_cDNA_P Parameter: Temperature (deg C) Value: 42 vs. 22
  misc_feature: MA Experiment 20000111 PARAMETER Experiment Name: At_42deg_Heat_cDNA_P Parameter: Timepoint (hr) Value: 6
  misc_feature: MA Experiment 20000111 PARAMETER Experiment Name: At_42deg_Heat_cDNA_P Parameter: Tissue Value: Aerial
  misc_feature: MA Experiment ID: 20000234 Result: Down-regulated in Transcription
  misc_feature: MA Experiment 20000234 PARAMETER Experiment Name: At_Siliques_P Parameter: Age (day) Value: 21
  misc_feature: MA Experiment 20000234 PARAMETER Experiment Name: At_Siliques_P Parameter: Organism Value: A. thaliana
  misc_feature: MA Experiment 20000234 PARAMETER Experiment Name: At_Siliques_P Parameter: Plant Line Value: WS
  misc_feature: MA Experiment 20000234 PARAMETER Experiment Name: At_Siliques_P Parameter: Tissue Value: Less Than 5mm Siliques vs. Whole Plant
  misc_feature: MA Experiment ID: 20000235 Result: Down-regulated in Transcription
  misc_feature: MA Experiment 20000235 PARAMETER Experiment Name: At_Siliques_P Parameter: Age (day) Value: 21
  misc_feature: MA Experiment 20000235 PARAMETER Experiment Name: At_Siliques_P Parameter: Organism Value: A. thaliana
  misc_feature: MA Experiment 20000235 PARAMETER Experiment Name: At_Siliques_P Parameter: Plant Line Value: WS
  misc_feature: MA Experiment 20000235 PARAMETER Experiment Name: At_Siliques_P Parameter: Tissue Value: 5-10mm Siliques vs. Whole Plant
  misc_feature: MA Experiment ID: 20001247 Result: Up-regulated in Transcription
  misc_feature: MA Experiment 20001247 PARAMETER Experiment Name: At_Far-red-induction_P Parameter: Age (day) Value: 7
  misc_feature: MA Experiment 20001247 PARAMETER Experiment Name: At_Far-red-induction_P Parameter: Light Value: Far-red vs. White
  misc_feature: MA Experiment 20001247 PARAMETER Experiment Name: At_Far-red-induction_P Parameter: Organism Value: A. thaliana
  misc_feature: MA Experiment 20001247 PARAMETER Experiment Name: At_Far-red-induction_P Parameter: Plant Line Value: Columbia
  misc_feature: MA Experiment 20001247 PARAMETER Experiment Name: At_Far-red-induction_P Parameter: Timepoint (hr) Value: 1
  misc_feature: MA Experiment 20001247 PARAMETER Experiment Name: At_Far-red-induction_P Parameter: Tissue Value: Whole Plant
  misc_feature: MA Experiment ID: 20001248 Result: Up-regulated in Transcription
  misc_feature: MA Experiment 20001248 PARAMETER Experiment Name: At_Far-red-induction_P Parameter: Age (day) Value: 7
  misc_feature: MA Experiment 20001248 PARAMETER Experiment Name: At_Far-red-induction_P Parameter: Light Value: Far-red vs. White
  misc_feature: MA Experiment 20001248 PARAMETER Experiment Name: At_Far-red-induction_P Parameter: Organism Value: A. thaliana
  misc_feature: MA Experiment 20001248 PARAMETER Experiment Name: At_Far-red-induction_P Parameter: Plant Line Value: Columbia
  misc_feature: MA Experiment 20001248 PARAMETER Experiment Name: At_Far-red-induction_P Parameter: Timepoint (hr) Value: 4
  misc_feature: MA Experiment 20001248 PARAMETER Experiment Name: At_Far-red-induction_P Parameter: Tissue Value: Whole Plant
  misc_feature: MA Experiment ID: 20001450 Result: Up-regulated in Transcription
  misc_feature: MA Experiment 20001450 PARAMETER Experiment Name: At_Far-red-induction_P Parameter: Age (day) Value: 7
  misc_feature: MA Experiment 20001450 PARAMETER Experiment Name: At_Far-red-induction_P Parameter: Light Value: Far-red vs. White
  misc_feature: MA Experiment 20001450 PARAMETER Experiment Name: At_Far-red-induction_P Parameter: Organism Value: A. thaliana
  misc_feature: MA Experiment 20001450 PARAMETER Experiment Name: At_Far-red-induction_P Parameter: Plant Line Value: Columbia
  misc_feature: MA Experiment 20001450 PARAMETER Experiment Name: At_Far-red-induction_P Parameter: Timepoint (hr) Value: 8
  misc_feature: MA Experiment 20001450 PARAMETER Experiment Name: At_Far-red-induction_P Parameter: Tissue Value: Whole Plant
  misc_feature: MA Experiment ID: 20001560 Result: Down-regulated in Transcription
  misc_feature: MA Experiment 20001560 PARAMETER Experiment Name: At_Drought_Soil_Dry_P Parameter: Age (day) Value: 28
  misc_feature: MA Experiment 20001560 PARAMETER Experiment Name: At_Drought_Soil_Dry_P Parameter: Organism Value: A. thaliana
  misc_feature: MA Experiment 20001560 PARAMETER Experiment Name: At_Drought_Soil_Dry_P Parameter: Plant Line Value: WS
  misc_feature: MA Experiment 20001560 PARAMETER Experiment Name: At_Drought_Soil_Dry_P Parameter: Post Timepoint (hr) Value: None
  misc_feature: MA Experiment 20001560 PARAMETER Experiment Name: At_Drought_Soil_Dry_P Parameter: Post-Treatment Value: None
  misc_feature: MA Experiment 20001560 PARAMETER Experiment Name: At_Drought_Soil_Dry_P Parameter: Timepoint (day) Value: 14
  misc_feature: MA Experiment 20001560 PARAMETER Experiment Name: At_Drought_Soil_Dry_P Parameter: Treatment Value: Drought vs. No Drought
agcttcgtcaccgaaccttactttatatattagtccttcttcttctcatcttctcgcaacgtaggttctggtgaatgatcctaatccgtttagcttttaaaaaaataagaagacatatttatcaacttgagcaagttgcagcagatattttcctcggccaagatctagagttttgagaatggcgatggtatcaggaagacgatctactctaaaccccgacgcacctctttttattccggcagctgtacgacaagtggaagatttctcaccggagtggtggcaattggtgacaacttcgacttggtaccctgattactggatcagtcagcagcagcaaggcgcggatggtttctatgacaacggagagaatgagaatggtggaggtcatatcgatgtagctgatcttcttccagaatcatttgattttgatgatatggaagatttctttgacactgatgctgctgagtttgatcaaggattcgatggaagaatgtattaccaagcaccttccgaatttggctttggaaagaatggtgagatggttaagaaatcaagtggaaacaggagcccgagatcgattgtggaaccagctaagtatgcggaaaagccagcgaaatggggaaaccagagggttgctgctgctccgagaaacatccaccagcctcgctgaagagatatgttgttaactagtcagagaagtcagagcagttcggtctgtgtatctttagccaccactgtacctttgtaatttttagtatttgcttccacaacaaaaatctgtaactttgtatctttatgatgttcgttctcaaacttgctatcacaaaaatgtaaaaacataaaaaaaaaaaaatgtaaactttgaagagaaatgagaactagagtttatttcc

SEQ ID NO: 20801 - protein, 163 aa, Arabidopsis thaliana
  peptide (1)..(163): Ceres Seq. ID no. 12489297
  misc_feature (2)..(58): Homolog of NCBI NO: 21592596 NR Description: unknown [Arabidopsis thaliana]
  misc_feature (2)..(82): Homolog of NCBI NO: 18414176 NR Description: Expressed protein
  misc_feature (9)..(163): Homolog of NCBI NO: 34899128 NR Description: P0496C02.30 [Oryza sativa (japonica
  misc_feature (9)..(163): Homolog of NCBI NO: 34395186 NR Description: unknown protein [Oryza sativa (japonica
  misc_feature (1)..(163): Homolog of NCBI NO: 8489786 NR Description: dehydration-induced protein ERD15 [Lycopersicon
  misc_feature (1)..(163): Homolog of NCBI NO: 21592689 NR Description: ERD15 protein [Arabidopsis thaliana]
  misc_feature (1)..(163): Homolog of NCBI NO: 15227351 NR Description: ERD15 protein
  misc_feature (2)..(58): Homolog of NCBI NO: 21592596 NR Description: unknown [Arabidopsis thaliana]
  misc_feature (2)..(82): Homolog of NCBI NO: 18414176 NR Description: Expressed protein
  misc_feature (9)..(163): Homolog of NCBI NO: 34899128 NR Description: P0496C02.30 [Oryza sativa (japonica
  misc_feature (9)..(163): Homolog of NCBI NO: 34395186 NR Description: unknown protein [Oryza sativa (japonica
  misc_feature (1)..(163): Homolog of NCBI NO: 8489786 NR Description: dehydration-induced protein ERD15 [Lycopersicon
  misc_feature (1)..(163): Homolog of NCBI NO: 21592689 NR Description: ERD15 protein [Arabidopsis thaliana]
  misc_feature (1)..(163): Homolog of NCBI NO: 15227351 NR Description: ERD15 protein
MAMVSGRRSTLNPDAPLFIPAAVRQVEDFSPEWWQLVTTSTWYPDYWISQQQQGADGFYDNGENENGGGHIDVADLLPESFDFDDMEDFFDTDAAEFDQGFDGRMYYQAPSEFGFGKNGEMVKKSSGNRSPRSIVEPAKYAEKPAKWGNQRVAAAPRNIHQPR

SEQ ID NO: 20802 - protein, 161 aa, Arabidopsis thaliana
  peptide (1)..(161): Ceres Seq. ID no. 12489298
  misc_feature (1)..(56): Homolog of NCBI NO: 21592596 NR Description: unknown [Arabidopsis thaliana]
  misc_feature (1)..(80): Homolog of NCBI NO: 18414176 NR Description: Expressed protein
  misc_feature (7)..(161): Homolog of NCBI NO: 34899128 NR Description: P0496C02.30 [Oryza sativa (japonica
  misc_feature (7)..(161): Homolog of NCBI NO: 34395186 NR Description: unknown protein [Oryza sativa (japonica
  misc_feature (1)..(161): Homolog of NCBI NO: 8489786 NR Description: dehydration-induced protein ERD15 [Lycopersicon
  misc_feature (1)..(161): Homolog of NCBI NO: 21592689 NR Description: ERD15 protein [Arabidopsis thaliana]
  misc_feature (1)..(161): Homolog of NCBI NO: 15227351 NR Description: ERD15 protein
  misc_feature (1)..(56): Homolog of NCBI NO: 21592596 NR Description: unknown [Arabidopsis thaliana]
  misc_feature (1)..(80): Homolog of NCBI NO: 18414176 NR Description: Expressed protein
  misc_feature (7)..(161): Homolog of NCBI NO: 34899128 NR Description: P0496C02.30 [Oryza sativa (japonica
  misc_feature (7)..(161): Homolog of NCBI NO: 34395186 NR Description: unknown protein [Oryza sativa (japonica
  misc_feature (1)..(161): Homolog of NCBI NO: 8489786 NR Description: dehydration-induced protein ERD15 [Lycopersicon
  misc_feature (1)..(161): Homolog of NCBI NO: 21592689 NR Description: ERD15 protein [Arabidopsis thaliana]
  misc_feature (1)..(161): Homolog of NCBI NO: 15227351 NR Description: ERD15 protein
MVSGRRSTLNPDAPLFIPAAVRQVEDFSPEWWQLVTTSTWYPDYWISQQQQGADGFYDNGENENGGGHIDVADLLPESFDFDDMEDFFDTDAAEFDQGFDGRMYYQAPSEFGFGKNGEMVKKSSGNRSPRSIVEPAKYAEKPAKWGNQRVAAAPRNIHQPR

SEQ ID NO: 20803 - protein, 85 aa, Arabidopsis thaliana
  peptide (1)..(85): Ceres Seq. ID no. 12489299
MIWKISLTLMLLSLIKDSMEECITKHLPNLALERMVRWLRNQVETGARDRLWNQLSMRKSQRNGETRGLLLLRETSTSLAEEICC

SEQ ID NO: 20804 - DNA, 1618 bp, Arabidopsis thaliana
  misc_feature (1)..(1618): Ceres Seq. ID no. 12385174
  misc_feature: MA Experiment ID: 108434 Result: Down-regulated in Transcription
  misc_feature: MA Experiment 108434 PARAMETER Experiment Name: At_Root_Tips_cDNA_P Parameter: Tissue Value: Root Tips
  misc_feature: MA Experiment ID: 108461 Result: Down-regulated in Transcription
  misc_feature: MA Experiment 108461 PARAMETER Experiment Name: At_Germinating_Seeds_cDNA_P Parameter: Age (day) Value: 1 vs. 0
  misc_feature: MA Experiment 108461 PARAMETER Experiment Name: At_Germinating_Seeds_cDNA_P Parameter: Tissue Value: Germinating Seeds
  misc_feature: MA Experiment ID: 108462 Result: Down-regulated in Transcription
  misc_feature: MA Experiment 108462 PARAMETER Experiment Name: At_Germinating_Seeds_cDNA_P Parameter: Age (day) Value: 2 vs. 0
  misc_feature: MA Experiment 108462 PARAMETER Experiment Name: At_Germinating_Seeds_cDNA_P Parameter: Tissue Value: Germinating Seeds
  misc_feature: MA Experiment ID: 108469 Result: Up-regulated in Transcription
  misc_feature: MA Experiment ID: 108572 Result: Up-regulated in Transcription
  misc_feature: MA Experiment 108572 PARAMETER Experiment Name: At_Drought_cDNA_P Parameter: Timepoint (hr) Value: 1
  misc_feature: MA Experiment 108572 PARAMETER Experiment Name: At_Drought_cDNA_P Parameter: Tissue Value: Aerial
  misc_feature: MA Experiment 108572 PARAMETER Experiment Name: At_Drought_cDNA_P Parameter: Treatment Value: Drought vs. No Drought
  misc_feature: MA Experiment ID: 108573 Result: Up-regulated in Transcription
  misc_feature: MA Experiment 108573 PARAMETER Experiment Name: At_Drought_cDNA_P Parameter: Timepoint (hr) Value: 6
  misc_feature: MA Experiment 108573 PARAMETER Experiment Name: At_Drought_cDNA_P Parameter: Tissue Value: Aerial
  misc_feature: MA Experiment 108573 PARAMETER Experiment Name: At_Drought_cDNA_P Parameter: Treatment Value: Drought vs. No Drought
  misc_feature: MA Experiment ID: 108585 Result: Up-regulated in Transcription
  misc_feature: MA Experiment 108585 PARAMETER Experiment Name: At_5mM_NaNP_cDNA_P Parameter: Timepoint (hr) Value: 6
  misc_feature: MA Experiment 108585 PARAMETER Experiment Name: At_5mM_NaNP_cDNA_P Parameter: Tissue Value: Aerial
  misc_feature: MA Experiment 108585 PARAMETER Experiment Name: At_5mM_NaNP_cDNA_P Parameter: Treatment Value: null
  misc_feature: MA Experiment ID: 108594 Result: Down-regulated in Transcription
  misc_feature: MA Experiment 108594 PARAMETER Experiment Name: At_Ler-rhl_Root_cDNA_P Parameter: Plant Line Value: null
  misc_feature: MA Experiment ID: 108607 Result: Up-regulated in Transcription
  misc_feature: MA Experiment 108607 PARAMETER Experiment Name: At_100uM_ABA_cDNA_P Parameter: Timepoint (hr) Value: 4
  misc_feature: MA Experiment 108607 PARAMETER Experiment Name: At_100uM_ABA_cDNA_P Parameter: Tissue Value: Aerial
  misc_feature: MA Experiment 108607 PARAMETER Experiment Name: At_100uM_ABA_cDNA_P Parameter: Treatment Value: 100uM ABA vs. No Treatment
  misc_feature: MA Experiment ID: 108667 Result: Up-regulated in Transcription
  misc_feature: MA Experiment 108667 PARAMETER Experiment Name: At_2mM_SA_cDNA_P Parameter: Plant Line Value: WS
  misc_feature: MA Experiment 108667 PARAMETER Experiment Name: At_2mM_SA_cDNA_P Parameter: Timepoint (hr) Value: 1
  misc_feature: MA Experiment 108667 PARAMETER Experiment Name: At_2mM_SA_cDNA_P Parameter: Treatment Value: 2mM SA vs. No Treatment
  misc_feature: MA Experiment ID: 108668 Result: Up-regulated in Transcription
  misc_feature: MA Experiment 108668 PARAMETER Experiment Name: At_2mM_SA_cDNA_P Parameter: Plant Line Value: WS
  misc_feature: MA Experiment 108668 PARAMETER Experiment Name: At_2mM_SA_cDNA_P Parameter: Timepoint (hr) Value: 6
  misc_feature: MA Experiment 108668 PARAMETER Experiment Name: At_2mM_SA_cDNA_P Parameter: Treatment Value: 2mM SA vs. No Treatment
  misc_feature: MA Experiment ID: 20000070 Result: Up-regulated in Transcription
  misc_feature: MA Experiment 20000070 PARAMETER Experiment Name: At_100uM_ABA_Mutants_cDNA_P Parameter: Plant Line Value: CS24
  misc_feature: MA Experiment 20000070 PARAMETER Experiment Name: At_100uM_ABA_Mutants_cDNA_P Parameter: Timepoint (hr) Value: 6
  misc_feature: MA Experiment 20000070 PARAMETER Experiment Name: At_100uM_ABA_Mutants_cDNA_P Parameter: Tissue Value: Aerial
  misc_feature: MA Experiment 20000070 PARAMETER Experiment Name: At_100uM_ABA_Mutants_cDNA_P Parameter: Treatment Value: 100uM ABA vs. No Treatment
  misc_feature: MA Experiment ID: 20000071 Result: Up-regulated in Transcription
  misc_feature: MA Experiment 20000071 PARAMETER Experiment Name: At_100uM_ABA_Mutants_cDNA_P Parameter: Plant Line Value: CS8104
  misc_feature: MA Experiment 20000071 PARAMETER Experiment Name: At_100uM_ABA_Mutants_cDNA_P Parameter: Timepoint (hr) Value: 6
  misc_feature: MA Experiment 20000071 PARAMETER Experiment Name: At_100uM_ABA_Mutants_cDNA_P Parameter: Tissue Value: Aerial
  misc_feature: MA Experiment 20000071 PARAMETER Experiment Name: At_100uM_ABA_Mutants_cDNA_P Parameter: Treatment Value: 100uM ABA vs. No Treatment
  misc_feature: MA Experiment ID: 20000179 Result: Down-regulated in Transcription
  misc_feature: MA Experiment 20000179 PARAMETER Experiment Name: At_Germinating_Seeds_P Parameter: Age (hr) Value: 6 vs. 0
  misc_feature: MA Experiment 20000179 PARAMETER Experiment Name: At_Germinating_Seeds_P Parameter: Tissue Value: Germinating Seeds
  misc_feature: MA Experiment ID: 20000180 Result: Down-regulated in Transcription
  misc_feature: MA Experiment 20000180 PARAMETER Experiment Name: At_Germinating_Seeds_P Parameter: Age (hr) Value: 24 vs. 0
  misc_feature: MA Experiment 20000180 PARAMETER Experiment Name: At_Germinating_Seeds_P Parameter: Tissue Value: Germinating Seeds
  misc_feature: MA Experiment ID: 20000182 Result: Up-regulated in Transcription
  misc_feature: MA Experiment 20000182 PARAMETER Experiment Name: At_2mM_SA_P Parameter: Age (day) Value: 14
  misc_feature: MA Experiment 20000182 PARAMETER Experiment Name: At_2mM_SA_P Parameter: Organism Value: A. thaliana
  misc_feature: MA Experiment 20000182 PARAMETER Experiment Name: At_2mM_SA_P Parameter: Plant Line Value: WS
  misc_feature: MA Experiment 20000182 PARAMETER Experiment Name: At_2mM_SA_P Parameter: Timepoint (hr) Value: 6
  misc_feature: MA Experiment 20000182 PARAMETER Experiment Name: At_2mM_SA_P Parameter: Tissue Value: Aerial
  misc_feature: MA Experiment 20000182 PARAMETER Experiment Name: At_2mM_SA_P Parameter: Treatment Value: 2mM SA vs. No Treatment
  misc_feature: MA Experiment ID: 20000185 Result: Up-regulated in Transcription
  misc_feature: MA Experiment 20000185 PARAMETER Experiment Name: At_Roots__P Parameter: Age (day) Value: 7 vs. 21
  misc_feature: MA Experiment 20000185 PARAMETER Experiment Name: At_Roots__P Parameter: Organism Value: A. thaliana
  misc_feature: MA Experiment 20000185 PARAMETER Experiment Name: At_Roots__P Parameter: Tissue Value: Roots vs. Whole Plant
  misc_feature: MA Experiment ID: 20000265 Result: Up-regulated in Transcription
  misc_feature: MA Experiment 20000265 PARAMETER Experiment Name: At_Open_Flower_P Parameter: Age (day) Value: 21
  misc_feature: MA Experiment 20000265 PARAMETER Experiment Name: At_Open_Flower_P Parameter: Plant Line Value: WS
  misc_feature: MA Experiment 20000265 PARAMETER Experiment Name: At_Open_Flower_P Parameter: Tissue Value: Closed Flower vs. Whole Plant
  misc_feature: MA Experiment ID: 20000437 Result: Up-regulated in Transcription
  misc_feature: MA Experiment 20000437 PARAMETER Experiment Name: At_Drought_P Parameter: Age (day) Value: 8
  misc_feature: MA Experiment 20000437 PARAMETER Experiment Name: At_Drought_P Parameter: Organism Value: A. thaliana
  misc_feature: MA Experiment 20000437 PARAMETER Experiment Name: At_Drought_P Parameter: Plant Line Value: WS
  misc_feature: MA Experiment 20000437 PARAMETER Experiment Name: At_Drought_P Parameter: Timepoint (hr) Value: 24
  misc_feature: MA Experiment 20000437 PARAMETER Experiment Name: At_Drought_P Parameter: Tissue Value: Whole Plant
  misc_feature: MA Experiment 20000437 PARAMETER Experiment Name: At_Drought_P Parameter: Treatment Value: Drought vs. No Drought
  misc_feature: MA Experiment ID: 20000439 Result: Up-regulated in Transcription
  misc_feature: MA Experiment 20000439 PARAMETER Experiment Name: At_Roots__P Parameter: Age (day) Value: 14 vs. 21
  misc_feature: MA Experiment 20000439 PARAMETER Experiment Name: At_Roots__P Parameter: Organism Value: A. thaliana
  misc_feature: MA Experiment 20000439 PARAMETER Experiment Name: At_Roots__P Parameter: Tissue Value: Roots vs. Whole Plant
  misc_feature: MA Experiment ID: 20000527 Result: Down-regulated in Transcription
  misc_feature: MA Experiment 20000527 PARAMETER Experiment Name: At_10percent_PEG_P Parameter: Age (day) Value: 20
  misc_feature: MA Experiment 20000527 PARAMETER Experiment Name: At_10percent_PEG_P Parameter: Organism Value: A. thaliana
  misc_feature: MA Experiment 20000527 PARAMETER Experiment Name: At_10percent_PEG_P Parameter: Plant Line Value: WS
  misc_feature: MA Experiment 20000527 PARAMETER Experiment Name: At_10percent_PEG_P Parameter: Timepoint (day) Value: 20
  misc_feature: MA Experiment 20000527 PARAMETER Experiment Name: At_10percent_PEG_P Parameter: Tissue Value: Whole Plant
  misc_feature: MA Experiment 20000527 PARAMETER Experiment Name: At_10percent_PEG_P Parameter: Treatment Value: 10percent PEG vs. No Treatment
  misc_feature: MA Experiment ID: 20000709 Result: Up-regulated in Transcription
  misc_feature: MA Experiment 20000709 PARAMETER Experiment Name: At_15mM_NH4NO3_L-to-H_P Parameter: Age (hr) Value: 14
  misc_feature: MA Experiment 20000709 PARAMETER Experiment Name: At_15mM_NH4NO3_L-to-H_P Parameter: Organism Value: A. thaliana
  misc_feature: MA Experiment 20000709 PARAMETER Experiment Name: At_15mM_NH4NO3_L-to-H_P Parameter: Plant Line Value: WS
  misc_feature: MA Experiment 20000709 PARAMETER Experiment Name: At_15mM_NH4NO3_L-to-H_P Parameter: Timepoint (hr) Value: 4
  misc_feature: MA Experiment 20000709 PARAMETER Experiment Name: At_15mM_NH4NO3_L-to-H_P Parameter: Tissue Value: Aerial
  misc_feature: MA Experiment 20000709 PARAMETER Experiment Name: At_15mM_NH4NO3_L-to-H_P Parameter: Treatment Value: 15mM NH4NO3 vs. 30mM Mannitol
  misc_feature: MA Experiment ID: 20001450 Result: Down-regulated in Transcription
  misc_feature: MA Experiment 20001450 PARAMETER Experiment Name: At_Far-red-induction_P Parameter: Age (day) Value: 7
  misc_feature: MA Experiment 20001450 PARAMETER Experiment Name: At_Far-red-induction_P Parameter: Light Value: Far-red vs. White
  misc_feature: MA Experiment 20001450 PARAMETER Experiment Name: At_Far-red-induction_P Parameter: Organism Value: A. thaliana
  misc_feature: MA Experiment 20001450 PARAMETER Experiment Name: At_Far-red-induction_P Parameter: Plant Line Value: Columbia
  misc_feature: MA Experiment 20001450 PARAMETER Experiment Name: At_Far-red-induction_P Parameter: Timepoint (hr) Value: 8
  misc_feature: MA Experiment 20001450 PARAMETER Experiment Name: At_Far-red-induction_P Parameter: Tissue Value: Whole Plant
  misc_feature: MA Experiment ID: 20001451 Result: Down-regulated in Transcription
  misc_feature: MA Experiment 20001451 PARAMETER Experiment Name: At_Far-red-induction_P Parameter: Age (day) Value: 7
  misc_feature: MA Experiment 20001451 PARAMETER Experiment Name: At_Far-red-induction_P Parameter: Light Value: Far-red vs. White
  misc_feature: MA Experiment 20001451 PARAMETER Experiment Name: At_Far-red-induction_P Parameter: Organism Value: A. thaliana
  misc_feature: MA Experiment 20001451 PARAMETER Experiment Name: At_Far-red-induction_P Parameter: Plant Line Value: Columbia
  misc_feature: MA Experiment 20001451 PARAMETER Experiment Name: At_Far-red-induction_P Parameter: Timepoint (hr) Value: 24
  misc_feature: MA Experiment 20001451 PARAMETER Experiment Name: At_Far-red-induction_P Parameter: Tissue Value: Whole Plant
  misc_feature: MA Experiment ID: 20001556 Result: Up-regulated in Transcription
  misc_feature: MA Experiment 20001556 PARAMETER Experiment Name: At_Drought_Soil_Dry_P Parameter: Age (day) Value: 26
  misc_feature: MA Experiment 20001556 PARAMETER Experiment Name: At_Drought_Soil_Dry_P Parameter: Organism Value: A. thaliana
  misc_feature: MA Experiment 20001556 PARAMETER Experiment Name: At_Drought_Soil_Dry_P Parameter: Plant Line Value: WS
  misc_feature: MA Experiment 20001556 PARAMETER Experiment Name: At_Drought_Soil_Dry_P Parameter: Post Timepoint (hr) Value: None
  misc_feature: MA Experiment 20001556 PARAMETER Experiment Name: At_Drought_Soil_Dry_P Parameter: Post-Treatment Value: None
  misc_feature: MA Experiment 20001556 PARAMETER Experiment Name: At_Drought_Soil_Dry_P Parameter: Timepoint (day) Value: 12
  misc_feature: MA Experiment 20001556 PARAMETER Experiment Name: At_Drought_Soil_Dry_P Parameter: Treatment Value: Drought vs. No Drought
  misc_feature: MA Experiment ID: 20001557 Result: Up-regulated in Transcription
  misc_feature: MA Experiment 20001557 PARAMETER Experiment Name: At_Drought_Soil_Dry_P Parameter: Age (day) Value: 27
  misc_feature: MA Experiment 20001557 PARAMETER Experiment Name: At_Drought_Soil_Dry_P Parameter: Organism Value: A. thaliana
  misc_feature: MA Experiment 20001557 PARAMETER Experiment Name: At_Drought_Soil_Dry_P Parameter: Plant Line Value: WS
  misc_feature: MA Experiment 20001557 PARAMETER Experiment Name: At_Drought_Soil_Dry_P Parameter: Post Timepoint (hr) Value: 3
  misc_feature: MA Experiment 20001557 PARAMETER Experiment Name: At_Drought_Soil_Dry_P Parameter: Post-Treatment Value: Re-Water vs. No Drought
  misc_feature: MA Experiment 20001557 PARAMETER Experiment Name: At_Drought_Soil_Dry_P Parameter: Timepoint (day) Value: 13
  misc_feature: MA Experiment 20001557 PARAMETER Experiment Name: At_Drought_Soil_Dry_P Parameter: Treatment Value: Drought vs. No Drought
  misc_feature: MA Experiment ID: 20001558 Result: Up-regulated in Transcription
  misc_feature: MA Experiment 20001558 PARAMETER Experiment Name: At_Drought_Soil_Dry_P Parameter: Age (day) Value: 27
  misc_feature: MA Experiment 20001558 PARAMETER Experiment Name: At_Drought_Soil_Dry_P Parameter: Organism Value: A. thaliana
  misc_feature: MA Experiment 20001558 PARAMETER Experiment Name: At_Drought_Soil_Dry_P Parameter: Plant Line Value: WS
  misc_feature: MA Experiment 20001558 PARAMETER Experiment Name: At_Drought_Soil_Dry_P Parameter: Post Timepoint (hr) Value: 6
  misc_feature: MA Experiment 20001558 PARAMETER Experiment Name: At_Drought_Soil_Dry_P Parameter: Post-Treatment Value: Re-Water vs. No Drought
  misc_feature: MA Experiment 20001558 PARAMETER Experiment Name: At_Drought_Soil_Dry_P Parameter: Timepoint (day) Value: 13
  misc_feature: MA Experiment 20001558 PARAMETER Experiment Name: At_Drought_Soil_Dry_P Parameter: Treatment Value: Drought vs. No Drought
  misc_feature: MA Experiment ID: 20001560 Result: Up-regulated in Transcription
  misc_feature: MA Experiment 20001560 PARAMETER Experiment Name: At_Drought_Soil_Dry_P Parameter: Age (day) Value: 28
  misc_feature: MA Experiment 20001560 PARAMETER Experiment Name: At_Drought_Soil_Dry_P Parameter: Organism Value: A. thaliana
  misc_feature: MA Experiment 20001560 PARAMETER Experiment Name: At_Drought_Soil_Dry_P Parameter: Plant Line Value: WS
  misc_feature: MA Experiment 20001560 PARAMETER Experiment Name: At_Drought_Soil_Dry_P Parameter: Post Timepoint (hr) Value: None
  misc_feature: MA Experiment 20001560 PARAMETER Experiment Name: At_Drought_Soil_Dry_P Parameter: Post-Treatment Value: None
  misc_feature: MA Experiment 20001560 PARAMETER Experiment Name: At_Drought_Soil_Dry_P Parameter: Timepoint (day) Value: 14
  misc_feature: MA Experiment 20001560 PARAMETER Experiment Name: At_Drought_Soil_Dry_P Parameter: Treatment Value: Drought vs. No Drought
  misc_feature: MA Experiment ID: 20001757 Result: Down-regulated in Transcription
  misc_feature: MA Experiment 20001757 PARAMETER Experiment Name: At_50mM_NH4NO3_L-to-H_P Parameter: Timepoint (hr) Value: 6
  misc_feature: MA Experiment 20001757 PARAMETER Experiment Name: At_50mM_NH4NO3_L-to-H_P Parameter: Tissue Value: Leaf
  misc_feature: MA Experiment 20001757 PARAMETER Experiment Name: At_50mM_NH4NO3_L-to-H_P Parameter: Treatment Value: 50mM NH4NO3 vs 100mM Mannitol
  misc_feature: MA Experiment ID: 20001904 Result: Up-regulated in Transcription
  misc_feature: MA Experiment 20001904 PARAMETER Experiment Name: At_Drought_Reproduction_P Parameter: Age (day) Value: 37
  misc_feature: MA Experiment 20001904 PARAMETER Experiment Name: At_Drought_Reproduction_P Parameter: Organism Value: A. thaliana
  misc_feature: MA Experiment 20001904 PARAMETER Experiment Name: At_Drought_Reproduction_P Parameter: Plant Line Value: WS
  misc_feature: MA Experiment 20001904 PARAMETER Experiment Name: At_Drought_Reproduction_P Parameter: Timepoint (day) Value: 7
  misc_feature: MA Experiment 20001904 PARAMETER Experiment Name: At_Drought_Reproduction_P Parameter: Tissue Value: Rosettes
  misc_feature: MA Experiment 20001904 PARAMETER Experiment Name: At_Drought_Reproduction_P Parameter: Treatment Value: Drought vs. No Drought
aatagattagttttgtacttctgttacgtggtgattattaaaacttgtaataacagtataatctggttttgttggtgtagattgatgatttcaacattgcaaagaaggaagaggacattgggttctacgctggatttgttggttgctctttcatgctcggacgagcttttacatctgtggcatggggacttgttgctgatcgttatggtagaaaacctgtaatcctcataggaaccgcttcagtggtcgtttttaatactctgtttggcctaagtttaaatttctggatggctattatcacaagattttgcctcggtagtttcaacggtttacttggtcctatcaaggcttacgcaatggaaatattccgtgatgagtatcaaggtttagcactctcagcagttagtacagcttggggaattggactcatcattggccctgctataggaggttttcttgctcagcctgcaaagcaatatccaagtttattctcacaggactccatttttggcaaatttcccttctttttgccatgcttagcaatatccgtttttgcattcttggtgaccatagtttcatcaaggattccggaaacattgcacaatcacaagtttaatgatgatgagtcttatgatgctctcaaagatttgtctgatgaccctgaatctaataaagtggcagagagaaatggaaaaagttctctcttgaacaactggccattaatttcatctatcatcgtatactgcgtcttttcactacatgatatggcttacacagagatcttttcattgtgggcaaacagtccgaggaaatatggaggtttgggatactccactgcagatgttggttctgttcttgccttttcaggctttggtctccttatctttcagctttcgctctactcttacgcagagaggcttttaggacctatcatagttacacgtatatctgggagcctagcaatggtcgtcttatcatgttacccactaatagcaaagttatctggtttagtccttaccgtgactgtaacttctgcatccgtagcaaagagtgttttaggtacttctgctataactggattattcatccttcaaaacaaggctgtgagacaagaccaaagaggagcagctaatggaattgccatgacagcgatgtctcttttcaaagccataggtccagcagcagcaggaatcattttttcgtggagcgagaaacgtcagggtgctgcttttctccctggcacccaaatggtattctttatactgaatgtggttttggcacttggagttgtattgacattcaaaccatttctagctgaaacacaacagtagaaaatgatgaagattttgatggtattcaaattacataatcagaatgtattgtataatatatagatttgtatgtctgatccaaagttagattagaaaaatggcaagagaaaaagaaaaaaaacttgttagaattgttgtcatcatcctttgtatgttataggacaagttgttcacaaaattttgtctaatgtgtcagaaccattgtaagaaggattcaataatgttttttgtacatgatgtttcgcgaataatattgacaagtcgtcaaatcctatcctgagattccc

SEQ ID NO: 20805 - protein, 392 aa, Arabidopsis thaliana
  peptide (1)..(392): Ceres Seq. ID no. 12385175
  misc_feature (1)..(392): Homolog of NCBI NO: 23452819 NR Description: major facilitator superfamily antiporter [Zea
  misc_feature (1)..(388): Homolog of NCBI NO: 23452821 NR Description: major facilitator superfamily antiporter
  misc_feature (1)..(391): Homolog of NCBI NO: 15229781 NR Description: transporter-like protein; protein id: At3g43790.1
  misc_feature (1)..(392): Homolog of NCBI NO: 23452823 NR Description: major facilitator superfamily antiporter
  misc_feature (1)..(392): Homolog of NCBI NO: 22326785 NR Description: transporter-like protein
  misc_feature (1)..(392): Homolog of NCBI NO: 20260160 NR Description: transporter-like protein [Arabidopsis thaliana]
  misc_feature (1)..(363): Homolog of NCBI NO: 10177340 NR Description: transporter-like protein [Arabidopsis thaliana]
  misc_feature (1)..(392): Homolog of NCBI NO: 21555230 NR Description: transporter-like protein [Arabidopsis thaliana]
  misc_feature (1)..(392): Homolog of NCBI NO: 30684567 NR Description: transporter-related protein [Arabidopsis thaliana]
  misc_feature (1)..(392): Homolog of NCBI NO: 30684565 NR Description: transporter-related protein [Arabidopsis
MLGRAFTSVAWGLVADRYGRKPVILIGTASVVVFNTLFGLSLNFWMAIITRFCLGSFNGLLGPIKAYAMEIFRDEYQGLALSAVSTAWGIGLIIGPAIGGFLAQPAKQYPSLFSQDSIFGKFPFFLPCLAISVFAFLVTIVSSRIPETLHNHKFNDDESYDALKDLSDDPESNKVAERNGKSSLLNNWPLISSIIVYCVFSLHDMAYTEIFSLWANSPRKYGGLGYSTADVGSVLAFSGFGLLIFQLSLYSYAERLLGPIIVTRISGSLAMVVLSCYPLIAKLSGLVLTVTVTSASVAKSVLGTSAITGLFILQNKAVRQDQRGAANGIAMTAMSLFKAIGPAAAGIIFSWSEKRQGAAFLPGTQMVFFILNVVLALGVVLTFKPFLAETQQ

SEQ ID NO: 20806 - protein, 347 aa, Arabidopsis thaliana
  peptide (1)..(347): Ceres Seq. ID no. 12385176
  misc_feature (1)..(347): Homolog of NCBI NO: 23452819 NR Description: major facilitator superfamily antiporter [Zea
  misc_feature (1)..(343): Homolog of NCBI NO: 23452821 NR Description: major facilitator superfamily antiporter
  misc_feature (1)..(346): Homolog of NCBI NO: 15229781 NR Description: transporter-like protein; protein id: At3g43790.1
  misc_feature (1)..(347): Homolog of NCBI NO: 23452823 NR Description: major facilitator superfamily antiporter
  misc_feature (1)..(347): Homolog of NCBI NO: 22326785 NR Description: transporter-like protein
  misc_feature (1)..(347): Homolog of NCBI NO: 20260160 NR Description: transporter-like protein [Arabidopsis thaliana]
  misc_feature (1)..(318): Homolog of NCBI NO: 10177340 NR Description: transporter-like protein [Arabidopsis thaliana]
  misc_feature (1)..(347): Homolog of NCBI NO: 21555230 NR Description: transporter-like protein [Arabidopsis thaliana]
  misc_feature (1)..(347): Homolog of NCBI NO: 30684567 NR Description: transporter-related protein [Arabidopsis thaliana]
  misc_feature (1)..(347): Homolog of NCBI NO: 30684565 NR Description: transporter-related protein [Arabidopsis
MAIITRFCLGSFNGLLGPIKAYAMEIFRDEYQGLALSAVSTAWGIGLIIGPAIGGFLAQPAKQYPSLFSQDSIFGKFPFFLPCLAISVFAFLVTIVSSRIPETLHNHKFNDDESYDALKDLSDDPESNKVAERNGKSSLLNNWPLISSIIVYCVFSLHDMAYTEIFSLWANSPRKYGGLGYSTADVGSVLAFSGFGLLIFQLSLYSYAERLLGPIIVTRISGSLAMVVLSCYPLIAKLSGLVLTVTVTSASVAKSVLGTSAITGLFILQNKAVRQDQRGAANGIAMTAMSLFKAIGPAAAGIIFSWSEKRQGAAFLPGTQMVFFILNVVLALGVVLTFKPFLAETQQ

SEQ ID NO: 20807 - protein, 324 aa, Arabidopsis thaliana
  peptide (1)..(324): Ceres Seq. ID no. 12385177
  misc_feature (1)..(324): Homolog of NCBI NO: 30684565 NR Description: transporter-related protein [Arabidopsis
  misc_feature (1)..(324): Homolog of NCBI NO: 21555230 NR Description: transporter-like protein [Arabidopsis thaliana]
  misc_feature (1)..(324): Homolog of NCBI NO: 30684567 NR Description: transporter-related protein [Arabidopsis thaliana]
  misc_feature (1)..(324): Homolog of NCBI NO: 23452819 NR Description: major facilitator superfamily antiporter [Zea
  misc_feature (1)..(320): Homolog of NCBI NO: 23452821 NR Description: major facilitator superfamily antiporter
  misc_feature (1)..(323): Homolog of NCBI NO: 15229781 NR Description: transporter-like protein; protein id: At3g43790.1
  misc_feature (1)..(324): Homolog of NCBI NO: 23452823 NR Description: major facilitator superfamily antiporter
  misc_feature (1)..(324): Homolog of NCBI NO: 22326785 NR Description: transporter-like protein
  misc_feature (1)..(324): Homolog of NCBI NO: 20260160 NR Description: transporter-like protein [Arabidopsis thaliana]
  misc_feature (1)..(295): Homolog of NCBI NO: 10177340 NR Description: transporter-like protein [Arabidopsis thaliana]
MEIFRDEYQGLALSAVSTAWGIGLIIGPAIGGFLAQPAKQYPSLFSQDSIFGKFPFFLPCLAISVFAFLVTIVSSRIPETLHNHKFNDDESYDALKDLSDDPESNKVAERNGKSSLLNNWPLISSIIVYCVFSLHDMAYTEIFSLWANSPRKYGGLGYSTADVGSVLAFSGFGLLIFQLSLYSYAERLLGPIIVTRISGSLAMVVLSCYPLIAKLSGLVLTVTVTSASVAKSVLGTSAITGLFILQNKAVRQDQRGAANGIAMTAMSLFKAIGPAAAGIIFSWSEKRQGAAFLPGTQMVFFILNVVLALGVVLTFKPFLAETQQ

SEQ ID NO: 20808 - DNA, 1693 bp, Arabidopsis thaliana
  misc_feature (1)..(1693): Ceres Seq. ID no. 13509182
  misc_feature: MA Experiment ID: 108434 Result: Up-regulated in Transcription
  misc_feature: MA Experiment 108434 PARAMETER Experiment Name: At_Root_Tips_cDNA_P Parameter: Tissue Value: Root Tips
  misc_feature: MA Experiment ID: 108435 Result: Up-regulated in Transcription
  misc_feature: MA Experiment 108435 PARAMETER Experiment Name: At_stm_Mutants_cDNA_P Parameter: Plant Line Value: wt Landsburg vs stm
  misc_feature: MA Experiment 108435 PARAMETER Experiment Name: At_stm_Mutants_cDNA_P Parameter: Tissue Value: Shoot Apical Meristem Region
  misc_feature: MA Experiment ID: 108461 Result: Down-regulated in Transcription
  misc_feature: MA Experiment 108461 PARAMETER Experiment Name: At_Germinating_Seeds_cDNA_P Parameter: Age (day) Value: 1 vs. 0
  misc_feature: MA Experiment 108461 PARAMETER Experiment Name: At_Germinating_Seeds_cDNA_P Parameter: Tissue Value: Germinating Seeds
  misc_feature: MA Experiment ID: 108462 Result: Down-regulated in Transcription
  misc_feature: MA Experiment 108462 PARAMETER Experiment Name: At_Germinating_Seeds_cDNA_P Parameter: Age (day) Value: 2 vs. 0
  misc_feature: MA Experiment 108462 PARAMETER Experiment Name: At_Germinating_Seeds_cDNA_P Parameter: Tissue Value: Germinating Seeds
  misc_feature: MA Experiment ID: 108463 Result: Down-regulated in Transcription
  misc_feature: MA Experiment 108463 PARAMETER Experiment Name: At_Germinating_Seeds_cDNA_P Parameter: Age (day) Value: 3 vs. 0
  misc_feature: MA Experiment 108463 PARAMETER Experiment Name: At_Germinating_Seeds_cDNA_P Parameter: Tissue Value: Germinating Seeds
  misc_feature: MA Experiment ID: 108464 Result: Down-regulated in Transcription
  misc_feature: MA Experiment 108464 PARAMETER Experiment Name: At_Germinating_Seeds_cDNA_P Parameter: Age (day) Value: 4 vs. 0
  misc_feature: MA Experiment 108464 PARAMETER Experiment Name: At_Germinating_Seeds_cDNA_P Parameter: Tissue Value: Germinating Seeds
  misc_feature: MA Experiment ID: 20000180 Result: Down-regulated in Transcription
  misc_feature: MA Experiment 20000180 PARAMETER Experiment Name: At_Germinating_Seeds_P Parameter: Age (hr) Value: 24 vs. 0
  misc_feature: MA Experiment 20000180 PARAMETER Experiment Name: At_Germinating_Seeds_P Parameter: Tissue Value: Germinating Seeds
  misc_feature: MA Experiment ID: 20001558 Result: Up-regulated in Transcription
  misc_feature: MA Experiment 20001558 PARAMETER Experiment Name: At_Drought_Soil_Dry_P Parameter: Age (day) Value: 27
  misc_feature: MA Experiment 20001558 PARAMETER Experiment Name: At_Drought_Soil_Dry_P Parameter: Organism Value: A. thaliana
  misc_feature: MA Experiment 20001558 PARAMETER Experiment Name: At_Drought_Soil_Dry_P Parameter: Plant Line Value: WS
  misc_feature: MA Experiment 20001558 PARAMETER Experiment Name: At_Drought_Soil_Dry_P Parameter: Post Timepoint (hr) Value: 6
  misc_feature: MA Experiment 20001558 PARAMETER Experiment Name: At_Drought_Soil_Dry_P Parameter: Post-Treatment Value: Re-Water vs. No Drought
  misc_feature: MA Experiment 20001558 PARAMETER Experiment Name: At_Drought_Soil_Dry_P Parameter: Timepoint (day) Value: 13
  misc_feature: MA Experiment 20001558 PARAMETER Experiment Name: At_Drought_Soil_Dry_P Parameter: Treatment Value: Drought vs. No Drought
gattcattctcttcagtcagagatttcgaaaccctagtcgatttcgagatccaaccaactctgctccttatctcagcttgttgaatttgcgaagtatgggagacgctagagacaacgaagcctacgaggaggagctcttggactatgaagaagaagacgagaaggtcccagattctggaaacaaagttaacggtgaagccgtgaaaaaagggtacgtgggaatacacagttctggattcagagacttccttttaaaaccggagcttctcagagctattgttgactctggatttgaacatccatctgaagtgcaacatgaatgtatccctcaagctatcttgggcatggatgtcatctgccaagcaaagtctggtatggggaagactgctgtgtttgtcctgtctactctacaacagattgaaccatctcctggccaggtttctgcacttgtcttgtgccatacaagagagctagcttaccagatctgcaatgagtttgtgcgattcagtacctatctgcctgatacaaaggtttcggtgttctatggtggagtcaacattaaaattcacaaagacttgctgaagaatgaatgtcctcacattgttgttggtacccctggtcgggtgcttgcacttgccagggagaaagatctctctttgaagaatgtgaggcattttattcttgatgaatgtgataaaatgctcgagtcacttgacatgcgaagggatgtgcaggagattttcaagatgactcctcatgacaaacaagtaatgatgttctcagcaacgctcagcaaagagatacgcccagtctgcaaaaaatttatgcaagatccaatggaaatatatgtcgatgatgaagccaagttgactcttcatgggcttgtccagcactacatcaaactgagcgagatggagaaaaaccggaagttgaatgaccttcttgatgcgttggacttcaatcaagttgtcatttttgtgaagagcgtgagcagggctgctgagctgaacaagttactggtggaatgcaatttcccctcaatatgcatccactctggaatgtctcaagaagagaggttgactcgatacaaaagtttcaaggaagggcacaaaaggatccttgtggcgactgacttggtaggaagagggattgacattgagcgtgtcaacattgtcatcaactatgacatgccagattctgctgatacctatcttcacagggttggcagagctggtagatttggaaccaagggtcttgcaatcacatttgttgcatctgcttcagattcagaggttcttaaccaggtacaagagaggtttgaggttgatataaaggaacttccggagcagattgatacttcaacctacatgccttcttaaacaagtagcacgtccctcaggaaagaagctcttcagatttcaaccttgtaggtgttcgaagggtgatgggggttcacaactatctctcgctccgtttgttttagtgttttctatgacgacatttttttccatatgtttagaacgtctgttgtactctttaaaggagattcgagtcactctccaaatcgcacagttaaaagctgtccagttttttgtacaagagattattatgtttgaaatatcaggatttagtctcgacctgattactgtgttccttaggaatcgatctattatcaatttatcatggtgttgct

SEQ ID NO: 20809 - protein, 458 aa, Arabidopsis thaliana
  peptide (1)..(458): Ceres Seq. ID no. 13509183
  misc_feature (90)..(297): Pfam Name: DEAD/DEAH box helicase Pfam Description: DEAD/DEAH box helicase
  misc_feature (90)..(297): Pfam Name: DEAD/DEAH box helicase Pfam Description: DEAD/DEAH box helicase
  misc_feature (42)..(277): Homolog of NCBI NO: 21040373 NR Description: DEAD/H (Asp-Glu-Ala-Asp/His) box polypeptide 39
  misc_feature (42)..(456): Homolog of NCBI NO: 16758334 NR Description: nuclear RNA helicase, DECD variant of DEAD box
  misc_feature (37)..(456): Homolog of NCBI NO: 28278325 NR Description: Unknown (protein for MGC:55433) [Danio rerio]
  misc_feature (115)..(458): Homolog of NCBI NO: 30683509 NR Description: DEAD/DEAH box helicase, putative [Arabidopsis
  misc_feature (34)..(458): Homolog of NCBI NO: 34913862 NR Description: putative DEAD BOX RNA helicase
  misc_feature (42)..(277): Homolog of NCBI NO: 21040373 NR Description: DEAD/H (Asp-Glu-Ala-Asp/His) box polypeptide 39
  misc_feature (37)..(456): Homolog of NCBI NO: 28278325 NR Description: Unknown (protein for MGC:55433) [Danio rerio]
  misc_feature (34)..(458): Homolog of NCBI NO: 34913862 NR Description: putative DEAD BOX RNA helicase
  misc_feature (8)..(458): Homolog of NCBI NO: 11358797 NR Description: RNA helicase RH15 [imported] - Arabidopsis
  misc_feature (32)..(458): Homolog of NCBI NO: 18416493 NR Description: DEAD/DEAH box helicase, putative [Arabidopsis
  misc_feature (32)..(458): Homolog of NCBI NO: 18416486 NR Description: DEAD/DEAH box helicase, putative [Arabidopsis
  misc_feature (32)..(455): Homolog of NCBI NO: 8953382 NR Description: DEAD BOX RNA helicase RH15 [Arabidopsis thaliana]
  misc_feature (32)..(455): Homolog of NCBI NO: 8953379 NR Description: DEAD BOX RNA helicase RH15-like protein
  misc_feature (115)..(458): Homolog of NCBI NO: 30683509 NR Description: DEAD/DEAH box helicase, putative [Arabidopsis
  misc_feature (42)..(456): Homolog of NCBI NO: 16758334 NR Description: nuclear RNA helicase, DECD variant of DEAD box
  misc_feature (32)..(455): Homolog of NCBI NO: 8953379 NR Description: DEAD BOX RNA helicase RH15-like protein
  misc_feature (32)..(455): Homolog of NCBI NO: 8953382 NR Description: DEAD BOX RNA helicase RH15 [Arabidopsis thaliana]
  misc_feature (32)..(458): Homolog of NCBI NO: 18416486 NR Description: DEAD/DEAH box helicase, putative [Arabidopsis
  misc_feature (32)..(458): Homolog of NCBI NO: 18416493 NR Description: DEAD/DEAH box helicase, putative [Arabidopsis
  misc_feature (8)..(458): Homolog of NCBI NO: 11358797 NR Description: RNA helicase RH15 [imported] - Arabidopsis
FILFSQRFRNPSRFRDPTNSAPYLSLLNLRSMGDARDNEAYEEELLDYEEEDEKVPDSGNKVNGEAVKKGYVGIHSSGFRDFLLKPELLRAIVDSGFEHPSEVQHECIPQAILGMDVICQAKSGMGKTAVFVLSTLQQIEPSPGQVSALVLCHTRELAYQICNEFVRFSTYLPDTKVSVFYGGVNIKIHKDLLKNECPHIVVGTPGRVLALAREKDLSLKNVRHFILDECDKMLESLDMRRDVQEIFKMTPHDKQVMMFSATLSKEIRPVCKKFMQDPMEIYVDDEAKLTLHGLVQHYIKLSEMEKNRKLNDLLDALDFNQVVIFVKSVSRAAELNKLLVECNFPSICIHSGMSQEERLTRYKSFKEGHKRILVATDLVGRGIDIERVNIVINYDMPDSADTYLHRVGRAGRFGTKGLAITFVASASDSEVLNQVQERFEVDIKELPEQIDTSTYMPS

SEQ ID NO: 20810 - protein, 427 aa, Arabidopsis thaliana
  peptide (1)..(427): Ceres Seq. ID no. 13509184
  misc_feature (59)..(266): Pfam Name: DEAD/DEAH box helicase Pfam Description: DEAD/DEAH box helicase
  misc_feature (59)..(266): Pfam Name: DEAD/DEAH box helicase Pfam Description: DEAD/DEAH box helicase
  misc_feature (11)..(246): Homolog of NCBI NO: 21040373 NR Description: DEAD/H (Asp-Glu-Ala-Asp/His) box polypeptide 39
  misc_feature (11)..(425): Homolog of NCBI NO: 16758334 NR Description: nuclear RNA helicase, DECD variant of DEAD box
  misc_feature (6)..(425): Homolog of NCBI NO: 28278325 NR Description: Unknown (protein for MGC:55433) [Danio rerio]
  misc_feature (84)..(427): Homolog of NCBI NO: 30683509 NR Description: DEAD/DEAH box helicase, putative [Arabidopsis
  misc_feature (3)..(427): Homolog of NCBI NO: 34913862 NR Description: putative DEAD BOX RNA helicase
  misc_feature (11)..(246): Homolog of NCBI NO: 21040373 NR Description: DEAD/H (Asp-Glu-Ala-Asp/His) box polypeptide 39
  misc_feature (6)..(425): Homolog of NCBI NO: 28278325 NR Description: Unknown (protein for MGC:55433) [Danio rerio]
  misc_feature (3)..(427): Homolog of NCBI NO: 34913862 NR Description: putative DEAD BOX RNA helicase
  misc_feature (1)..(427): Homolog of NCBI NO: 11358797 NR Description: RNA helicase RH15 [imported] - Arabidopsis
  misc_feature (1)..(427): Homolog of NCBI NO: 18416493 NR Description: DEAD/DEAH box helicase, putative [Arabidopsis
  misc_feature (1)..(427): Homolog of NCBI NO: 18416486 NR Description: DEAD/DEAH box helicase, putative [Arabidopsis
  misc_feature (1)..(424): Homolog of NCBI NO: 8953382 NR Description: DEAD BOX RNA helicase RH15 [Arabidopsis thaliana]
  misc_feature (1)..(424): Homolog of NCBI NO: 8953379 NR Description: DEAD BOX RNA helicase RH15-like protein
  misc_feature (84)..(427): Homolog of NCBI NO: 30683509 NR Description: DEAD/DEAH box helicase, putative [Arabidopsis
  misc_feature (11)..(425): Homolog of NCBI NO: 16758334 NR Description: nuclear RNA helicase, DECD variant of DEAD box
  misc_feature (1)..(424): Homolog of NCBI NO: 8953379 NR Description: DEAD BOX RNA helicase RH15-like protein
  misc_feature (1)..(424): Homolog of NCBI NO: 8953382 NR Description: DEAD BOX RNA helicase RH15 [Arabidopsis thaliana]
  misc_feature (1)..(427): Homolog of NCBI NO: 18416486 NR Description: DEAD/DEAH box helicase, putative [Arabidopsis
  misc_feature (1)..(427): Homolog of NCBI NO: 18416493 NR Description: DEAD/DEAH box helicase, putative [Arabidopsis
  misc_feature (1)..(427): Homolog of NCBI NO: 11358797 NR Description: RNA helicase RH15 [imported] - Arabidopsis
MGDARDNEAYEEELLDYEEEDEKVPDSGNKVNGEAVKKGYVGIHSSGFRDFLLKPELLRAIVDSGFEHPSEVQHECIPQAILGMDVICQAKSGMGKTAVFVLSTLQQIEPSPGQVSALVLCHTRELAYQICNEFVRFSTYLPDTKVSVFYGGVNIKIHKDLLKNECPHIVVGTPGRVLALAREKDLSLKNVRHFILDECDKMLESLDMRRDVQEIFKMTPHDKQVMMFSATLSKEIRPVCKKFMQDPMEIYVDDEAKLTLHGLVQHYIKLSEMEKNRKLNDLLDALDFNQVVIFVKSVSRAAELNKLLVECNFPSICIHSGMSQEERLTRYKSFKEGHKRILVATDLVGRGIDIERVNIVINYDMPDSADTYLHRVGRAGRFGTKGLAITFVASASDSEVLNQVQERFEVDIKELPEQIDTSTYMPS

SEQ ID NO: 20811 - protein, 344 aa, Arabidopsis thaliana
  peptide (1)..(344): Ceres Seq. ID no. 13509185
  misc_feature (1)..(183): Pfam Name: DEAD/DEAH box helicase Pfam Description: DEAD/DEAH box helicase
  misc_feature (1)..(183): Pfam Name: DEAD/DEAH box helicase Pfam Description: DEAD/DEAH box helicase
  misc_feature (1)..(163): Homolog of NCBI NO: 21040373 NR Description: DEAD/H (Asp-Glu-Ala-Asp/His) box polypeptide 39
  misc_feature (1)..(342): Homolog of NCBI NO: 16758334 NR Description: nuclear RNA helicase, DECD variant of DEAD box
  misc_feature (1)..(342): Homolog of NCBI NO: 28278325 NR Description: Unknown (protein for MGC:55433) [Danio rerio]
  misc_feature (1)..(344): Homolog of NCBI NO: 30683509 NR Description: DEAD/DEAH box helicase, putative [Arabidopsis
  misc_feature (1)..(344): Homolog of NCBI NO: 34913862 NR Description: putative DEAD BOX RNA helicase
  misc_feature (1)..(163): Homolog of NCBI NO: 21040373 NR Description: DEAD/H (Asp-Glu-Ala-Asp/His) box polypeptide 39
  misc_feature (1)..(342): Homolog of NCBI NO: 28278325 NR Description: Unknown (protein for MGC:55433) [Danio rerio]
  misc_feature (1)..(344): Homolog of NCBI NO: 34913862 NR Description: putative DEAD BOX RNA helicase
  misc_feature (1)..(344): Homolog of NCBI NO: 11358797 NR Description: RNA helicase RH15 [imported] - Arabidopsis
  misc_feature (1)..(344): Homolog of NCBI NO: 18416493 NR Description: DEAD/DEAH box helicase, putative [Arabidopsis
  misc_feature (1)..(344): Homolog of NCBI NO: 18416486 NR Description: DEAD/DEAH box helicase, putative [Arabidopsis
  misc_feature (1)..(341): Homolog of NCBI NO: 8953382 NR Description: DEAD BOX RNA helicase RH15 [Arabidopsis thaliana]
  misc_feature (1)..(341): Homolog of NCBI NO: 8953379 NR Description: DEAD BOX RNA helicase RH15-like protein
  misc_feature (1)..(344): Homolog of NCBI NO: 30683509 NR Description: DEAD/DEAH box helicase, putative [Arabidopsis
  misc_feature (1)..(342): Homolog of NCBI NO: 16758334 NR Description: nuclear RNA helicase, DECD variant of DEAD box
  misc_feature (1)..(341): Homolog of NCBI NO: 8953379 NR Description: DEAD BOX RNA helicase RH15-like protein
  misc_feature (1)..(341): Homolog of NCBI NO: 8953382 NR Description: DEAD BOX RNA helicase RH15 [Arabidopsis thaliana]
  misc_feature (1)..(344): Homolog of NCBI NO: 18416486 NR Description: DEAD/DEAH box helicase, putative [Arabidopsis
  misc_feature (1)..(344): Homolog of NCBI NO: 18416493 NR Description: DEAD/DEAH box helicase, putative [Arabidopsis
  misc_feature (1)..(344): Homolog of NCBI NO: 11358797 NR Description: RNA helicase RH15 [imported] - Arabidopsis
MDVICQAKSGMGKTAVFVLSTLQQIEPSPGQVSALVLCHTRELAYQICNEFVRFSTYLPDTKVSVFYGGVNIKIHKDLLKNECPHIVVGTPGRVLALAREKDLSLKNVRHFILDECDKMLESLDMRRDVQEIFKMTPHDKQVMMFSATLSKEIRPVCKKFMQDPMEIYVDDEAKLTLHGLVQHYIKLSEMEKNRKLNDLLDALDFNQVVIFVKSVSRAAELNKLLVECNFPSICIHSGMSQEERLTRYKSFKEGHKRILVATDLVGRGIDIERVNIVINYDMPDSADTYLHRVGRAGRFGTKGLAITFVASASDSEVLNQVQERFEVDIKELPEQIDTSTYMPS

SEQ ID NO: 20812 - DNA, 2516 bp, Arabidopsis thaliana
  misc_feature (1)..(2516): Ceres Seq. ID no. 13491793
  misc_feature: MA Experiment ID: 108434 Result: Down-regulated in Transcription
  misc_feature: MA Experiment 108434 PARAMETER Experiment Name: At_Root_Tips_cDNA_P Parameter: Tissue Value: Root Tips
  misc_feature: MA Experiment ID: 108462 Result: Up-regulated in Transcription
  misc_feature: MA Experiment 108462 PARAMETER Experiment Name: At_Germinating_Seeds_cDNA_P Parameter: Age (day) Value: 2 vs. 0
  misc_feature: MA Experiment 108462 PARAMETER Experiment Name: At_Germinating_Seeds_cDNA_P Parameter: Tissue Value: Germinating Seeds
  misc_feature: MA Experiment ID: 108463 Result: Up-regulated in Transcription
  misc_feature: MA Experiment 108463 PARAMETER Experiment Name: At_Germinating_Seeds_cDNA_P Parameter: Age (day) Value: 3 vs. 0
  misc_feature: MA Experiment 108463 PARAMETER Experiment Name: At_Germinating_Seeds_cDNA_P Parameter: Tissue Value: Germinating Seeds
  misc_feature: MA Experiment ID: 108464 Result: Up-regulated in Transcription
  misc_feature: MA Experiment 108464 PARAMETER Experiment Name: At_Germinating_Seeds_cDNA_P Parameter: Age (day) Value: 4 vs. 0
  misc_feature: MA Experiment 108464 PARAMETER Experiment Name: At_Germinating_Seeds_cDNA_P Parameter: Tissue Value: Germinating Seeds
  misc_feature: MA Experiment ID: 108473 Result: Up-regulated in Transcription
  misc_feature: MA Experiment 108473 PARAMETER Experiment Name: At_Drought_Flowers_cDNA_P Parameter: Timepoint (hr) Value: 7 d
  misc_feature: MA Experiment 108473 PARAMETER Experiment Name: At_Drought_Flowers_cDNA_P Parameter: Tissue Value: Flower
  misc_feature: MA Experiment 108473 PARAMETER Experiment Name: At_Drought_Flowers_cDNA_P Parameter: Treatment Value: Drought vs. No Drought
  misc_feature: MA Experiment ID: 108488 Result: Down-regulated in Transcription
  misc_feature: MA Experiment ID: 108561 Result: Up-regulated in Transcription
  misc_feature: MA Experiment 108561 PARAMETER Experiment Name: At_100uM_ABA_cDNA_P Parameter: Timepoint (hr) Value: 6
  misc_feature: MA Experiment 108561 PARAMETER Experiment Name: At_100uM_ABA_cDNA_P Parameter: Tissue Value: Aerial
  misc_feature: MA Experiment 108561 PARAMETER Experiment Name: At_100uM_ABA_cDNA_P Parameter: Treatment Value: 100uM ABA vs. No Treatment
  misc_feature: MA Experiment ID: 108572 Result: Up-regulated in Transcription
  misc_feature: MA Experiment 108572 PARAMETER Experiment Name: At_Drought_cDNA_P Parameter: Timepoint (hr) Value: 1
  misc_feature: MA Experiment 108572 PARAMETER Experiment Name: At_Drought_cDNA_P Parameter: Tissue Value: Aerial
  misc_feature: MA Experiment 108572 PARAMETER Experiment Name: At_Drought_cDNA_P Parameter: Treatment Value: Drought vs. No Drought
  misc_feature: MA Experiment ID: 108573 Result: Up-regulated in Transcription
  misc_feature: MA Experiment 108573 PARAMETER Experiment Name: At_Drought_cDNA_P Parameter: Timepoint (hr) Value: 6
  misc_feature: MA Experiment 108573 PARAMETER Experiment Name: At_Drought_cDNA_P Parameter: Tissue Value: Aerial
  misc_feature: MA Experiment 108573 PARAMETER Experiment Name: At_Drought_cDNA_P Parameter: Treatment Value: Drought vs. No Drought
  misc_feature: MA Experiment ID: 108579 Result: Up-regulated in Transcription
  misc_feature: MA Experiment 108579 PARAMETER Experiment Name: At_4deg_Cold_cDNA_P Parameter: Temperature (deg C) Value: 4 vs. 22
  misc_feature: MA Experiment 108579 PARAMETER Experiment Name: At_4deg_Cold_cDNA_P Parameter: Timepoint (hr) Value: 6
  misc_feature: MA Experiment 108579 PARAMETER Experiment Name: At_4deg_Cold_cDNA_P Parameter: Tissue Value: Aerial
  misc_feature: MA Experiment ID: 108594 Result: Down-regulated in Transcription
  misc_feature: MA Experiment 108594 PARAMETER Experiment Name: At_Ler-rhl_Root_cDNA_P Parameter: Plant Line Value: null
  misc_feature: MA Experiment ID: 108605 Result: Up-regulated in Transcription
  misc_feature: MA Experiment 108605 PARAMETER Experiment Name: At_100uM_ABA_cDNA_P Parameter: Timepoint (hr) Value: 6
  misc_feature: MA Experiment 108605 PARAMETER Experiment Name: At_100uM_ABA_cDNA_P Parameter: Tissue Value: Aerial
  misc_feature: MA Experiment 108605 PARAMETER Experiment Name: At_100uM_ABA_cDNA_P Parameter: Treatment Value: 100uM ABA vs. No Treatment
  misc_feature: MA Experiment ID: 108607 Result: Up-regulated in Transcription
  misc_feature: MA Experiment 108607 PARAMETER Experiment Name: At_100uM_ABA_cDNA_P Parameter: Timepoint (hr) Value: 4
  misc_feature: MA Experiment 108607 PARAMETER Experiment Name: At_100uM_ABA_cDNA_P Parameter: Tissue Value: Aerial
  misc_feature: MA Experiment 108607 PARAMETER Experiment Name: At_100uM_ABA_cDNA_P Parameter: Treatment Value: 100uM ABA vs. No Treatment
  misc_feature: MA Experiment ID: 108608 Result: Up-regulated in Transcription
  misc_feature: MA Experiment 108608 PARAMETER Experiment Name: At_100uM_ABA_cDNA_P Parameter: Timepoint (hr) Value: 1
  misc_feature: MA Experiment 108608 PARAMETER Experiment Name: At_100uM_ABA_cDNA_P Parameter: Tissue Value: Aerial
  misc_feature: MA Experiment 108608 PARAMETER Experiment Name: At_100uM_ABA_cDNA_P Parameter: Treatment Value: 100uM ABA vs. No Treatment
  misc_feature: MA Experiment ID: 108609 Result: Up-regulated in Transcription
  misc_feature: MA Experiment 108609 PARAMETER Experiment Name: At_100uM_ABA_cDNA_P Parameter: Timepoint (hr) Value: 24
  misc_feature: MA Experiment 108609 PARAMETER Experiment Name: At_100uM_ABA_cDNA_P Parameter: Tissue Value: Aerial
  misc_feature: MA Experiment 108609 PARAMETER Experiment Name: At_100uM_ABA_cDNA_P Parameter: Treatment Value: 100uM ABA vs. No Treatment
  misc_feature: MA Experiment ID: 108668 Result: Up-regulated in Transcription
  misc_feature: MA Experiment 108668 PARAMETER Experiment Name: At_2mM_SA_cDNA_P Parameter: Plant Line Value: WS
  misc_feature: MA Experiment 108668 PARAMETER Experiment Name: At_2mM_SA_cDNA_P Parameter: Timepoint (hr) Value: 6
  misc_feature: MA Experiment 108668 PARAMETER Experiment Name: At_2mM_SA_cDNA_P Parameter: Treatment Value: 2mM SA vs. No Treatment
  misc_feature: MA Experiment ID: 20000070 Result: Up-regulated in Transcription
  misc_feature: MA Experiment 20000070 PARAMETER Experiment Name: At_100uM_ABA_Mutants_cDNA_P Parameter: Plant Line Value: CS24
  misc_feature: MA Experiment 20000070 PARAMETER Experiment Name: At_100uM_ABA_Mutants_cDNA_P Parameter: Timepoint (hr) Value: 6
  misc_feature: MA Experiment 20000070 PARAMETER Experiment Name: At_100uM_ABA_Mutants_cDNA_P Parameter: Tissue Value: Aerial
  misc_feature: MA Experiment 20000070 PARAMETER Experiment Name: At_100uM_ABA_Mutants_cDNA_P Parameter: Treatment Value: 100uM ABA vs. No Treatment
  misc_feature: MA Experiment ID: 20000071 Result: Up-regulated in Transcription
  misc_feature: MA Experiment 20000071 PARAMETER Experiment Name: At_100uM_ABA_Mutants_cDNA_P Parameter: Plant Line Value: CS8104
  misc_feature: MA Experiment 20000071 PARAMETER Experiment Name: At_100uM_ABA_Mutants_cDNA_P Parameter: Timepoint (hr) Value: 6
  misc_feature: MA Experiment 20000071 PARAMETER Experiment Name: At_100uM_ABA_Mutants_cDNA_P Parameter: Tissue Value: Aerial
  misc_feature: MA Experiment 20000071 PARAMETER Experiment Name: At_100uM_ABA_Mutants_cDNA_P Parameter: Treatment Value: 100uM ABA vs. No Treatment
  misc_feature: MA Experiment ID: 20000090 Result: Down-regulated in Transcription
  misc_feature: MA Experiment ID: 20000113 Result: Up-regulated in Transcription
  misc_feature: MA Experiment 20000113 PARAMETER Experiment Name: At_42deg_Heat_cDNA_P Parameter: Temperature (deg C) Value: 42 vs. 22
  misc_feature: MA Experiment 20000113 PARAMETER Experiment Name: At_42deg_Heat_cDNA_P Parameter: Timepoint (hr) Value: 8
  misc_feature: MA Experiment 20000113 PARAMETER Experiment Name: At_42deg_Heat_cDNA_P Parameter: Tissue Value: Aerial
  misc_feature: MA Experiment ID: 20000117 Result: Up-regulated in Transcription
  misc_feature: MA Experiment 20000117 PARAMETER Experiment Name: At_100uM_ABA_Mutants_cDNA_P Parameter: Plant Line Value: Columbia
  misc_feature: MA Experiment 20000117 PARAMETER Experiment Name: At_100uM_ABA_Mutants_cDNA_P Parameter: Timepoint (hr) Value: 6
  misc_feature: MA Experiment 20000117 PARAMETER Experiment Name: At_100uM_ABA_Mutants_cDNA_P Parameter: Tissue Value: Aerial
  misc_feature: MA Experiment 20000117 PARAMETER Experiment Name: At_100uM_ABA_Mutants_cDNA_P Parameter: Treatment Value: 100uM ABA vs. No Treatment
  misc_feature: MA Experiment ID: 20000166 Result: Up-regulated in Transcription
  misc_feature: MA Experiment 20000166 PARAMETER Experiment Name: At_100uM_ABA_P Parameter: Age (day) Value: 14
  misc_feature: MA Experiment 20000166 PARAMETER Experiment Name: At_100uM_ABA_P Parameter: Organism Value: A. thaliana
  misc_feature: MA Experiment 20000166 PARAMETER Experiment Name: At_100uM_ABA_P Parameter: Plant Line Value: WS
  misc_feature: MA Experiment 20000166 PARAMETER Experiment Name: At_100uM_ABA_P Parameter: Timepoint (hr) Value: 1
  misc_feature: MA Experiment 20000166 PARAMETER Experiment Name: At_100uM_ABA_P Parameter: Tissue Value: Aerial
  misc_feature: MA Experiment 20000166 PARAMETER Experiment Name: At_100uM_ABA_P Parameter: Treatment Value: 100uM ABA vs. No Treatment
  misc_feature: MA Experiment ID: 20000173 Result: Up-regulated in Transcription
  misc_feature: MA Experiment 20000173 PARAMETER Experiment Name: At_42deg_Heat_P Parameter: Age (day) Value: 14
  misc_feature: MA Experiment 20000173 PARAMETER Experiment Name: At_42deg_Heat_P Parameter: Organism Value: A. thaliana
  misc_feature: MA Experiment 20000173 PARAMETER Experiment Name: At_42deg_Heat_P Parameter: Plant Line Value: WS
  misc_feature: MA Experiment 20000173 PARAMETER Experiment Name: At_42deg_Heat_P Parameter: Temperature (deg C) Value: 42 vs. 22
  misc_feature: MA Experiment 20000173 PARAMETER Experiment Name: At_42deg_Heat_P Parameter: Timepoint (hr) Value: 6
  misc_feature: MA Experiment 20000173 PARAMETER Experiment Name: At_42deg_Heat_P Parameter: Tissue Value: Aerial
  misc_feature: MA Experiment ID: 20000180 Result: Up-regulated in Transcription
  misc_feature: MA Experiment 20000180 PARAMETER Experiment Name: At_Germinating_Seeds_P Parameter: Age (hr) Value: 24 vs. 0
  misc_feature: MA Experiment 20000180 PARAMETER Experiment Name: At_Germinating_Seeds_P Parameter: Tissue Value: Germinating Seeds
  misc_feature: MA Experiment ID: 20000182 Result: Up-regulated in Transcription
  misc_feature: MA Experiment 20000182 PARAMETER Experiment Name: At_2mM_SA_P Parameter: Age (day) Value: 14
  misc_feature: MA Experiment 20000182 PARAMETER Experiment Name: At_2mM_SA_P Parameter: Organism Value: A. thaliana
  misc_feature: MA Experiment 20000182 PARAMETER Experiment Name: At_2mM_SA_P Parameter: Plant Line Value: WS
  misc_feature: MA Experiment 20000182 PARAMETER Experiment Name: At_2mM_SA_P Parameter: Timepoint (hr) Value: 6
  misc_feature: MA Experiment 20000182 PARAMETER Experiment Name: At_2mM_SA_P Parameter: Tissue Value: Aerial
  misc_feature: MA Experiment 20000182 PARAMETER Experiment Name: At_2mM_SA_P Parameter: Treatment Value: 2mM SA vs. No Treatment
  misc_feature: MA Experiment ID: 20000185 Result: Up-regulated in Transcription
  misc_feature: MA Experiment 20000185 PARAMETER Experiment Name: At_Roots__P Parameter: Age (day) Value: 7 vs. 21
  misc_feature: MA Experiment 20000185 PARAMETER Experiment Name: At_Roots__P Parameter: Organism Value: A. thaliana
  misc_feature: MA Experiment 20000185 PARAMETER Experiment Name: At_Roots__P Parameter: Tissue Value: Roots vs. Whole Plant
  misc_feature: MA Experiment ID: 20000224 Result: Up-regulated in Transcription
  misc_feature: MA Experiment ID: 20000234 Result: Down-regulated in Transcription
  misc_feature: MA Experiment 20000234 PARAMETER Experiment Name: At_Siliques_P Parameter: Age (day) Value: 21
  misc_feature: MA Experiment 20000234 PARAMETER Experiment Name: At_Siliques_P Parameter: Organism Value: A. thaliana
  misc_feature: MA Experiment 20000234 PARAMETER Experiment Name: At_Siliques_P Parameter: Plant Line Value: WS
  misc_feature: MA Experiment 20000234 PARAMETER Experiment Name: At_Siliques_P Parameter: Tissue Value: Less Than 5mm Siliques vs. Whole Plant
  misc_feature: MA Experiment ID: 20000235 Result: Down-regulated in Transcription
  misc_feature: MA Experiment 20000235 PARAMETER Experiment Name: At_Siliques_P Parameter: Age (day) Value: 21
  misc_feature: MA Experiment 20000235 PARAMETER Experiment Name: At_Siliques_P Parameter: Organism Value: A. thaliana
  misc_feature: MA Experiment 20000235 PARAMETER Experiment Name: At_Siliques_P Parameter: Plant Line Value: WS
  misc_feature: MA Experiment 20000235 PARAMETER Experiment Name: At_Siliques_P Parameter: Tissue Value: 5-10mm Siliques vs. Whole Plant
  misc_feature: MA Experiment ID: 20000267 Result: Up-regulated in Transcription
  misc_feature: MA Experiment 20000267 PARAMETER Experiment Name: At_Drought_P Parameter: Age (day) Value: 7
  misc_feature: MA Experiment 20000267 PARAMETER Experiment Name: At_Drought_P Parameter: Organism Value: A. thaliana
  misc_feature: MA Experiment 20000267 PARAMETER Experiment Name: At_Drought_P Parameter: Plant Line Value: WS
  misc_feature: MA Experiment 20000267 PARAMETER Experiment Name: At_Drought_P Parameter: Timepoint (hr) Value: 6
  misc_feature: MA Experiment 20000267 PARAMETER Experiment Name: At_Drought_P Parameter: Tissue Value: Whole Plant
  misc_feature: MA Experiment 20000267 PARAMETER Experiment Name: At_Drought_P Parameter: Treatment Value: Drought vs. No Drought
  misc_feature: MA Experiment ID: 20000268 Result: Up-regulated in Transcription
  misc_feature: MA Experiment 20000268 PARAMETER Experiment Name: At_100mM_NaCl__P Parameter: Age (day) Value: 14
  misc_feature: MA Experiment 20000268 PARAMETER Experiment Name: At_100mM_NaCl__P Parameter: Organism Value: A. thaliana
  misc_feature: MA Experiment 20000268 PARAMETER Experiment Name: At_100mM_NaCl__P Parameter: Plant Line Value: WS
  misc_feature: MA Experiment 20000268 PARAMETER Experiment Name: At_100mM_NaCl__P Parameter: Timepoint (hr) Value: 6
  misc_feature: MA Experiment 20000268 PARAMETER Experiment Name: At_100mM_NaCl__P Parameter: Tissue Value: Whole Plant
  misc_feature: MA Experiment 20000268 PARAMETER Experiment Name: At_100mM_NaCl__P Parameter: Treatment Value: 100mM NaCl vs. No Treatment
  misc_feature: MA Experiment ID: 20000436 Result: Up-regulated in Transcription
  misc_feature: MA Experiment 20000436 PARAMETER Experiment Name: At_Drought_P Parameter: Age (day) Value: 7
  misc_feature: MA Experiment 20000436 PARAMETER Experiment Name: At_Drought_P Parameter: Organism Value: A. thaliana
  misc_feature: MA Experiment 20000436 PARAMETER Experiment Name: At_Drought_P Parameter: Plant Line Value: WS
  misc_feature: MA Experiment 20000436 PARAMETER Experiment Name: At_Drought_P Parameter: Timepoint (hr) Value: 12
  misc_feature: MA Experiment 20000436 PARAMETER Experiment Name: At_Drought_P Parameter: Tissue Value: Whole Plant
  misc_feature: MA Experiment 20000436 PARAMETER Experiment Name: At_Drought_P Parameter: Treatment Value: Drought vs. No Drought
  misc_feature: MA Experiment ID: 20000437 Result: Up-regulated in Transcription
  misc_feature: MA Experiment 20000437 PARAMETER Experiment Name: At_Drought_P Parameter: Age (day) Value: 8
  misc_feature: MA Experiment 20000437 PARAMETER Experiment Name: At_Drought_P Parameter: Organism Value: A. thaliana
  misc_feature: MA Experiment 20000437 PARAMETER Experiment Name: At_Drought_P Parameter: Plant Line Value: WS
  misc_feature: MA Experiment 20000437 PARAMETER Experiment Name: At_Drought_P Parameter: Timepoint (hr) Value: 24
  misc_feature: MA Experiment 20000437 PARAMETER Experiment Name: At_Drought_P Parameter: Tissue Value: Whole Plant
  misc_feature: MA Experiment 20000437 PARAMETER Experiment Name: At_Drought_P Parameter: Treatment Value: Drought vs. No Drought
  misc_feature: MA Experiment ID: 20000438 Result: Up-regulated in Transcription
  misc_feature: MA Experiment 20000438 PARAMETER Experiment Name: At_Shoots__P Parameter: Age (day) Value: 14
  misc_feature: MA Experiment 20000438 PARAMETER Experiment Name: At_Shoots__P Parameter: Tissue Value: Shoots vs. Whole Plant
  misc_feature: MA Experiment ID: 20000439 Result: Up-regulated in Transcription
  misc_feature: MA Experiment 20000439 PARAMETER Experiment Name: At_Roots__P Parameter: Age (day) Value: 14 vs. 21
  misc_feature: MA Experiment 20000439 PARAMETER Experiment Name: At_Roots__P Parameter: Organism Value: A. thaliana
  misc_feature: MA Experiment 20000439 PARAMETER Experiment Name: At_Roots__P Parameter: Tissue Value: Roots vs. Whole Plant
  misc_feature: MA Experiment ID: 20000445 Result: Up-regulated in Transcription
  misc_feature: MA Experiment 20000445 PARAMETER Experiment Name: At_100uM_NAA__P Parameter: Age (day) Value: 14
  misc_feature: MA Experiment 20000445 PARAMETER Experiment Name: At_100uM_NAA__P Parameter: Organism Value: A. thaliana
  misc_feature: MA Experiment 20000445 PARAMETER Experiment Name: At_100uM_NAA__P Parameter: Plant Line Value: WS
  misc_feature: MA Experiment 20000445 PARAMETER Experiment Name: At_100uM_NAA__P Parameter: Timepoint (hr) Value: 6
  misc_feature: MA Experiment 20000445 PARAMETER Experiment Name: At_100uM_NAA__P Parameter: Tissue Value: Aerial
  misc_feature: MA Experiment 20000445 PARAMETER Experiment Name: At_100uM_NAA__P Parameter: Treatment Value: 100uM NAA vs. No Treatment
  misc_feature: MA Experiment ID: 20000453 Result: Up-regulated in Transcription
  misc_feature: MA Experiment 20000453 PARAMETER Experiment Name: At_100uM_ABA_P Parameter: Age (day) Value: 15
  misc_feature: MA Experiment 20000453 PARAMETER Experiment Name: At_100uM_ABA_P Parameter: Organism Value: A. thaliana
  misc_feature: MA Experiment 20000453 PARAMETER Experiment Name: At_100uM_ABA_P Parameter: Plant Line Value: WS
  misc_feature: MA Experiment 20000453 PARAMETER Experiment Name: At_100uM_ABA_P Parameter: Timepoint (hr) Value: 24
  misc_feature: MA Experiment 20000453 PARAMETER Experiment Name: At_100uM_ABA_P Parameter: Tissue Value: Aerial
  misc_feature: MA Experiment 20000453 PARAMETER Experiment Name: At_100uM_ABA_P Parameter: Treatment Value: 100uM ABA vs. No Treatment
  misc_feature: MA Experiment ID: 20000573 Result: Down-regulated in Transcription
  misc_feature: MA Experiment 20000573 PARAMETER Experiment Name: At_100uM_ABA_Mutants__P Parameter: Organism Value: A. thaliana
  misc_feature: MA Experiment 20000573 PARAMETER Experiment Name: At_100uM_ABA_Mutants__P Parameter: Plant Line Value: CS22 vs. Ler wt
  misc_feature: MA Experiment 20000573 PARAMETER Experiment Name: At_100uM_ABA_Mutants__P Parameter: Timepoint (hr) Value: N/A
  misc_feature: MA Experiment 20000573 PARAMETER Experiment Name: At_100uM_ABA_Mutants__P Parameter: Tissue Value: Whole Plant
  misc_feature: MA Experiment 20000573 PARAMETER Experiment Name: At_100uM_ABA_Mutants__P Parameter: Treatment Value: None
  misc_feature: MA Experiment ID: 20000709 Result: Up-regulated in Transcription
  misc_feature: MA Experiment 20000709 PARAMETER Experiment Name: At_15mM_NH4NO3_L-to-H_P Parameter: Age (hr) Value: 14
  misc_feature: MA Experiment 20000709 PARAMETER Experiment Name: At_15mM_NH4NO3_L-to-H_P Parameter: Organism Value: A. thaliana
  misc_feature: MA Experiment 20000709 PARAMETER Experiment Name: At_15mM_NH4NO3_L-to-H_P Parameter: Plant Line Value: WS
  misc_feature: MA Experiment 20000709 PARAMETER Experiment Name: At_15mM_NH4NO3_L-to-H_P Parameter: Timepoint (hr) Value: 4
  misc_feature: MA Experiment 20000709 PARAMETER Experiment Name: At_15mM_NH4NO3_L-to-H_P Parameter: Tissue Value: Aerial
  misc_feature: MA Experiment 20000709 PARAMETER Experiment Name: At_15mM_NH4NO3_L-to-H_P Parameter: Treatment Value: 15mM NH4NO3 vs. 30mM Mannitol
  misc_feature: MA Experiment ID: 20000794 Result: Up-regulated in Transcription
  misc_feature: MA Experiment 20000794 PARAMETER Experiment Name: At_Petals_P Parameter: Age (day) Value: 23-25 days
  misc_feature: MA Experiment 20000794 PARAMETER Experiment Name: At_Petals_P Parameter: Plant Line Value: WS
  misc_feature: MA Experiment 20000794 PARAMETER Experiment Name: At_Petals_P Parameter: Tissue Value: Petals vs. Whole plant
  misc_feature: MA Experiment ID: 20001247 Result: Up-regulated in Transcription
  misc_feature: MA Experiment 20001247 PARAMETER Experiment Name: At_Far-red-induction_P Parameter: Age (day) Value: 7
  misc_feature: MA Experiment 20001247 PARAMETER Experiment Name: At_Far-red-induction_P Parameter: Light Value: Far-red vs. White
  misc_feature: MA Experiment 20001247 PARAMETER Experiment Name: At_Far-red-induction_P Parameter: Organism Value: A. thaliana
  misc_feature: MA Experiment 20001247 PARAMETER Experiment Name: At_Far-red-induction_P Parameter: Plant Line Value: Columbia
  misc_feature: MA Experiment 20001247 PARAMETER Experiment Name: At_Far-red-induction_P Parameter: Timepoint (hr) Value: 1
  misc_feature: MA Experiment 20001247 PARAMETER Experiment Name: At_Far-red-induction_P Parameter: Tissue Value: Whole Plant
  misc_feature: MA Experiment ID: 20001248 Result: Down-regulated in Transcription
  misc_feature: MA Experiment 20001248 PARAMETER Experiment Name: At_Far-red-induction_P Parameter: Age (day) Value: 7
  misc_feature: MA Experiment 20001248 PARAMETER Experiment Name: At_Far-red-induction_P Parameter: Light Value: Far-red vs. White
  misc_feature: MA Experiment 20001248 PARAMETER Experiment Name: At_Far-red-induction_P Parameter: Organism Value: A. thaliana
  misc_feature: MA Experiment 20001248 PARAMETER Experiment Name: At_Far-red-induction_P Parameter: Plant Line Value: Columbia
  misc_feature: MA Experiment 20001248 PARAMETER Experiment Name: At_Far-red-induction_P Parameter: Timepoint (hr) Value: 4
  misc_feature: MA Experiment 20001248 PARAMETER Experiment Name: At_Far-red-induction_P Parameter: Tissue Value: Whole Plant
  misc_feature: MA Experiment ID: 20001451 Result: Up-regulated in Transcription
  misc_feature: MA Experiment 20001451 PARAMETER Experiment Name: At_Far-red-induction_P Parameter: Age (day) Value: 7
  misc_feature: MA Experiment 20001451 PARAMETER Experiment Name: At_Far-red-induction_P Parameter: Light Value: Far-red vs. White
  misc_feature: MA Experiment 20001451 PARAMETER Experiment Name: At_Far-red-induction_P Parameter: Organism Value: A. thaliana
  misc_feature: MA Experiment 20001451 PARAMETER Experiment Name: At_Far-red-induction_P Parameter: Plant Line Value: Columbia
  misc_feature: MA Experiment 20001451 PARAMETER Experiment Name: At_Far-red-induction_P Parameter: Timepoint (hr) Value: 24
  misc_feature: MA Experiment 20001451 PARAMETER Experiment Name: At_Far-red-induction_P Parameter: Tissue Value: Whole Plant
  misc_feature: MA Experiment ID: 20001554 Result: Up-regulated in Transcription
  misc_feature: MA Experiment 20001554 PARAMETER Experiment Name: At_Drought_Soil_Dry_P Parameter: Age (day) Value: 21
  misc_feature: MA Experiment 20001554 PARAMETER Experiment Name: At_Drought_Soil_Dry_P Parameter: Organism Value: A. thaliana
  misc_feature: MA Experiment 20001554 PARAMETER Experiment Name: At_Drought_Soil_Dry_P Parameter: Plant Line Value: WS
  misc_feature: MA Experiment 20001554 PARAMETER Experiment Name: At_Drought_Soil_Dry_P Parameter: Post Timepoint (hr) Value: None
  misc_feature: MA Experiment 20001554 PARAMETER Experiment Name: At_Drought_Soil_Dry_P Parameter: Post-Treatment Value: None
  misc_feature: MA Experiment 20001554 PARAMETER Experiment Name: At_Drought_Soil_Dry_P Parameter: Timepoint (day) Value: 7
  misc_feature: MA Experiment 20001554 PARAMETER Experiment Name: At_Drought_Soil_Dry_P Parameter: Treatment Value: Drought vs. No Drought
  misc_feature: MA Experiment ID: 20001555 Result: Up-regulated in Transcription
  misc_feature: MA Experiment 20001555 PARAMETER Experiment Name: At_Drought_Soil_Dry_P Parameter: Age (day) Value: 24
  misc_feature: MA Experiment 20001555 PARAMETER Experiment Name: At_Drought_Soil_Dry_P Parameter: Organism Value: A. thaliana
  misc_feature: MA Experiment 20001555 PARAMETER Experiment Name: At_Drought_Soil_Dry_P Parameter: Plant Line Value: WS
  misc_feature: MA Experiment 20001555 PARAMETER Experiment Name: At_Drought_Soil_Dry_P Parameter: Post Timepoint (hr) Value: None
  misc_feature: MA Experiment 20001555 PARAMETER Experiment Name: At_Drought_Soil_Dry_P Parameter: Post-Treatment Value: None
  misc_feature: MA Experiment 20001555 PARAMETER Experiment Name: At_Drought_Soil_Dry_P Parameter: Timepoint (day) Value: 10
  misc_feature: MA Experiment 20001555 PARAMETER Experiment Name: At_Drought_Soil_Dry_P Parameter: Treatment Value: Drought vs. No Drought
  misc_feature: MA Experiment ID: 20001757 Result: Down-regulated in Transcription
  misc_feature: MA Experiment 20001757 PARAMETER Experiment Name: At_50mM_NH4NO3_L-to-H_P Parameter: Timepoint (hr) Value: 6
  misc_feature: MA Experiment 20001757 PARAMETER Experiment Name: At_50mM_NH4NO3_L-to-H_P Parameter: Tissue Value: Leaf
  misc_feature: MA Experiment 20001757 PARAMETER Experiment Name: At_50mM_NH4NO3_L-to-H_P Parameter: Treatment Value: 50mM NH4NO3 vs 100mM Mannitol
  misc_feature: MA Experiment ID: 20001904 Result: Up-regulated in Transcription
  misc_feature: MA Experiment 20001904 PARAMETER Experiment Name: At_Drought_Reproduction_P Parameter: Age (day) Value: 37
  misc_feature: MA Experiment 20001904 PARAMETER Experiment Name: At_Drought_Reproduction_P Parameter: Organism Value: A. thaliana
  misc_feature: MA Experiment 20001904 PARAMETER Experiment Name: At_Drought_Reproduction_P Parameter: Plant Line Value: WS
  misc_feature: MA Experiment 20001904 PARAMETER Experiment Name: At_Drought_Reproduction_P Parameter: Timepoint (day) Value: 7
  misc_feature: MA Experiment 20001904 PARAMETER Experiment Name: At_Drought_Reproduction_P Parameter: Tissue Value: Rosettes
  misc_feature: MA Experiment 20001904 PARAMETER Experiment Name: At_Drought_Reproduction_P Parameter: Treatment Value: Drought vs. No Drought
  misc_feature: MA Experiment ID: 20001905 Result: Up-regulated in Transcription
  misc_feature: MA Experiment 20001905 PARAMETER Experiment Name: At_Drought_Reproduction_P Parameter: Age (day) Value: 40
  misc_feature: MA Experiment 20001905 PARAMETER Experiment Name: At_Drought_Reproduction_P Parameter: Organism Value: A. thaliana
  misc_feature: MA Experiment 20001905 PARAMETER Experiment Name: At_Drought_Reproduction_P Parameter: Plant Line Value: WS
  misc_feature: MA Experiment 20001905 PARAMETER Experiment Name: At_Drought_Reproduction_P Parameter: Timepoint (day) Value: 10
  misc_feature: MA Experiment 20001905 PARAMETER Experiment Name: At_Drought_Reproduction_P Parameter: Tissue Value: Rosettes
  misc_feature: MA Experiment 20001905 PARAMETER Experiment Name: At_Drought_Reproduction_P Parameter: Treatment Value: Drought vs. No Drought
  misc_feature: MA Experiment ID: 20001906 Result: Up-regulated in Transcription
  misc_feature: MA Experiment 20001906 PARAMETER Experiment Name: At_Drought_Reproduction_P Parameter: Age (day) Value: 35
  misc_feature: MA Experiment 20001906 PARAMETER Experiment Name: At_Drought_Reproduction_P Parameter: Organism Value: A. thaliana
  misc_feature: MA Experiment 20001906 PARAMETER Experiment Name: At_Drought_Reproduction_P Parameter: Plant Line Value: WS
  misc_feature: MA Experiment 20001906 PARAMETER Experiment Name: At_Drought_Reproduction_P Parameter: Timepoint (day) Value: 5
  misc_feature: MA Experiment 20001906 PARAMETER Experiment Name: At_Drought_Reproduction_P Parameter: Tissue Value: Siliques
  misc_feature: MA Experiment 20001906 PARAMETER Experiment Name: At_Drought_Reproduction_P Parameter: Treatment Value: Drought vs. No Drought
  misc_feature: MA Experiment ID: 20001911 Result: Up-regulated in Transcription
  misc_feature: MA Experiment 20001911 PARAMETER Experiment Name: At_Drought_Reproduction_P Parameter: Age (day) Value: 40
  misc_feature: MA Experiment 20001911 PARAMETER Experiment Name: At_Drought_Reproduction_P Parameter: Organism Value: A. thaliana
  misc_feature: MA Experiment 20001911 PARAMETER Experiment Name: At_Drought_Reproduction_P Parameter: Plant Line Value: WS
  misc_feature: MA Experiment 20001911 PARAMETER Experiment Name: At_Drought_Reproduction_P Parameter: Timepoint (day) Value: 10
  misc_feature: MA Experiment 20001911 PARAMETER Experiment Name: At_Drought_Reproduction_P Parameter: Tissue Value: Flowers
  misc_feature: MA Experiment 20001911 PARAMETER Experiment Name: At_Drought_Reproduction_P Parameter: Treatment Value: Drought vs. No Drought
gtttccatagaatatgtattcctatgattttttttttatagaattaattgtgttagttaatgccaaattaagattctcttttttttaaaatcactttttgaagaagcacttacaagagagttgtgttaagaatagattccagatggaaaagttggcaagaaaagatgttttaagtttttgccttgtcgtctaatccaacggtcgatcttcgttcatatcaagaatccttatgacgtggaccattctcttccctccatctgtacctcttcccaacctctattttttaatttacatcgaaaataaataagaaggattgcaaaagaaaaaatagaaaaaaaactctctgttcttctttcttcttcttcttcgtcgtaagccattaccatttcttctccctctctctgtttttctttgttgcgtatctgtacttagttttcaaacataaaaataaaacatatctttagctgatgttgtcttcttcttgataaacagattttctacagctttttttctttctaatttaataattcttgagactttttaaaaccctctgcgaaacagatgattcgagttttggtttcttcatctgtgttttgattttttcgtcttttattcttagtcaaacacataaatttcttttactactcttcgtagatgacttctcatgttccaaaacatcctcgtaaatcctttgaagatatggtgaagaatcttaaagtggatcctcttgctaaggtcactgcctccaccacttccatggtttctgcaaaagagaataagaatcagtcagaggcagagccatcatattatgaaactcttgagacatatcaaggcctgccttgtccttatggtggctactatggatactactatccaggtcttgatggttcagttggagaagcaaaggataatggatactatggttatggaacagaagttcagtacccggtaatgcaaggggaaaatgggtctgtgatctacttgatgccagggtttcagtcttatgatgcaagccaaacttatatgcctataaacccggttggtgtatcgagtcaagcacttcattcgccgatgtatgctgctcagggttattatcagaaccaatttggttatgcagatgtttcatcgcccacatatttatgggaccctgttggagacaggtatgtgtatggtgttgcttcatataccccacccttgaaacagaacatatcttcttcaagtcataaccacaacaattattattcaaagagcaagaactccttcacgggtcacggcatgggagatcgtcctaaaacaccgcgaaaagcatcacagaacagctatgccccacccccactgcttaaccaagaaaaaggtcgcattgcttacccgatggacccagtaaagaaaaagtctggagctttaaatcgggatgaaacagagaaggcgaaagcgaggacaaaagaaaatggtacaagtatgaatgacttagcaaacggtcaagatcatattaccaatggagaatgtgagtcatgttcgttggatgctgaagggaatgaaagaagcaacggtgttggttctgtgatcagaagggatcaatataacctccctagctttcagaccaaatacgaggaagcaatcttttttgtgataaaatcgtatagcgaagacgacatacacaagagcatcaagtacaatgtctggtctagtactctcaatgggaacaagaagttagacagtgcatatcaagaatctcagaagaaggctgcagacaaaagtggaaagtgcccggttttcctgttcttctcggtgaatgcaagtggccaattctgcggtgtagctgagatgattggacgagttgattatgagaaaagcatggagttctggcaacaagataagtggactggctattttccggtgaagtggcacatcatcaaagatgttccaaatccgcaactacgacatatcatactagagaacaatgagaacaagcctgtaaccaatagcagagacacacaagaggtgaggttgcctcaagggaatgaagtgttgaacatctttaagaactacgcagctaagacatctattttagatgattttgatttttatgaaaacagagagaaggttatggtacagaagaagctaaggttccctccggtattaaagaagaaagaagaagacttggttgctgattttaaaacaatggagatgtctaatacagtcgaagagggaaacacagagttaaccgggacagtgagctaactagaagaacatgtagtgtttttggtttggttttttaaggatcaatataaaccgtccgattgtttcggattgctttgattttattacaagcgagatggcttcttcttctattgtttcgttgtatggtgtaatgttgggttttttcttcactttttttttttggttttgtgttgtgtttatgatatgttttgcaatttgtaatcattggcaaaaatgataggtttgattttatagtgatataagaaaaccgggatacaaaaagaaaagaggtttag

SEQ ID NO: 20813 - protein, 528 aa, Arabidopsis thaliana
  peptide (1)..(528): Ceres Seq. ID no. 13491794
  misc_feature (375)..(465): Pfam Name: YT521-B-like family Pfam Description: YT521-B-like family
  misc_feature (292)..(517): Homolog of NCBI NO: 34395023 NR Description: high-glucose-regulated protein 8-like
  misc_feature (91)..(493): Homolog of NCBI NO: 11994550 NR Description: gene_id:MGD8.17~unknown protein [Arabidopsis
  misc_feature (289)..(496): Homolog of NCBI NO: 30682438 NR Description: expressed protein [Arabidopsis thaliana]
  misc_feature (289)..(496): Homolog of NCBI NO: 15795138 NR Description: gb|AAF35955.1~gene_id:MGH6.21~strong similarity
  misc_feature (139)..(502): Homolog of NCBI NO: 25372787 NR Description: Rubisco subunit binding-protein beta subunit
  misc_feature (139)..(516): Homolog of NCBI NO: 18405397 NR Description: expressed protein [Arabidopsis thaliana]
  misc_feature (90)..(493): Homolog of NCBI NO: 30684473 NR Description: expressed protein [Arabidopsis thaliana]
  misc_feature (230)..(489): Homolog of NCBI NO: 34911170 NR Description: B1144G04.32 [Oryza sativa (japonica
  misc_feature (28)..(528): Homolog of NCBI NO: 7487895 NR Description: hypothetical protein YUP8H12R.13 - Arabidopsis
  misc_feature (1)..(528): Homolog of NCBI NO: 18412316 NR Description: expressed protein [Arabidopsis thaliana]
MTSHVPKHPRKSFEDMVKNLKVDPLAKVTASTTSMVSAKENKNQSEAEPSYYETLETYQGLPCPYGGYYGYYYPGLDGSVGEAKDNGYYGYGTEVQYPVMQGENGSVIYLMPGFQSYDASQTYMPINPVGVSSQALHSPMYAAQGYYQNQFGYADVSSPTYLWDPVGDRYVYGVASYTPPLKQNISSSSHNHNNYYSKSKNSFTGHGMGDRPKTPRKASQNSYAPPPLLNQEKGRIAYPMDPVKKKSGALNRDETEKAKARTKENGTSMNDLANGQDHITNGECESCSLDAEGNERSNGVGSVIRRDQYNLPSFQTKYEEAIFFVIKSYSEDDIHKSIKYNVWSSTLNGNKKLDSAYQESQKKAADKSGKCPVFLFFSVNASGQFCGVAEMIGRVDYEKSMEFWQQDKWTGYFPVKWHIIKDVPNPQLRHIILENNENKPVTNSRDTQEVRLPQGNEVLNIFKNYAAKTSILDDFDFYENREKVMVQKKLRFPPVLKKKEEDLVADFKTMEMSNTVEEGNTELTGTVS

SEQ ID NO: 20814 - protein, 513 aa, Arabidopsis thaliana
  peptide (1)..(513): Ceres Seq. ID no. 13491795
  misc_feature (360)..(450): Pfam Name: YT521-B-like family Pfam Description: YT521-B-like family
  misc_feature (277)..(502): Homolog of NCBI NO: 34395023 NR Description: high-glucose-regulated protein 8-like
  misc_feature (76)..(478): Homolog of NCBI NO: 11994550 NR Description: gene_id:MGD8.17~unknown protein [Arabidopsis
  misc_feature (274)..(481): Homolog of NCBI NO: 30682438 NR Description: expressed protein [Arabidopsis thaliana]
  misc_feature (274)..(481): Homolog of NCBI NO: 15795138 NR Description: gb|AAF35955.1~gene_id:MGH6.21~strong similarity
  misc_feature (124)..(487): Homolog of NCBI NO: 25372787 NR Description: Rubisco subunit binding-protein beta subunit
  misc_feature (124)..(501): Homolog of NCBI NO: 18405397 NR Description: expressed protein [Arabidopsis thaliana]
  misc_feature (75)..(478): Homolog of NCBI NO: 30684473 NR Description: expressed protein [Arabidopsis thaliana]
  misc_feature (215)..(474): Homolog of NCBI NO: 34911170 NR Description: B1144G04.32 [Oryza sativa (japonica
  misc_feature (13)..(513): Homolog of NCBI NO: 7487895 NR Description: hypothetical protein YUP8H12R.13 - Arabidopsis
  misc_feature (1)..(513): Homolog of NCBI NO: 18412316 NR Description: expressed protein [Arabidopsis thaliana]
MVKNLKVDPLAKVTASTTSMVSAKENKNQSEAEPSYYETLETYQGLPCPYGGYYGYYYPGLDGSVGEAKDNGYYGYGTEVQYPVMQGENGSVIYLMPGFQSYDASQTYMPINPVGVSSQALHSPMYAAQGYYQNQFGYADVSSPTYLWDPVGDRYVYGVASYTPPLKQNISSSSHNHNNYYSKSKNSFTGHGMGDRPKTPRKASQNSYAPPPLLNQEKGRIAYPMDPVKKKSGALNRDETEKAKARTKENGTSMNDLANGQDHITNGECESCSLDAEGNERSNGVGSVIRRDQYNLPSFQTKYEEAIFFVIKSYSEDDIHKSIKYNVWSSTLNGNKKLDSAYQESQKKAADKSGKCPVFLFFSVNASGQFCGVAEMIGRVDYEKSMEFWQQDKWTGYFPVKWHIIKDVPNPQLRHIILENNENKPVTNSRDTQEVRLPQGNEVLNIFKNYAAKTSILDDFDFYENREKVMVQKKLRFPPVLKKKEEDLVADFKTMEMSNTVEEGNTELTGTVS

SEQ ID NO: 20815 - protein, 494 aa, Arabidopsis thaliana
  peptide (1)..(494): Ceres Seq. ID no. 13491796
  misc_feature (341)..(431): Pfam Name: YT521-B-like family Pfam Description: YT521-B-like family
  misc_feature (258)..(483): Homolog of NCBI NO: 34395023 NR Description: high-glucose-regulated protein 8-like
  misc_feature (57)..(459): Homolog of NCBI NO: 11994550 NR Description: gene_id:MGD8.17~unknown protein [Arabidopsis
  misc_feature (255)..(462): Homolog of NCBI NO: 30682438 NR Description: expressed protein [Arabidopsis thaliana]
  misc_feature (255)..(462): Homolog of NCBI NO: 15795138 NR Description: gb|AAF35955.1~gene_id:MGH6.21~strong similarity
  misc_feature (105)..(468): Homolog of NCBI NO: 25372787 NR Description: Rubisco subunit binding-protein beta subunit
  misc_feature (105)..(482): Homolog of NCBI NO: 18405397 NR Description: expressed protein [Arabidopsis thaliana]
  misc_feature (56)..(459): Homolog of NCBI NO: 30684473 NR Description: expressed protein [Arabidopsis thaliana]
  misc_feature (196)..(455): Homolog of NCBI NO: 34911170 NR Description: B1144G04.32 [Oryza sativa (japonica
  misc_feature (1)..(494): Homolog of NCBI NO: 7487895 NR Description: hypothetical protein YUP8H12R.13 - Arabidopsis
  misc_feature (1)..(494): Homolog of NCBI NO: 18412316 NR Description: expressed protein [Arabidopsis thaliana]
MVSAKENKNQSEAEPSYYETLETYQGLPCPYGGYYGYYYPGLDGSVGEAKDNGYYGYGTEVQYPVMQGENGSVIYLMPGFQSYDASQTYMPINPVGVSSQALHSPMYAAQGYYQNQFGYADVSSPTYLWDPVGDRYVYGVASYTPPLKQNISSSSHNHNNYYSKSKNSFTGHGMGDRPKTPRKASQNSYAPPPLLNQEKGRIAYPMDPVKKKSGALNRDETEKAKARTKENGTSMNDLANGQDHITNGECESCSLDAEGNERSNGVGSVIRRDQYNLPSFQTKYEEAIFFVIKSYSEDDIHKSIKYNVWSSTLNGNKKLDSAYQESQKKAADKSGKCPVFLFFSVNASGQFCGVAEMIGRVDYEKSMEFWQQDKWTGYFPVKWHIIKDVPNPQLRHIILENNENKPVTNSRDTQEVRLPQGNEVLNIFKNYAAKTSILDDFDFYENREKVMVQKKLRFPPVLKKKEEDLVADFKTMEMSNTVEEGNTELTGTVS

SEQ ID NO: 20816 - DNA, 1124 bp, Arabidopsis thaliana
  misc_feature (1)..(1124): Ceres Seq. ID no. 12396129
  misc_feature: MA Experiment ID: 108577 Result: Down-regulated in Transcription
  misc_feature: MA Experiment 108577 PARAMETER Experiment Name: At_42deg_Heat_cDNA_P Parameter: Temperature (deg C) Value: 42 vs. 22
  misc_feature: MA Experiment 108577 PARAMETER Experiment Name: At_42deg_Heat_cDNA_P Parameter: Timepoint (hr) Value: 6
  misc_feature: MA Experiment 108577 PARAMETER Experiment Name: At_42deg_Heat_cDNA_P Parameter: Tissue Value: Aerial
  misc_feature: MA Experiment ID: 20000179 Result: Up-regulated in Transcription
  misc_feature: MA Experiment 20000179 PARAMETER Experiment Name: At_Germinating_Seeds_P Parameter: Age (hr) Value: 6 vs. 0
  misc_feature: MA Experiment 20000179 PARAMETER Experiment Name: At_Germinating_Seeds_P Parameter: Tissue Value: Germinating Seeds
  misc_feature: MA Experiment ID: 20000180 Result: Up-regulated in Transcription
  misc_feature: MA Experiment 20000180 PARAMETER Experiment Name: At_Germinating_Seeds_P Parameter: Age (hr) Value: 24 vs. 0
  misc_feature: MA Experiment 20000180 PARAMETER Experiment Name: At_Germinating_Seeds_P Parameter: Tissue Value: Germinating Seeds
  misc_feature: Phenotype: ROSETTE LEAVES Petiole Length-Long Petioles
  misc_feature: Phenotype: WHOLE PLANT Color-Dark Green
  misc_feature: Phenotype: INFLORESCENCE Other
  misc_feature: Phenotype: WHOLE PLANT Color-Dark Green
  misc_feature: Phenotype: WHOLE PLANT Size-Small
  misc_feature: Phenotype: INFLORESCENCE Flowering Time-Late Flowering
aatttatattgttgagctgtgtgtgtggagatgatgatgatgatgatgataaacccaatagaattttaaaaggataagaatcgcaaagctcatatcacaaaactttgagatctcatttcatctttcttcgattctacctactccgattcaatcgatcttatcgagacatggatgctcgtaagagaggacgccctgaagctgctgcctctcacaactccaatggcggattcaagaggtctaagcaagagatggaatcaatttcaactggtttaggaagcaaatccaagccatgcactaaatttttcagcacttctggatgtccatttggtgacaattgccacttcttgcactatgtgcccggtgggtacaatgctgcagcgcagcatgaaaaatctccgaccaccggtttctcaagtttccagaaatatgcaaggatctggtggtcccggcggcagattctcagggagaggagatccaggatcaggccctgtttcaatctttggtgcttctacttccaagatcagtgtagatgcttctttagccggtgccatcattggaaaaggtggaatccattccaaacagatatgccgtgaaacaggagcaaaattatcgattaaagatcatgaaagagacccaaacttgaagattatcgagctggaaggaacatttgaacagatcaatgtagcgagtgggatggtgagagagcttatagggaggcttggatcagtgaagaaacctcaagggattggtggtcctgaagggaaaccacatcctgggagcaactacaaaaccaagatctgtgataggtactctaaagggaactgtacatatggagatagatgccattttgctcatggtgaatctgagctgcgcaggtcaggaatcgcttagttatgtctttagactcttgagaacagattatgcattgttagctccattatcattgtgactttttgctctctctttttgttttatcaatttgttttatgcgactccctttgaaaactttagcccattctgtattgagctctgaagattcgacgagttctgtaagttaccgatcacagttaaaagactttgatatgttaaaacccttatattacagctacatactttttttgtcc

SEQ ID NO: 20817 - protein, 179 aa, Arabidopsis thaliana
  peptide (1)..(179): Ceres Seq. ID no. 12396130
  misc_feature (56)..(104): Pfam Name: KH domain Pfam Description: KH domain
  misc_feature (28)..(141): Homolog of NCBI NO: 17402900 NR Description: far upstream element-binding protein
  misc_feature (28)..(141): Homolog of NCBI NO: 1082624 NR Description: myc far upstream element-binding protein - human
  misc_feature (6)..(145): Homolog of NCBI NO: 40555849 NR Description: Unknown (protein for MGC:66046) [Danio rerio]
  misc_feature (134)..(177): Homolog of NCBI NO: 34905220 NR Description: P0672D01.12 [Oryza sativa (japonica
  misc_feature (127)..(173): Homolog of NCBI NO: 5441893 NR Description: ESTs C99174(E10437),D22295(C10709) correspond to region of the predicted gene.~Similar to Arabidopsis thaliana BAC
  misc_feature (32)..(179): Homolog of NCBI NO: 5441893 NR Description: ESTs C99174(E10437),D22295(C10709) correspond to region of the predicted gene.~Similar to Arabidopsis thaliana BAC
  misc_feature (3)..(178): Homolog of NCBI NO: 9294110 NR Description: contains similarity to unknown
  misc_feature (3)..(178): Homolog of NCBI NO: 18399496 NR Description: KH domain/zinc finger protein; protein id:
  misc_feature (3)..(179): Homolog of NCBI NO: 15240145 NR Description: KH domain/zinc finger protein
  misc_feature (3)..(179): Homolog of NCBI NO: 21555233 NR Description: unknown [Arabidopsis thaliana]
MCPVGTMLQRSMKNLRPPVSQVSRNMQGSGGPGGRFSGRGDPGSGPVSIFGASTSKISVDASLAGAIIGKGGIHSKQICRETGAKLSIKDHERDPNLKIIELEGTFEQINVASGMVRELIGRLGSVKKPQGIGGPEGKPHPGSNYKTKICDRYSKGNCTYGDRCHFAHGESELRRSGIA

SEQ ID NO: 20818 - protein, 173 aa, Arabidopsis thaliana
  peptide (1)..(173): Ceres Seq. ID no. 12396131
  misc_feature (50)..(98): Pfam Name: KH domain Pfam Description: KH domain
  misc_feature (22)..(135): Homolog of NCBI NO: 17402900 NR Description: far upstream element-binding protein
  misc_feature (22)..(135): Homolog of NCBI NO: 1082624 NR Description: myc far upstream element-binding protein - human
  misc_feature (1)..(139): Homolog of NCBI NO: 40555849 NR Description: Unknown (protein for MGC:66046) [Danio rerio]
  misc_feature (128)..(171): Homolog of NCBI NO: 34905220 NR Description: P0672D01.12 [Oryza sativa (japonica
  misc_feature (121)..(167): Homolog of NCBI NO: 5441893 NR Description: ESTs C99174(E10437),D22295(C10709) correspond to region of the predicted gene.~Similar to Arabidopsis thaliana BAC
  misc_feature (26)..(173): Homolog of NCBI NO: 5441893 NR Description: ESTs C99174(E10437),D22295(C10709) correspond to region of the predicted gene.~Similar to Arabidopsis thaliana BAC
  misc_feature (1)..(172): Homolog of NCBI NO: 9294110 NR Description: contains similarity to unknown
  misc_feature (1)..(172): Homolog of NCBI NO: 18399496 NR Description: KH domain/zinc finger protein; protein id:
  misc_feature (1)..(173): Homolog of NCBI NO: 15240145 NR Description: KH domain/zinc finger protein
  misc_feature (1)..(173): Homolog of NCBI NO: 21555233 NR Description: unknown [Arabidopsis thaliana]
MLQRSMKNLRPPVSQVSRNMQGSGGPGGRFSGRGDPGSGPVSIFGASTSKISVDASLAGAIIGKGGIHSKQICRETGAKLSIKDHERDPNLKIIELEGTFEQINVASGMVRELIGRLGSVKKPQGIGGPEGKPHPGSNYKTKICDRYSKGNCTYGDRCHFAHGESELRRSGIA

SEQ ID NO: 20819 - protein, 168 aa, Arabidopsis thaliana
  peptide (1)..(168): Ceres Seq. ID no. 12396132
  misc_feature (45)..(93): Pfam Name: KH domain Pfam Description: KH domain
  misc_feature (1)..(168): Homolog of NCBI NO: 21555233 NR Description: unknown [Arabidopsis thaliana]
  misc_feature (17)..(130): Homolog of NCBI NO: 17402900 NR Description: far upstream element-binding protein
  misc_feature (17)..(130): Homolog of NCBI NO: 1082624 NR Description: myc far upstream element-binding protein - human
  misc_feature (1)..(134): Homolog of NCBI NO: 40555849 NR Description: Unknown (protein for MGC:66046) [Danio rerio]
  misc_feature (123)..(166): Homolog of NCBI NO: 34905220 NR Description: P0672D01.12 [Oryza sativa (japonica
  misc_feature (116)..(162): Homolog of NCBI NO: 5441893 NR Description: ESTs C99174(E10437),D22295(C10709) correspond to region of the predicted gene.~Similar to Arabidopsis thaliana BAC
  misc_feature (21)..(168): Homolog of NCBI NO: 5441893 NR Description: ESTs C99174(E10437),D22295(C10709) correspond to region of the predicted gene.~Similar to Arabidopsis thaliana BAC
  misc_feature (1)..(167): Homolog of NCBI NO: 9294110 NR Description: contains similarity to unknown
  misc_feature (1)..(167): Homolog of NCBI NO: 18399496 NR Description: KH domain/zinc finger protein; protein id:
  misc_feature (1)..(168): Homolog of NCBI NO: 15240145 NR Description: KH domain/zinc finger protein
MKNLRPPVSQVSRNMQGSGGPGGRFSGRGDPGSGPVSIFGASTSKISVDASLAGAIIGKGGIHSKQICRETGAKLSIKDHERDPNLKIIELEGTFEQINVASGMVRELIGRLGSVKKPQGIGGPEGKPHPGSNYKTKICDRYSKGNCTYGDRCHFAHGESELRRSGIA

SEQ ID NO: 20820 - DNA, 840 bp, Arabidopsis thaliana
  misc_feature (1)..(840): Ceres Seq. ID no. 13496712
  misc_feature: MA Experiment ID: 108434 Result: Up-regulated in Transcription
  misc_feature: MA Experiment 108434 PARAMETER Experiment Name: At_Root_Tips_cDNA_P Parameter: Tissue Value: Root Tips
tcttcttcttcttcctcttcgatattcgtcagtgtgtgtattttggggaaaactttgtgagcaaagagcgagaaaatgagcggagccggtaagaaaatcgcggatgtggctttcaaagcttcaaggactatcgattgggatggtatggctaaggtccttgtcacagatgaggctcgtagagagttctctaaccttcgtcgtgctttcgatgaggttaacacacagctccagaccaaatttagtcaggaacctgaacctatagattgggattactataggaagggtattggagctggcattgttgacaagtacaaggaagcttatgacagcattgagattccaaagtacgttgacaaagttactcctgaatacaagccaaagtttgatgctttgttggtggaactgaaagaagcagaacagaaatcgctcaaggagtctgaacggttggagaaagaaattgctgatgtccaagagatcagcaaaaagctcagcaccatgactgcagatgagtactttgagaagcacccggaactcaaaaagaagtttgatgacgaaatccgtaatgacaactggggatactgatcatgtttctccatctccggcttggaaagaaaactctctttctctttctctgttctcttactgtgattttgtgagccaatcataacaataataagtacaccattcacttaagcagtgttgagatcttcattccaaggaagataaacgcatttggttttagttatcaatttcacaaattgtttcgtttcgttcttcagtgaataataagagtcaaaaaaattatcattgtcaaggaatgaagaagactcttgactcgtc

SEQ ID NO: 20821 - protein, 168 aa, Arabidopsis thaliana
  peptide (1)..(168): Ceres Seq. ID no. 13496713
  misc_feature (15)..(152): Pfam Name: ATP synthase D chain, mitochondrial (ATP5H) Pfam Description: ATP synthase D chain, mitochondrial (ATP5H)
  misc_feature (24)..(168): Homolog of NCBI NO: 17939851 NR Description: mitochondrial F0 ATP synthase D chain
  misc_feature (1)..(168): Homolog of NCBI NO: 15231176 NR Description: expressed protein [Arabidopsis thaliana]
MSGAGKKIADVAFKASRTIDWDGMAKVLVTDEARREFSNLRRAFDEVNTQLQTKFSQEPEPIDWDYYRKGIGAGIVDKYKEAYDSIEIPKYVDKVTPEYKPKFDALLVELKEAEQKSLKESERLEKEIADVQEISKKLSTMTADEYFEKHPELKKKFDDEIRNDNWGY

SEQ ID NO: 20822 - protein, 145 aa, Arabidopsis thaliana
  peptide (1)..(145): Ceres Seq. ID no. 13496714
  misc_feature (1)..(129): Pfam Name: ATP synthase D chain, mitochondrial (ATP5H) Pfam Description: ATP synthase D chain, mitochondrial (ATP5H)
  misc_feature (1)..(145): Homolog of NCBI NO: 17939851 NR Description: mitochondrial F0 ATP synthase D chain
  misc_feature (1)..(145): Homolog of NCBI NO: 15231176 NR Description: expressed protein [Arabidopsis thaliana]
MAKVLVTDEARREFSNLRRAFDEVNTQLQTKFSQEPEPIDWDYYRKGIGAGIVDKYKEAYDSIEIPKYVDKVTPEYKPKFDALLVELKEAEQKSLKESERLEKEIADVQEISKKLSTMTADEYFEKHPELKKKFDDEIRNDNWGY

SEQ ID NO: 20823 - DNA, 800 bp, Arabidopsis thaliana
  misc_feature (1)..(800): Ceres Seq. ID no. 13499739
  misc_feature: MA Experiment ID: 20000182 Result: Up-regulated in Transcription
  misc_feature: MA Experiment 20000182 PARAMETER Experiment Name: At_2mM_SA_P Parameter: Age (day) Value: 14
  misc_feature: MA Experiment 20000182 PARAMETER Experiment Name: At_2mM_SA_P Parameter: Organism Value: A. thaliana
  misc_feature: MA Experiment 20000182 PARAMETER Experiment Name: At_2mM_SA_P Parameter: Plant Line Value: WS
  misc_feature: MA Experiment 20000182 PARAMETER Experiment Name: At_2mM_SA_P Parameter: Timepoint (hr) Value: 6
  misc_feature: MA Experiment 20000182 PARAMETER Experiment Name: At_2mM_SA_P Parameter: Tissue Value: Aerial
  misc_feature: MA Experiment 20000182 PARAMETER Experiment Name: At_2mM_SA_P Parameter: Treatment Value: 2mM SA vs. No Treatment
  misc_feature: MA Experiment ID: 20000213 Result: Down-regulated in Transcription
  misc_feature: MA Experiment 20000213 PARAMETER Experiment Name: At_4deg_Cold_P Parameter: Timepoint (hr) Value: 2
  misc_feature: MA Experiment ID: 20000227 Result: Down-regulated in Transcription
  misc_feature: MA Experiment 20000227 PARAMETER Experiment Name: At_Root-Tips-vs-Tops_P Parameter: Tissue Value: Root Tips vs. Root Tops
  misc_feature: MA Experiment ID: 20000234 Result: Down-regulated in Transcription
  misc_feature: MA Experiment 20000234 PARAMETER Experiment Name: At_Siliques_P Parameter: Age (day) Value: 21
  misc_feature: MA Experiment 20000234 PARAMETER Experiment Name: At_Siliques_P Parameter: Organism Value: A. thaliana
  misc_feature: MA Experiment 20000234 PARAMETER Experiment Name: At_Siliques_P Parameter: Plant Line Value: WS
  misc_feature: MA Experiment 20000234 PARAMETER Experiment Name: At_Siliques_P Parameter: Tissue Value: Less Than 5mm Siliques vs. Whole Plant
  misc_feature: MA Experiment ID: 20000235 Result: Down-regulated in Transcription
  misc_feature: MA Experiment 20000235 PARAMETER Experiment Name: At_Siliques_P Parameter: Age (day) Value: 21
  misc_feature: MA Experiment 20000235 PARAMETER Experiment Name: At_Siliques_P Parameter: Organism Value: A. thaliana
  misc_feature: MA Experiment 20000235 PARAMETER Experiment Name: At_Siliques_P Parameter: Plant Line Value: WS
  misc_feature: MA Experiment 20000235 PARAMETER Experiment Name: At_Siliques_P Parameter: Tissue Value: 5-10mm Siliques vs. Whole Plant
  misc_feature: MA Experiment ID: 20000264 Result: Down-regulated in Transcription
  misc_feature: MA Experiment 20000264 PARAMETER Experiment Name: At_Open_Flower_P Parameter: Age (day) Value: 21
  misc_feature: MA Experiment 20000264 PARAMETER Experiment Name: At_Open_Flower_P Parameter: Plant Line Value: WS
  misc_feature: MA Experiment 20000264 PARAMETER Experiment Name: At_Open_Flower_P Parameter: Tissue Value: Open Flower vs. Whole Plant
  misc_feature: MA Experiment ID: 20000265 Result: Down-regulated in Transcription
  misc_feature: MA Experiment 20000265 PARAMETER Experiment Name: At_Open_Flower_P Parameter: Age (day) Value: 21
  misc_feature: MA Experiment 20000265 PARAMETER Experiment Name: At_Open_Flower_P Parameter: Plant Line Value: WS
  misc_feature: MA Experiment 20000265 PARAMETER Experiment Name: At_Open_Flower_P Parameter: Tissue Value: Closed Flower vs. Whole Plant
  misc_feature: MA Experiment ID: 20000438 Result: Down-regulated in Transcription
  misc_feature: MA Experiment 20000438 PARAMETER Experiment Name: At_Shoots__P Parameter: Age (day) Value: 14
  misc_feature: MA Experiment 20000438 PARAMETER Experiment Name: At_Shoots__P Parameter: Tissue Value: Shoots vs. Whole Plant
  misc_feature: MA Experiment ID: 20000439 Result: Down-regulated in Transcription
  misc_feature: MA Experiment 20000439 PARAMETER Experiment Name: At_Roots__P Parameter: Age (day) Value: 14 vs. 21
  misc_feature: MA Experiment 20000439 PARAMETER Experiment Name: At_Roots__P Parameter: Organism Value: A. thaliana
  misc_feature: MA Experiment 20000439 PARAMETER Experiment Name: At_Roots__P Parameter: Tissue Value: Roots vs. Whole Plant
  misc_feature: MA Experiment ID: 20000441 Result: Up-regulated in Transcription
  misc_feature: MA Experiment 20000441 PARAMETER Experiment Name: At_1uM_BR-BRZ__P Parameter: Tissue Value: Shoot Apices
  misc_feature: MA Experiment 20000441 PARAMETER Experiment Name: At_1uM_BR-BRZ__P Parameter: Treatment Value: 1uM BR vs. No Treatment
  misc_feature: MA Experiment ID: 20000460 Result: Up-regulated in Transcription
  misc_feature: MA Experiment 20000460 PARAMETER Experiment Name: At_10percent_PEG_P Parameter: Age (day) Value: 12
  misc_feature: MA Experiment 20000460 PARAMETER Experiment Name: At_10percent_PEG_P Parameter: Organism Value: A. thaliana
  misc_feature: MA Experiment 20000460 PARAMETER Experiment Name: At_10percent_PEG_P Parameter: Plant Line Value: WS
  misc_feature: MA Experiment 20000460 PARAMETER Experiment Name: At_10percent_PEG_P Parameter: Timepoint (day) Value: 12
  misc_feature: MA Experiment 20000460 PARAMETER Experiment Name: At_10percent_PEG_P Parameter: Tissue Value: Whole Plant
  misc_feature: MA Experiment 20000460 PARAMETER Experiment Name: At_10percent_PEG_P Parameter: Treatment Value: 10percent PEG vs. No Treatment
  misc_feature: MA Experiment ID: 20000495 Result: Up-regulated in Transcription
  misc_feature: MA Experiment 20000495 PARAMETER Experiment Name: At_Guard_Cells_P Parameter: Harvest Date Value: 8/2/2002
  misc_feature: MA Experiment 20000495 PARAMETER Experiment Name: At_Guard_Cells_P Parameter: Organism Value: A. thaliana
  misc_feature: MA Experiment 20000495 PARAMETER Experiment Name: At_Guard_Cells_P Parameter: Tissue Value: Guard Cells vs. Leaves
  misc_feature: MA Experiment ID: 20000527 Result: Up-regulated in Transcription
  misc_feature: MA Experiment 20000527 PARAMETER Experiment Name: At_10percent_PEG_P Parameter: Age (day) Value: 20
  misc_feature: MA Experiment 20000527 PARAMETER Experiment Name: At_10percent_PEG_P Parameter: Organism Value: A. thaliana
  misc_feature: MA Experiment 20000527 PARAMETER Experiment Name: At_10percent_PEG_P Parameter: Plant Line Value: WS
  misc_feature: MA Experiment 20000527 PARAMETER Experiment Name: At_10percent_PEG_P Parameter: Timepoint (day) Value: 20
  misc_feature: MA Experiment 20000527 PARAMETER Experiment Name: At_10percent_PEG_P Parameter: Tissue Value: Whole Plant
  misc_feature: MA Experiment 20000527 PARAMETER Experiment Name: At_10percent_PEG_P Parameter: Treatment Value: 10percent PEG vs. No Treatment
  misc_feature: MA Experiment ID: 20001247 Result: Up-regulated in Transcription
  misc_feature: MA Experiment 20001247 PARAMETER Experiment Name: At_Far-red-induction_P Parameter: Age (day) Value: 7
  misc_feature: MA Experiment 20001247 PARAMETER Experiment Name: At_Far-red-induction_P Parameter: Light Value: Far-red vs. White
  misc_feature: MA Experiment 20001247 PARAMETER Experiment Name: At_Far-red-induction_P Parameter: Organism Value: A. thaliana
  misc_feature: MA Experiment 20001247 PARAMETER Experiment Name: At_Far-red-induction_P Parameter: Plant Line Value: Columbia
  misc_feature: MA Experiment 20001247 PARAMETER Experiment Name: At_Far-red-induction_P Parameter: Timepoint (hr) Value: 1
  misc_feature: MA Experiment 20001247 PARAMETER Experiment Name: At_Far-red-induction_P Parameter: Tissue Value: Whole Plant
  misc_feature: MA Experiment ID: 20001248 Result: Up-regulated in Transcription
  misc_feature: MA Experiment 20001248 PARAMETER Experiment Name: At_Far-red-induction_P Parameter: Age (day) Value: 7
  misc_feature: MA Experiment 20001248 PARAMETER Experiment Name: At_Far-red-induction_P Parameter: Light Value: Far-red vs. White
  misc_feature: MA Experiment 20001248 PARAMETER Experiment Name: At_Far-red-induction_P Parameter: Organism Value: A. thaliana
  misc_feature: MA Experiment 20001248 PARAMETER Experiment Name: At_Far-red-induction_P Parameter: Plant Line Value: Columbia
  misc_feature: MA Experiment 20001248 PARAMETER Experiment Name: At_Far-red-induction_P Parameter: Timepoint (hr) Value: 4
  misc_feature: MA Experiment 20001248 PARAMETER Experiment Name: At_Far-red-induction_P Parameter: Tissue Value: Whole Plant
  misc_feature: MA Experiment ID: 20001450 Result: Up-regulated in Transcription
  misc_feature: MA Experiment 20001450 PARAMETER Experiment Name: At_Far-red-induction_P Parameter: Age (day) Value: 7
  misc_feature: MA Experiment 20001450 PARAMETER Experiment Name: At_Far-red-induction_P Parameter: Light Value: Far-red vs. White
  misc_feature: MA Experiment 20001450 PARAMETER Experiment Name: At_Far-red-induction_P Parameter: Organism Value: A. thaliana
  misc_feature: MA Experiment 20001450 PARAMETER Experiment Name: At_Far-red-induction_P Parameter: Plant Line Value: Columbia
  misc_feature: MA Experiment 20001450 PARAMETER Experiment Name: At_Far-red-induction_P Parameter: Timepoint (hr) Value: 8
  misc_feature: MA Experiment 20001450 PARAMETER Experiment Name: At_Far-red-induction_P Parameter: Tissue Value: Whole Plant
  misc_feature: MA Experiment ID: 20001451 Result: Up-regulated in Transcription
  misc_feature: MA Experiment 20001451 PARAMETER Experiment Name: At_Far-red-induction_P Parameter: Age (day) Value: 7
  misc_feature: MA Experiment 20001451 PARAMETER Experiment Name: At_Far-red-induction_P Parameter: Light Value: Far-red vs. White
  misc_feature: MA Experiment 20001451 PARAMETER Experiment Name: At_Far-red-induction_P Parameter: Organism Value: A. thaliana
  misc_feature: MA Experiment 20001451 PARAMETER Experiment Name: At_Far-red-induction_P Parameter: Plant Line Value: Columbia
  misc_feature: MA Experiment 20001451 PARAMETER Experiment Name: At_Far-red-induction_P Parameter: Timepoint (hr) Value: 24
  misc_feature: MA Experiment 20001451 PARAMETER Experiment Name: At_Far-red-induction_P Parameter: Tissue Value: Whole Plant
  misc_feature: MA Experiment ID: 20001757 Result: Up-regulated in Transcription
  misc_feature: MA Experiment 20001757 PARAMETER Experiment Name: At_50mM_NH4NO3_L-to-H_P Parameter: Timepoint (hr) Value: 6
  misc_feature: MA Experiment 20001757 PARAMETER Experiment Name: At_50mM_NH4NO3_L-to-H_P Parameter: Tissue Value: Leaf
  misc_feature: MA Experiment 20001757 PARAMETER Experiment Name: At_50mM_NH4NO3_L-to-H_P Parameter: Treatment Value: 50mM NH4NO3 vs 100mM Mannitol
  misc_feature: Phenotype: ROSETTE LEAVES Interveinal Chlorosis-Interveinal Chlorosis
  misc_feature: Phenotype: WHOLE PLANT Color-Dark Green
  misc_feature: Phenotype: WHOLE PLANT Color-Dark Green
  misc_feature: Phenotype: WHOLE PLANT Size-Small
  misc_feature: Phenotype: WHOLE PLANT Size-Small
  misc_feature: Phenotype: WHOLE PLANT Other
  misc_feature: Phenotype: ROSETTE LEAVES Interveinal Chlorosis-Interveinal Chlorosis
  misc_feature: Phenotype: WHOLE PLANT Color-Dark Green
  misc_feature: Phenotype: WHOLE PLANT Color-Dark Green
  misc_feature: Phenotype: WHOLE PLANT Size-Small
  misc_feature: Phenotype: WHOLE PLANT Size-Small
  misc_feature: Phenotype: WHOLE PLANT Other
  misc_feature: Phenotype: ROSETTE LEAVES Interveinal Chlorosis-Interveinal Chlorosis
  misc_feature: Phenotype: WHOLE PLANT Color-Dark Green
  misc_feature: Phenotype: WHOLE PLANT Color-Dark Green
  misc_feature: Phenotype: WHOLE PLANT Size-Small
  misc_feature: Phenotype: WHOLE PLANT Size-Small
  misc_feature: Phenotype: WHOLE PLANT Other
  misc_feature: Phenotype: ROSETTE LEAVES Interveinal Chlorosis-Interveinal Chlorosis
  misc_feature: Phenotype: WHOLE PLANT Color-Dark Green
  misc_feature: Phenotype: WHOLE PLANT Color-Dark Green
  misc_feature: Phenotype: WHOLE PLANT Size-Small
  misc_feature: Phenotype: WHOLE PLANT Size-Small
  misc_feature: Phenotype: WHOLE PLANT Other
  misc_feature: Phenotype: ROSETTE LEAVES Interveinal Chlorosis-Interveinal Chlorosis
  misc_feature: Phenotype: WHOLE PLANT Color-Dark Green
  misc_feature: Phenotype: WHOLE PLANT Size-Small
  misc_feature: Phenotype: ROSETTE LEAVES Interveinal Chlorosis-Interveinal Chlorosis
  misc_feature: Phenotype: WHOLE PLANT Color-Dark Green
  misc_feature: Phenotype: WHOLE PLANT Color-Dark Green
  misc_feature: Phenotype: WHOLE PLANT Size-Small
  misc_feature: Phenotype: WHOLE PLANT Size-Small
  misc_feature: Phenotype: WHOLE PLANT Other
  misc_feature: Phenotype: ROSETTE LEAVES Interveinal Chlorosis-Interveinal Chlorosis
  misc_feature: Phenotype: WHOLE PLANT Color-Dark Green
  misc_feature: Phenotype: WHOLE PLANT Color-Dark Green
  misc_feature: Phenotype: WHOLE PLANT Size-Small
  misc_feature: Phenotype: WHOLE PLANT Size-Small
  misc_feature: Phenotype: WHOLE PLANT Other
gctcacactcctaatccctcccatttttcaaaccactctctctttctctttctctaagtctttaacaatggcgcgccttctcttccgtcttctccaagaagccaattctacatctccggctgaagcttctccgcctttcaactccgacctcgtcctcatccttgcggttcttctttgtgcactgacatgtatcatcggcttaatagccgtctctcgatgcgcttggctccgccgtatcgcctcaagaaacagatcggatcaaactcatccaccgccggtagctgcagccaacaaaggattgaaaaagaaagtcctccggtcgttaccgaaactcacctactcgccggattctccgccggcggagaaactcgtggagtgtgctatctgtttaacggaattcgccgccggagacgagcttagggtgttgccgcagtgtggacatggtttccacgtatcgtgtatcgacacgtggcttggatcacactcttcttgtccttcttgccgtcaaatcttggtggttaccaggtgtcataaatgtggcgggttacccggtagctcaagttcaggacccgaacccgatacccgaatcaaacaacgtgaagatggtcctgataacttgccttgattcttttctttagacatatcccattttattttttataaagggaattcgattaaacaaagatataatattaattaaaaagtgttctttatcattttaaaggataatgttactctgtcatgtatatatttaattatctattgtaaatctatcatggaatggaaactttatgtcattc

SEQ ID NO: 20824 - protein, 207 aa, Arabidopsis thaliana
  peptide (1)..(207): Ceres Seq. ID no. 13499740
  misc_feature (126)..(167): Pfam Name: Zinc finger, C3HC4 type (RING finger) Pfam Description: Zinc finger, C3HC4 type (RING finger)
  misc_feature (8)..(198): Homolog of NCBI NO: 15222073 NR Description: RING-H2 finger protein RHA3a -related
  misc_feature (42)..(78): Homolog of NCBI NO: 37536508 NR Description: putative ring finger protein
  misc_feature (96)..(179): Homolog of NCBI NO: 37536508 NR Description: putative ring finger protein
  misc_feature (22)..(206): Homolog of NCBI NO: 9293902 NR Description: contains similarity to RING zinc finger
  misc_feature (29)..(188): Homolog of NCBI NO: 7489432 NR Description: probable ring finger protein - barley
  misc_feature (29)..(180): Homolog of NCBI NO: 15237013 NR Description: RING-H2 finger protein RHA3b [Arabidopsis
  misc_feature (29)..(180): Homolog of NCBI NO: 15227839 NR Description: RING zinc finger protein -related [Arabidopsis
  misc_feature (23)..(207): Homolog of NCBI NO: 15218042 NR Description: RING zinc finger protein -related [Arabidopsis
  misc_feature (23)..(207): Homolog of NCBI NO: 21555237 NR Description: putative RING zinc finger protein [Arabidopsis
  misc_feature (23)..(207): Homolog of NCBI NO: 15223041 NR Description: RING zinc finger protein -related [Arabidopsis
LTLLIPPIFQTTLSFSFSKSLTMARLLFRLLQEANSTSPAEASPPFNSDLVLILAVLLCALTCIIGLIAVSRCAWLRRIASRNRSDQTHPPPVAAANKGLKKKVLRSLPKLTYSPDSPPAEKLVECAICLTEFAAGDELRVLPQCGHGFHVSCIDTWLGSHSSCPSCRQILVVTRCHKCGGLPGSSSSGPEPDTRIKQREDGPDNLP

SEQ ID NO: 20825 - protein, 185 aa, Arabidopsis thaliana
  peptide (1)..(185): Ceres Seq. ID no. 13499741
  misc_feature (104)..(145): Pfam Name: Zinc finger, C3HC4 type (RING finger) Pfam Description: Zinc finger, C3HC4 type (RING finger)
  misc_feature (1)..(176): Homolog of NCBI NO: 15222073 NR Description: RING-H2 finger protein RHA3a -related
  misc_feature (20)..(56): Homolog of NCBI NO: 37536508 NR Description: putative ring finger protein
  misc_feature (74)..(157): Homolog of NCBI NO: 37536508 NR Description: putative ring finger protein
  misc_feature (1)..(184): Homolog of NCBI NO: 9293902 NR Description: contains similarity to RING zinc finger
  misc_feature (7)..(166): Homolog of NCBI NO: 7489432 NR Description: probable ring finger protein - barley
  misc_feature (7)..(158): Homolog of NCBI NO: 15237013 NR Description: RING-H2 finger protein RHA3b [Arabidopsis
  misc_feature (7)..(158): Homolog of NCBI NO: 15227839 NR Description: RING zinc finger protein -related [Arabidopsis
  misc_feature (1)..(185): Homolog of NCBI NO: 15218042 NR Description: RING zinc finger protein -related [Arabidopsis
  misc_feature (1)..(185): Homolog of NCBI NO: 21555237 NR Description: putative RING zinc finger protein [Arabidopsis
  misc_feature (1)..(185): Homolog of NCBI NO: 15223041 NR Description: RING zinc finger protein -related [Arabidopsis
MARLLFRLLQEANSTSPAEASPPFNSDLVLILAVLLCALTCIIGLIAVSRCAWLRRIASRNRSDQTHPPPVAAANKGLKKKVLRSLPKLTYSPDSPPAEKLVECAICLTEFAAGDELRVLPQCGHGFHVSCIDTWLGSHSSCPSCRQILVVTRCHKCGGLPGSSSSGPEPDTRIKQREDGPDNLP

SEQ ID NO: 20826 - DNA, 1257 bp, Arabidopsis thaliana
  misc_feature (1)..(1257): Ceres Seq. ID no. 13486837
  misc_feature: MA Experiment ID: 108434 Result: Up-regulated in Transcription
  misc_feature: MA Experiment 108434 PARAMETER Experiment Name: At_Root_Tips_cDNA_P Parameter: Tissue Value: Root Tips
  misc_feature: MA Experiment ID: 108461 Result: Down-regulated in Transcription
  misc_feature: MA Experiment 108461 PARAMETER Experiment Name: At_Germinating_Seeds_cDNA_P Parameter: Age (day) Value: 1 vs. 0
  misc_feature: MA Experiment 108461 PARAMETER Experiment Name: At_Germinating_Seeds_cDNA_P Parameter: Tissue Value: Germinating Seeds
  misc_feature: MA Experiment ID: 108462 Result: Down-regulated in Transcription
  misc_feature: MA Experiment 108462 PARAMETER Experiment Name: At_Germinating_Seeds_cDNA_P Parameter: Age (day) Value: 2 vs. 0
  misc_feature: MA Experiment 108462 PARAMETER Experiment Name: At_Germinating_Seeds_cDNA_P Parameter: Tissue Value: Germinating Seeds
  misc_feature: MA Experiment ID: 108463 Result: Down-regulated in Transcription
  misc_feature: MA Experiment 108463 PARAMETER Experiment Name: At_Germinating_Seeds_cDNA_P Parameter: Age (day) Value: 3 vs. 0
  misc_feature: MA Experiment 108463 PARAMETER Experiment Name: At_Germinating_Seeds_cDNA_P Parameter: Tissue Value: Germinating Seeds
  misc_feature: MA Experiment ID: 108464 Result: Down-regulated in Transcription
  misc_feature: MA Experiment 108464 PARAMETER Experiment Name: At_Germinating_Seeds_cDNA_P Parameter: Age (day) Value: 4 vs. 0
  misc_feature: MA Experiment 108464 PARAMETER Experiment Name: At_Germinating_Seeds_cDNA_P Parameter: Tissue Value: Germinating Seeds
  misc_feature: MA Experiment ID: 108569 Result: Down-regulated in Transcription
  misc_feature: MA Experiment 108569 PARAMETER Experiment Name: At_0.001%_MeJA__cDNA_P Parameter: Timepoint (hr) Value: 6
  misc_feature: MA Experiment 108569 PARAMETER Experiment Name: At_0.001%_MeJA__cDNA_P Parameter: Tissue Value: Aerial
  misc_feature: MA Experiment 108569 PARAMETER Experiment Name: At_0.001%_MeJA__cDNA_P Parameter: Treatment Value: 0.001% MeJA vs. No Treatment
  misc_feature: MA Experiment ID: 20000180 Result: Down-regulated in Transcription
  misc_feature: MA Experiment 20000180 PARAMETER Experiment Name: At_Germinating_Seeds_P Parameter: Age (hr) Value: 24 vs. 0
  misc_feature: MA Experiment 20000180 PARAMETER Experiment Name: At_Germinating_Seeds_P Parameter: Tissue Value: Germinating Seeds
  misc_feature: MA Experiment ID: 20000224 Result: Up-regulated in Transcription
  misc_feature: MA Experiment ID: 20001247 Result: Down-regulated in Transcription
  misc_feature: MA Experiment 20001247 PARAMETER Experiment Name: At_Far-red-induction_P Parameter: Age (day) Value: 7
  misc_feature: MA Experiment 20001247 PARAMETER Experiment Name: At_Far-red-induction_P Parameter: Light Value: Far-red vs. White
  misc_feature: MA Experiment 20001247 PARAMETER Experiment Name: At_Far-red-induction_P Parameter: Organism Value: A. thaliana
  misc_feature: MA Experiment 20001247 PARAMETER Experiment Name: At_Far-red-induction_P Parameter: Plant Line Value: Columbia
  misc_feature: MA Experiment 20001247 PARAMETER Experiment Name: At_Far-red-induction_P Parameter: Timepoint (hr) Value: 1
  misc_feature: MA Experiment 20001247 PARAMETER Experiment Name: At_Far-red-induction_P Parameter: Tissue Value: Whole Plant
  misc_feature: MA Experiment ID: 20001458 Result: Up-regulated in Transcription
  misc_feature: MA Experiment 20001458 PARAMETER Experiment Name: At_50mM_NH4NO3_L-to-H_P Parameter: Age (day) Value: Undefined
  misc_feature: MA Experiment 20001458 PARAMETER Experiment Name: At_50mM_NH4NO3_L-to-H_P Parameter: Organism Value: Undefined
  misc_feature: MA Experiment 20001458 PARAMETER Experiment Name: At_50mM_NH4NO3_L-to-H_P Parameter: Plant Line Value: Undefined
  misc_feature: MA Experiment 20001458 PARAMETER Experiment Name: At_50mM_NH4NO3_L-to-H_P Parameter: Timepoint (hr) Value: 2
  misc_feature: MA Experiment 20001458 PARAMETER Experiment Name: At_50mM_NH4NO3_L-to-H_P Parameter: Tissue Value: Siliques
  misc_feature: MA Experiment 20001458 PARAMETER Experiment Name: At_50mM_NH4NO3_L-to-H_P Parameter: Treatment Value: 50mM NH4NO3 vs. 100mM Manitol
  misc_feature: MA Experiment ID: 20001558 Result: Up-regulated in Transcription
  misc_feature: MA Experiment 20001558 PARAMETER Experiment Name: At_Drought_Soil_Dry_P Parameter: Age (day) Value: 27
  misc_feature: MA Experiment 20001558 PARAMETER Experiment Name: At_Drought_Soil_Dry_P Parameter: Organism Value: A. thaliana
  misc_feature: MA Experiment 20001558 PARAMETER Experiment Name: At_Drought_Soil_Dry_P Parameter: Plant Line Value: WS
  misc_feature: MA Experiment 20001558 PARAMETER Experiment Name: At_Drought_Soil_Dry_P Parameter: Post Timepoint (hr) Value: 6
  misc_feature: MA Experiment 20001558 PARAMETER Experiment Name: At_Drought_Soil_Dry_P Parameter: Post-Treatment Value: Re-Water vs. No Drought
  misc_feature: MA Experiment 20001558 PARAMETER Experiment Name: At_Drought_Soil_Dry_P Parameter: Timepoint (day) Value: 13
  misc_feature: MA Experiment 20001558 PARAMETER Experiment Name: At_Drought_Soil_Dry_P Parameter: Treatment Value: Drought vs. No Drought
  misc_feature: MA Experiment ID: 20001560 Result: Up-regulated in Transcription
  misc_feature: MA Experiment 20001560 PARAMETER Experiment Name: At_Drought_Soil_Dry_P Parameter: Age (day) Value: 28
  misc_feature: MA Experiment 20001560 PARAMETER Experiment Name: At_Drought_Soil_Dry_P Parameter: Organism Value: A. thaliana
  misc_feature: MA Experiment 20001560 PARAMETER Experiment Name: At_Drought_Soil_Dry_P Parameter: Plant Line Value: WS
  misc_feature: MA Experiment 20001560 PARAMETER Experiment Name: At_Drought_Soil_Dry_P Parameter: Post Timepoint (hr) Value: None
  misc_feature: MA Experiment 20001560 PARAMETER Experiment Name: At_Drought_Soil_Dry_P Parameter: Post-Treatment Value: None
  misc_feature: MA Experiment 20001560 PARAMETER Experiment Name: At_Drought_Soil_Dry_P Parameter: Timepoint (day) Value: 14
  misc_feature: MA Experiment 20001560 PARAMETER Experiment Name: At_Drought_Soil_Dry_P Parameter: Treatment Value: Drought vs. No Drought
agattcacgcatcacacaatcgagtttttagggttttagcggttgctctctcggaagccagagagaagagggaagaggaagtctaattcctctgcgttttttgcaattagggttttctcaattggaatcgaaaatggtgacagacaagagcaagaaggcgaaaaccgaagaagaaaacgtcgagcaaatcgatgcagagcttgtcctctcaatcgaaaagcttcaagagatccaagacgacctcgagaagataaatgaaaaggctagtgatgaagtgttggaagtggagcagaaatataatgtgataaggaaacctgtttatgacaagcgtaacgagatcatcaaaaccatccctgatttctggttaactgctttcttgagtcaccctgctttaggtgaacttttgactgaagaagaccaaaagattttcaaatatcttagctctcttgatgttgaggatgccaaagatgtgaaatctggatactctatcactttttccttcaatcccaatccattttttgaagatggaaaactgacaaagacttttacctttctcgaagaagggacaaccaaaatcacagccacgcctatcaaatggaaagagggcaaaggcctggcgaatggagtgaatcatgagaagaatggaaacaaacgtgcactacctgaagagagcttctttacctggtttagtgatgctcaacacaaggaggatgttgaggatgagatgcaagacgagcaggttgcagatatcatcaaggaagatttgtggcccaaccctctcacctacttcaacaatgacgctgatgaagaggactttgatggagacgatgatggagatgaagaggagaaagaaggtgactctgatgaagatgatgacgaagaagacgaagttggtgaggaatgatggcagggatacccagaaaccacatttgcttacatgtcttctctataacagagtgtgtaaagttttgtgtgttgaaaggtttttaattttaagcaaaagtggattatgacgacaacagacaagcttttaattttattttaccgtaatagttatatcttgttgtaagaaaccattttcagccttttgttggaaaatcctgcttaaatggtttttgagtcttacataatagcttcttcatcttttgtcttcttaaagagaattatatttgtaatttcatgtctgttgtgtttctttgactttactgaatagagaatttgtgtgtttatggtgaaaatatagccgatctgcttgac

SEQ ID NO: 20827 - protein, 256 aa, Arabidopsis thaliana
  peptide (1)..(256): Ceres Seq. ID no. 13486838
  misc_feature (27)..(225): Pfam Name: Nucleosome assembly protein (NAP) Pfam Description: Nucleosome assembly protein (NAP)
  misc_feature (17)..(256): Homolog of NCBI NO: 4506891 NR Description: SET translocation (myeloid leukemia-associated)
  misc_feature (17)..(256): Homolog of NCBI NO: 1711383 NR Description: SET protein (HLA-DR associated protein II)
  misc_feature (17)..(256): Homolog of NCBI NO: 2253411 NR Description: PP2A inhibitor [Tetraodon fluviatilis]
  misc_feature (5)..(256): Homolog of NCBI NO: 21739223 NR Description: OSJNBa0072F16.2 [Oryza sativa (japonica
  misc_feature (4)..(251): Homolog of NCBI NO: 14550110 NR Description: nucleosome/chromatin assembly factor A [Zea mays]
  misc_feature (4)..(256): Homolog of NCBI NO: 14550112 NR Description: nucleosome/chromatin assembly factor A [Zea mays]
  misc_feature (1)..(256): Homolog of NCBI NO: 15221298 NR Description: SET protein, phospatase 2A inhibitor -related
  misc_feature (1)..(227): Homolog of NCBI NO: 26451105 NR Description: unknown protein [Arabidopsis thaliana]
  misc_feature (1)..(256): Homolog of NCBI NO: 25354177 NR Description: hypothetical protein F6A14.10 [imported] -
  misc_feature (1)..(256): Homolog of NCBI NO: 18394656 NR Description: expressed protein [Arabidopsis thaliana]
MVTDKSKKAKTEEENVEQIDAELVLSIEKLQEIQDDLEKINEKASDEVLEVEQKYNVIRKPVYDKRNEIIKTIPDFWLTAFLSHPALGELLTEEDQKIFKYLSSLDVEDAKDVKSGYSITFSFNPNPFFEDGKLTKTFTFLEEGTTKITATPIKWKEGKGLANGVNHEKNGNKRALPEESFFTWFSDAQHKEDVEDEMQDEQVADIIKEDLWPNPLTYFNNDADEEDFDGDDDGDEEEKEGDSDEDDDEEDEVGEE

SEQ ID NO: 20828 - DNA, 1318 bp, Arabidopsis thaliana
  misc_feature (1)..(1318): Ceres Seq. ID no. 12321933
  misc_feature: MA Experiment ID: 108474 Result: Down-regulated in Transcription
  misc_feature: MA Experiment 108474 PARAMETER Experiment Name: At_Drought_Flowers_cDNA_P Parameter: Timepoint (hr) Value: null
  misc_feature: MA Experiment 108474 PARAMETER Experiment Name: At_Drought_Flowers_cDNA_P Parameter: Treatment Value: Drought vs. No Drought
  misc_feature: MA Experiment ID: 108569 Result: Down-regulated in Transcription
  misc_feature: MA Experiment 108569 PARAMETER Experiment Name: At_0.001%_MeJA__cDNA_P Parameter: Timepoint (hr) Value: 6
  misc_feature: MA Experiment 108569 PARAMETER Experiment Name: At_0.001%_MeJA__cDNA_P Parameter: Tissue Value: Aerial
  misc_feature: MA Experiment 108569 PARAMETER Experiment Name: At_0.001%_MeJA__cDNA_P Parameter: Treatment Value: 0.001% MeJA vs. No Treatment
  misc_feature: MA Experiment ID: 20000111 Result: Up-regulated in Transcription
  misc_feature: MA Experiment 20000111 PARAMETER Experiment Name: At_42deg_Heat_cDNA_P Parameter: Temperature (deg C) Value: 42 vs. 22
  misc_feature: MA Experiment 20000111 PARAMETER Experiment Name: At_42deg_Heat_cDNA_P Parameter: Timepoint (hr) Value: 6
  misc_feature: MA Experiment 20000111 PARAMETER Experiment Name: At_42deg_Heat_cDNA_P Parameter: Tissue Value: Aerial
  misc_feature: MA Experiment ID: 20000264 Result: Up-regulated in Transcription
  misc_feature: MA Experiment 20000264 PARAMETER Experiment Name: At_Open_Flower_P Parameter: Age (day) Value: 21
  misc_feature: MA Experiment 20000264 PARAMETER Experiment Name: At_Open_Flower_P Parameter: Plant Line Value: WS
  misc_feature: MA Experiment 20000264 PARAMETER Experiment Name: At_Open_Flower_P Parameter: Tissue Value: Open Flower vs. Whole Plant
  misc_feature: MA Experiment ID: 20000265 Result: Up-regulated in Transcription
  misc_feature: MA Experiment 20000265 PARAMETER Experiment Name: At_Open_Flower_P Parameter: Age (day) Value: 21
  misc_feature: MA Experiment 20000265 PARAMETER Experiment Name: At_Open_Flower_P Parameter: Plant Line Value: WS
  misc_feature: MA Experiment 20000265 PARAMETER Experiment Name: At_Open_Flower_P Parameter: Tissue Value: Closed Flower vs. Whole Plant
  misc_feature: MA Experiment ID: 20000286 Result: Up-regulated in Transcription
  misc_feature: MA Experiment 20000286 PARAMETER Experiment Name: At_Open_Flower_P Parameter: Age (day) Value: 21
  misc_feature: MA Experiment 20000286 PARAMETER Experiment Name: At_Open_Flower_P Parameter: Plant Line Value: WS
  misc_feature: MA Experiment 20000286 PARAMETER Experiment Name: At_Open_Flower_P Parameter: Tissue Value: Half Open vs. Whole Plant
  misc_feature: MA Experiment ID: 20001910 Result: Up-regulated in Transcription
  misc_feature: MA Experiment 20001910 PARAMETER Experiment Name: At_Drought_Reproduction_P Parameter: Age (day) Value: 37
  misc_feature: MA Experiment 20001910 PARAMETER Experiment Name: At_Drought_Reproduction_P Parameter: Organism Value: A. thaliana
  misc_feature: MA Experiment 20001910 PARAMETER Experiment Name: At_Drought_Reproduction_P Parameter: Plant Line Value: WS
  misc_feature: MA Experiment 20001910 PARAMETER Experiment Name: At_Drought_Reproduction_P Parameter: Timepoint (day) Value: 7
  misc_feature: MA Experiment 20001910 PARAMETER Experiment Name: At_Drought_Reproduction_P Parameter: Tissue Value: Flowers
  misc_feature: MA Experiment 20001910 PARAMETER Experiment Name: At_Drought_Reproduction_P Parameter: Treatment Value: Drought vs. No Drought
  misc_feature: MA Experiment ID: 20001911 Result: Up-regulated in Transcription
  misc_feature: MA Experiment 20001911 PARAMETER Experiment Name: At_Drought_Reproduction_P Parameter: Age (day) Value: 40
  misc_feature: MA Experiment 20001911 PARAMETER Experiment Name: At_Drought_Reproduction_P Parameter: Organism Value: A. thaliana
  misc_feature: MA Experiment 20001911 PARAMETER Experiment Name: At_Drought_Reproduction_P Parameter: Plant Line Value: WS
  misc_feature: MA Experiment 20001911 PARAMETER Experiment Name: At_Drought_Reproduction_P Parameter: Timepoint (day) Value: 10
  misc_feature: MA Experiment 20001911 PARAMETER Experiment Name: At_Drought_Reproduction_P Parameter: Tissue Value: Flowers
  misc_feature: MA Experiment 20001911 PARAMETER Experiment Name: At_Drought_Reproduction_P Parameter: Treatment Value: Drought vs. No Drought
ttccatttttattcccaaattaataaatatctttttttcttttattttcttttactttaaaaaaaaacttaaaaattaataaattaataaagatgggttacatatctctagccctagttgcattacttgtattttttgcctcgccggtggttctcgccgacgatataaccccaattccggcagacagagcccaaatcccacaatggttcatggccaacgttaaacccttttcccagagacggggcacgctagaccccgaacttgaagctgcagaagcatcgcgacgtgtcatcatcgtgaatcaaaatggaggcggcgattttaagacaataaacgcggcaatcaagagcattccattagcaaacaagaaccgtgtgatcataaagttggctcctggtatataccatgagaaagttaccgtcgacgtaggccgaccatacgttacattgcttggcaaacctggtgcggaaaccaacttgacttatgccggaacagccgctaaatacggcaccgtggagagtgccacgcttatcgtctgggccacaaattttttggcagccaacctaaacattataaacacttctccaatgccaaagcctggtacacaaggacaagctctagctatgagaatcaacggcgataaggctgctttctacaactgcagattctatggttttcaagacactctttgcgacgatagaggcaaccatttctttaagaattgttacatcgaaggaacctatgattttatctttggaagaggagcttccttgtacttgactacgcaattgcatgctgttggagacggattaagagtgatcgcggcacacaatcgacagagtacaactgagcaaaacgggtattcgttcgtgcattgcaaggttactggagtcggaaccgggatctacttgggtagggcttggatgagccaccctaaggtcgtctactcctacactgaaatgtctagtgtcgtcaacccatctggatggcaagagaacagagtgcgtgcgcatgacaagacggtgttctatggagaatacatgtgcacgggaccaggatcacacaaagcgaagagagtggcacacacacaagacattgacaacaaagaagctagccaattccttaccctcggctacatcaagggctccaaatggcttctacctcctcccgcttactaaacagacccaatcatcactaaaattctgtatatgttacaattgtacgttttgttttcgaagtgtcctctcttcctgtatataatggaggagtagagacttgtgtaattttgggttcatgataataaaatactcaatggttc

SEQ ID NO: 20829 - protein, 361 aa, Arabidopsis thaliana
  peptide (1)..(361): Ceres Seq. ID no. 12321934
  misc_feature (66)..(352): Pfam Name: Pectinesterase Pfam Description: Pectinesterase
  misc_feature (66)..(355): Homolog of NCBI NO: 15228023 NR Description: pectinesterase family; protein id: At2g36710.1
  misc_feature (69)..(361): Homolog of NCBI NO: 15240325 NR Description: pectinesterase family; protein id: At5g61680.1
  misc_feature (3)..(361): Homolog of NCBI NO: 9758483 NR Description: pectin methylesterase-like protein [Arabidopsis
  misc_feature (19)..(360): Homolog of NCBI NO: 21593398 NR Description: pectin methyl-esterase-like protein [Arabidopsis
  misc_feature (19)..(360): Homolog of NCBI NO: 11358603 NR Description: pectin methyl-esterase-like protein - Arabidopsis
  misc_feature (19)..(360): Homolog of NCBI NO: 25404855 NR Description: probable pectin methylesterase T17F3.3
  misc_feature (1)..(360): Homolog of NCBI NO: 18415486 NR Description: pectinesterase family
  misc_feature (1)..(360): Homolog of NCBI NO: 30697951 NR Description: pectinesterase family [Arabidopsis thaliana]
  misc_feature (1)..(361): Homolog of NCBI NO: 15240792 NR Description: pectinesterase family; protein id: At5g07430.1
  misc_feature (1)..(361): Homolog of NCBI NO: 15240781 NR Description: pectinesterase family
MGYISLALVALLVFFASPVVLADDITPIPADRAQIPQWFMANVKPFSQRRGTLDPELEAAEASRRVIIVNQNGGGDFKTINAAIKSIPLANKNRVIIKLAPGIYHEKVTVDVGRPYVTLLGKPGAETNLTYAGTAAKYGTVESATLIVWATNFLAANLNIINTSPMPKPGTQGQALAMRINGDKAAFYNCRFYGFQDTLCDDRGNHFFKNCYIEGTYDFIFGRGASLYLTTQLHAVGDGLRVIAAHNRQSTTEQNGYSFVHCKVTGVGTGIYLGRAWMSHPKVVYSYTEMSSVVNPSGWQENRVRAHDKTVFYGEYMCTGPGSHKAKRVAHTQDIDNKEASQFLTLGYIKGSKWLLPPPAY

SEQ ID NO: 20830 - protein, 322 aa, Arabidopsis thaliana
  peptide (1)..(322): Ceres Seq. ID no. 12321935
  misc_feature (27)..(313): Pfam Name: Pectinesterase Pfam Description: Pectinesterase
  misc_feature (27)..(316): Homolog of NCBI NO: 15228023 NR Description: pectinesterase family; protein id: At2g36710.1
  misc_feature (30)..(322): Homolog of NCBI NO: 15240325 NR Description: pectinesterase family; protein id: At5g61680.1
  misc_feature (1)..(322): Homolog of NCBI NO: 9758483 NR Description: pectin methylesterase-like protein [Arabidopsis
  misc_feature (1)..(321): Homolog of NCBI NO: 21593398 NR Description: pectin methyl-esterase-like protein [Arabidopsis
  misc_feature (1)..(321): Homolog of NCBI NO: 11358603 NR Description: pectin methyl-esterase-like protein - Arabidopsis
  misc_feature (1)..(321): Homolog of NCBI NO: 25404855 NR Description: probable pectin methylesterase T17F3.3
  misc_feature (1)..(321): Homolog of NCBI NO: 18415486 NR Description: pectinesterase family
  misc_feature (1)..(321): Homolog of NCBI NO: 30697951 NR Description: pectinesterase family [Arabidopsis thaliana]
  misc_feature (1)..(322): Homolog of NCBI NO: 15240792 NR Description: pectinesterase family; protein id: At5g07430.1
  misc_feature (1)..(322): Homolog of NCBI NO: 15240781 NR Description: pectinesterase family
MANVKPFSQRRGTLDPELEAAEASRRVIIVNQNGGGDFKTINAAIKSIPLANKNRVIIKLAPGIYHEKVTVDVGRPYVTLLGKPGAETNLTYAGTAAKYGTVESATLIVWATNFLAANLNIINTSPMPKPGTQGQALAMRINGDKAAFYNCRFYGFQDTLCDDRGNHFFKNCYIEGTYDFIFGRGASLYLTTQLHAVGDGLRVIAAHNRQSTTEQNGYSFVHCKVTGVGTGIYLGRAWMSHPKVVYSYTEMSSVVNPSGWQENRVRAHDKTVFYGEYMCTGPGSHKAKRVAHTQDIDNKEASQFLTLGYIKGSKWLLPPPAY

SEQ ID NO: 20831 - protein, 196 aa, Arabidopsis thaliana
  peptide (1)..(196): Ceres Seq. ID no. 12321936
  misc_feature (1)..(187): Pfam Name: Pectinesterase Pfam Description: Pectinesterase
  misc_feature (1)..(190): Homolog of NCBI NO: 15228023 NR Description: pectinesterase family; protein id: At2g36710.1
  misc_feature (1)..(196): Homolog of NCBI NO: 15240325 NR Description: pectinesterase family; protein id: At5g61680.1
  misc_feature (1)..(196): Homolog of NCBI NO: 9758483 NR Description: pectin methylesterase-like protein [Arabidopsis
  misc_feature (1)..(195): Homolog of NCBI NO: 21593398 NR Description: pectin methyl-esterase-like protein [Arabidopsis
  misc_feature (1)..(195): Homolog of NCBI NO: 11358603 NR Description: pectin methyl-esterase-like protein - Arabidopsis
  misc_feature (1)..(195): Homolog of NCBI NO: 25404855 NR Description: probable pectin methylesterase T17F3.3
  misc_feature (1)..(195): Homolog of NCBI NO: 18415486 NR Description: pectinesterase family
  misc_feature (1)..(195): Homolog of NCBI NO: 30697951 NR Description: pectinesterase family [Arabidopsis thaliana]
  misc_feature (1)..(196): Homolog of NCBI NO: 15240792 NR Description: pectinesterase family; protein id: At5g07430.1
  misc_feature (1)..(196): Homolog of NCBI NO: 15240781 NR Description: pectinesterase family
MPKPGTQGQALAMRINGDKAAFYNCRFYGFQDTLCDDRGNHFFKNCYIEGTYDFIFGRGASLYLTTQLHAVGDGLRVIAAHNRQSTTEQNGYSFVHCKVTGVGTGIYLGRAWMSHPKVVYSYTEMSSVVNPSGWQENRVRAHDKTVFYGEYMCTGPGSHKAKRVAHTQDIDNKEASQFLTLGYIKGSKWLLPPPAY

SEQ ID NO: 20832 - DNA, 1347 bp, Arabidopsis thaliana
  misc_feature (1)..(1347): Ceres Seq. ID no. 13486853
  misc_feature: MA Experiment ID: 108434 Result: Up-regulated in Transcription
  misc_feature: MA Experiment 108434 PARAMETER Experiment Name: At_Root_Tips_cDNA_P Parameter: Tissue Value: Root Tips
  misc_feature: MA Experiment ID: 108435 Result: Up-regulated in Transcription
  misc_feature: MA Experiment 108435 PARAMETER Experiment Name: At_stm_Mutants_cDNA_P Parameter: Plant Line Value: wt Landsburg vs stm
  misc_feature: MA Experiment 108435 PARAMETER Experiment Name: At_stm_Mutants_cDNA_P Parameter: Tissue Value: Shoot Apical Meristem Region
  misc_feature: MA Experiment ID: 108461 Result: Down-regulated in Transcription
  misc_feature: MA Experiment 108461 PARAMETER Experiment Name: At_Germinating_Seeds_cDNA_P Parameter: Age (day) Value: 1 vs. 0
  misc_feature: MA Experiment 108461 PARAMETER Experiment Name: At_Germinating_Seeds_cDNA_P Parameter: Tissue Value: Germinating Seeds
  misc_feature: MA Experiment ID: 108462 Result: Down-regulated in Transcription
  misc_feature: MA Experiment 108462 PARAMETER Experiment Name: At_Germinating_Seeds_cDNA_P Parameter: Age (day) Value: 2 vs. 0
  misc_feature: MA Experiment 108462 PARAMETER Experiment Name: At_Germinating_Seeds_cDNA_P Parameter: Tissue Value: Germinating Seeds
  misc_feature: MA Experiment ID: 108463 Result: Down-regulated in Transcription
  misc_feature: MA Experiment 108463 PARAMETER Experiment Name: At_Germinating_Seeds_cDNA_P Parameter: Age (day) Value: 3 vs. 0
  misc_feature: MA Experiment 108463 PARAMETER Experiment Name: At_Germinating_Seeds_cDNA_P Parameter: Tissue Value: Germinating Seeds
  misc_feature: MA Experiment ID: 108464 Result: Down-regulated in Transcription
  misc_feature: MA Experiment 108464 PARAMETER Experiment Name: At_Germinating_Seeds_cDNA_P Parameter: Age (day) Value: 4 vs. 0
  misc_feature: MA Experiment 108464 PARAMETER Experiment Name: At_Germinating_Seeds_cDNA_P Parameter: Tissue Value: Germinating Seeds
  misc_feature: MA Experiment ID: 108489 Result: Up-regulated in Transcription
  misc_feature: MA Experiment ID: 108576 Result: Down-regulated in Transcription
  misc_feature: MA Experiment 108576 PARAMETER Experiment Name: At_42deg_Heat_cDNA_P Parameter: Temperature (deg C) Value: 42 vs. 22
  misc_feature: MA Experiment 108576 PARAMETER Experiment Name: At_42deg_Heat_cDNA_P Parameter: Timepoint (hr) Value: 1
  misc_feature: MA Experiment 108576 PARAMETER Experiment Name: At_42deg_Heat_cDNA_P Parameter: Tissue Value: Aerial
  misc_feature: MA Experiment ID: 20000144 Result: Down-regulated in Transcription
  misc_feature: MA Experiment 20000144 PARAMETER Experiment Name: At_42deg_Heat_cDNA_P Parameter: Temperature (deg C) Value: 42 vs. 22
  misc_feature: MA Experiment 20000144 PARAMETER Experiment Name: At_42deg_Heat_cDNA_P Parameter: Timepoint (hr) Value: 1
  misc_feature: MA Experiment 20000144 PARAMETER Experiment Name: At_42deg_Heat_cDNA_P Parameter: Tissue Value: Aerial
  misc_feature: MA Experiment ID: 20000179 Result: Down-regulated in Transcription
  misc_feature: MA Experiment 20000179 PARAMETER Experiment Name: At_Germinating_Seeds_P Parameter: Age (hr) Value: 6 vs. 0
  misc_feature: MA Experiment 20000179 PARAMETER Experiment Name: At_Germinating_Seeds_P Parameter: Tissue Value: Germinating Seeds
  misc_feature: MA Experiment ID: 20000180 Result: Down-regulated in Transcription
  misc_feature: MA Experiment 20000180 PARAMETER Experiment Name: At_Germinating_Seeds_P Parameter: Age (hr) Value: 24 vs. 0
  misc_feature: MA Experiment 20000180 PARAMETER Experiment Name: At_Germinating_Seeds_P Parameter: Tissue Value: Germinating Seeds
  misc_feature: MA Experiment ID: 20000184 Result: Up-regulated in Transcription
  misc_feature: MA Experiment 20000184 PARAMETER Experiment Name: At_Shoots__P Parameter: Age (day) Value: 7
  misc_feature: MA Experiment 20000184 PARAMETER Experiment Name: At_Shoots__P Parameter: Tissue Value: Shoots vs. Whole Plant
  misc_feature: MA Experiment ID: 20000573 Result: Down-regulated in Transcription
  misc_feature: MA Experiment 20000573 PARAMETER Experiment Name: At_100uM_ABA_Mutants__P Parameter: Organism Value: A. thaliana
  misc_feature: MA Experiment 20000573 PARAMETER Experiment Name: At_100uM_ABA_Mutants__P Parameter: Plant Line Value: CS22 vs. Ler wt
  misc_feature: MA Experiment 20000573 PARAMETER Experiment Name: At_100uM_ABA_Mutants__P Parameter: Timepoint (hr) Value: N/A
  misc_feature: MA Experiment 20000573 PARAMETER Experiment Name: At_100uM_ABA_Mutants__P Parameter: Tissue Value: Whole Plant
  misc_feature: MA Experiment 20000573 PARAMETER Experiment Name: At_100uM_ABA_Mutants__P Parameter: Treatment Value: None
  misc_feature: MA Experiment ID: 20000574 Result: Down-regulated in Transcription
  misc_feature: MA Experiment 20000574 PARAMETER Experiment Name: At_100uM_ABA_Mutants__P Parameter: Organism Value: A. thaliana
  misc_feature: MA Experiment 20000574 PARAMETER Experiment Name: At_100uM_ABA_Mutants__P Parameter: Plant Line Value: CS23 vs. Ler wt
  misc_feature: MA Experiment 20000574 PARAMETER Experiment Name: At_100uM_ABA_Mutants__P Parameter: Timepoint (hr) Value: N/A
  misc_feature: MA Experiment 20000574 PARAMETER Experiment Name: At_100uM_ABA_Mutants__P Parameter: Tissue Value: Whole Plant
  misc_feature: MA Experiment 20000574 PARAMETER Experiment Name: At_100uM_ABA_Mutants__P Parameter: Treatment Value: None
  misc_feature: MA Experiment ID: 20000794 Result: Down-regulated in Transcription
  misc_feature: MA Experiment 20000794 PARAMETER Experiment Name: At_Petals_P Parameter: Age (day) Value: 23-25 days
  misc_feature: MA Experiment 20000794 PARAMETER Experiment Name: At_Petals_P Parameter: Plant Line Value: WS
  misc_feature: MA Experiment 20000794 PARAMETER Experiment Name: At_Petals_P Parameter: Tissue Value: Petals vs. Whole plant
  misc_feature: MA Experiment ID: 20001450 Result: Up-regulated in Transcription
  misc_feature: MA Experiment 20001450 PARAMETER Experiment Name: At_Far-red-induction_P Parameter: Age (day) Value: 7
  misc_feature: MA Experiment 20001450 PARAMETER Experiment Name: At_Far-red-induction_P Parameter: Light Value: Far-red vs. White
  misc_feature: MA Experiment 20001450 PARAMETER Experiment Name: At_Far-red-induction_P Parameter: Organism Value: A. thaliana
  misc_feature: MA Experiment 20001450 PARAMETER Experiment Name: At_Far-red-induction_P Parameter: Plant Line Value: Columbia
  misc_feature: MA Experiment 20001450 PARAMETER Experiment Name: At_Far-red-induction_P Parameter: Timepoint (hr) Value: 8
  misc_feature: MA Experiment 20001450 PARAMETER Experiment Name: At_Far-red-induction_P Parameter: Tissue Value: Whole Plant
  misc_feature: MA Experiment ID: 20001557 Result: Up-regulated in Transcription
  misc_feature: MA Experiment 20001557 PARAMETER Experiment Name: At_Drought_Soil_Dry_P Parameter: Age (day) Value: 27
  misc_feature: MA Experiment 20001557 PARAMETER Experiment Name: At_Drought_Soil_Dry_P Parameter: Organism Value: A. thaliana
  misc_feature: MA Experiment 20001557 PARAMETER Experiment Name: At_Drought_Soil_Dry_P Parameter: Plant Line Value: WS
  misc_feature: MA Experiment 20001557 PARAMETER Experiment Name: At_Drought_Soil_Dry_P Parameter: Post Timepoint (hr) Value: 3
  misc_feature: MA Experiment 20001557 PARAMETER Experiment Name: At_Drought_Soil_Dry_P Parameter: Post-Treatment Value: Re-Water vs. No Drought
  misc_feature: MA Experiment 20001557 PARAMETER Experiment Name: At_Drought_Soil_Dry_P Parameter: Timepoint (day) Value: 13
  misc_feature: MA Experiment 20001557 PARAMETER Experiment Name: At_Drought_Soil_Dry_P Parameter: Treatment Value: Drought vs. No Drought
  misc_feature: MA Experiment ID: 20001558 Result: Up-regulated in Transcription
  misc_feature: MA Experiment 20001558 PARAMETER Experiment Name: At_Drought_Soil_Dry_P Parameter: Age (day) Value: 27
  misc_feature: MA Experiment 20001558 PARAMETER Experiment Name: At_Drought_Soil_Dry_P Parameter: Organism Value: A. thaliana
  misc_feature: MA Experiment 20001558 PARAMETER Experiment Name: At_Drought_Soil_Dry_P Parameter: Plant Line Value: WS
  misc_feature: MA Experiment 20001558 PARAMETER Experiment Name: At_Drought_Soil_Dry_P Parameter: Post Timepoint (hr) Value: 6
  misc_feature: MA Experiment 20001558 PARAMETER Experiment Name: At_Drought_Soil_Dry_P Parameter: Post-Treatment Value: Re-Water vs. No Drought
  misc_feature: MA Experiment 20001558 PARAMETER Experiment Name: At_Drought_Soil_Dry_P Parameter: Timepoint (day) Value: 13
  misc_feature: MA Experiment 20001558 PARAMETER Experiment Name: At_Drought_Soil_Dry_P Parameter: Treatment Value: Drought vs. No Drought
  misc_feature: MA Experiment ID: 20001757 Result: Up-regulated in Transcription
  misc_feature: MA Experiment 20001757 PARAMETER Experiment Name: At_50mM_NH4NO3_L-to-H_P Parameter: Timepoint (hr) Value: 6
  misc_feature: MA Experiment 20001757 PARAMETER Experiment Name: At_50mM_NH4NO3_L-to-H_P Parameter: Tissue Value: Leaf
  misc_feature: MA Experiment 20001757 PARAMETER Experiment Name: At_50mM_NH4NO3_L-to-H_P Parameter: Treatment Value: 50mM NH4NO3 vs 100mM Mannitol
  misc_feature: MA Experiment ID: 20001905 Result: Down-regulated in Transcription
  misc_feature: MA Experiment 20001905 PARAMETER Experiment Name: At_Drought_Reproduction_P Parameter: Age (day) Value: 40
  misc_feature: MA Experiment 20001905 PARAMETER Experiment Name: At_Drought_Reproduction_P Parameter: Organism Value: A. thaliana
  misc_feature: MA Experiment 20001905 PARAMETER Experiment Name: At_Drought_Reproduction_P Parameter: Plant Line Value: WS
  misc_feature: MA Experiment 20001905 PARAMETER Experiment Name: At_Drought_Reproduction_P Parameter: Timepoint (day) Value: 10
  misc_feature: MA Experiment 20001905 PARAMETER Experiment Name: At_Drought_Reproduction_P Parameter: Tissue Value: Rosettes
  misc_feature: MA Experiment 20001905 PARAMETER Experiment Name: At_Drought_Reproduction_P Parameter: Treatment Value: Drought vs. No Drought
  misc_feature: MA Experiment ID: 20001906 Result: Down-regulated in Transcription
  misc_feature: MA Experiment 20001906 PARAMETER Experiment Name: At_Drought_Reproduction_P Parameter: Age (day) Value: 35
  misc_feature: MA Experiment 20001906 PARAMETER Experiment Name: At_Drought_Reproduction_P Parameter: Organism Value: A. thaliana
  misc_feature: MA Experiment 20001906 PARAMETER Experiment Name: At_Drought_Reproduction_P Parameter: Plant Line Value: WS
  misc_feature: MA Experiment 20001906 PARAMETER Experiment Name: At_Drought_Reproduction_P Parameter: Timepoint (day) Value: 5
  misc_feature: MA Experiment 20001906 PARAMETER Experiment Name: At_Drought_Reproduction_P Parameter: Tissue Value: Siliques
  misc_feature: MA Experiment 20001906 PARAMETER Experiment Name: At_Drought_Reproduction_P Parameter: Treatment Value: Drought vs. No Drought
agcatctcgagatcgtcttcctctcacaatctcaaattcttcggaccttttctctctcccctgaagctcccctcactcactcttctccgaggaagaacaacagagacaatggcggttcccaaagccattattctacctatcttgctactcatctgtggtgctgctctcggagctcctgcttctgaaggttatcttcgtaatggaaacttcgaagagtcaccaaagaaaaccgacatgaagaaaacagttctactaggcaaaaacgccttgcccgaatgggaaaccaccggtttcgtcgagtacatcgccggcggtcctcagccaggaggcatgtacttcccagtggctcatggagtccacgccgtgaggctcggaaacgaagctacaatctctcagaagttagaagtgaagccaggttctctctacgcactcacgtttggtgcgtcgagaacttgtgcacaagacgaagttcttagagtctctgtaccttctcagtccggtgacttgccacttcaaacactttacaacagtttcggaggtgacgtgtacgcttgggccttcgtcgccaagacttctcaagttactgtgactttccacaatcctggagttcaagaagatcctgcttgtggtcctttgttggacgctgtcgccattaaagagcttgttcatccaatctacaccagagggaacttggtgaagaatggagggttcgaagaaggtcctcaccgtctagtgaactccacacaaggagtcctactcccacctaaacaagaagatctcacatcacctttacctggttggatcatagagtcactcaaggcagtgaaattcatagactctaagtactttaatgtcccctttggacatgctgcgatcgagctagttgcaggcaaagaaagtgccattgcacaagtcattagaacctctcctggtcaaacttacaccctctccttcgtcgttggagatgctaagaatgactgccatggttccatgatggttgaagcttttgcagccagagatacactcaaagtaccacacacttccgttggtggaggtcatgtcaagaccgcgagtttcaagttcaaggcggttgaggcaagaactagaattactttcttcagtggtttttaccataccaagaagactgatactgtatctttatgtggtcctgtcattgacgagattgtggtttctcatgtcgcttagattaagtttactctttatgacaactgcacttgtgttcttagactggtcatggacttggtgccttgctttgtatgtcttggctccttttggaattgagttattgtcatcaagttaaaatgaatgatatattattgtaatatg

SEQ ID NO: 20833 - protein, 401 aa, Arabidopsis thaliana
  peptide (1)..(401): Ceres Seq. ID no. 13486854
  misc_feature (79)..(401): Pfam Name: Protein of unknown function, DUF642 Pfam Description: Protein of unknown function, DUF642
  misc_feature (79)..(401): Pfam Name: Protein of unknown function, DUF642 Pfam Description: Protein of unknown function, DUF642
  misc_feature (61)..(395): Homolog of NCBI NO: 15239049 NR Description: expressed protein [Arabidopsis thaliana]
  misc_feature (44)..(395): Homolog of NCBI NO: 21537379 NR Description: unknown [Arabidopsis thaliana]
  misc_feature (44)..(395): Homolog of NCBI NO: 15809822 NR Description: AT5g25460/F18G18_200 [Arabidopsis thaliana]
  misc_feature (44)..(395): Homolog of NCBI NO: 15239438 NR Description: expressed protein [Arabidopsis thaliana]
  misc_feature (43)..(395): Homolog of NCBI NO: 7488898 NR Description: hypothetical protein - castor bean
  misc_feature (61)..(395): Homolog of NCBI NO: 15239049 NR Description: expressed protein [Arabidopsis thaliana]
  misc_feature (44)..(395): Homolog of NCBI NO: 15809822 NR Description: AT5g25460/F18G18_200 [Arabidopsis thaliana]
  misc_feature (43)..(395): Homolog of NCBI NO: 7488898 NR Description: hypothetical protein - castor bean
  misc_feature (37)..(401): Homolog of NCBI NO: 18398135 NR Description: expressed protein [Arabidopsis thaliana]
  misc_feature (79)..(401): Homolog of NCBI NO: 12321555 NR Description: unknown protein, 5' partial [Arabidopsis thaliana]
  misc_feature (37)..(398): Homolog of NCBI NO: 15227437 NR Description: expressed protein [Arabidopsis thaliana]
  misc_feature (36)..(397): Homolog of NCBI NO: 30102997 NR Description: unknown protein [Oryza sativa (japonica
  misc_feature (59)..(397): Homolog of NCBI NO: 15227439 NR Description: expressed protein [Arabidopsis thaliana]
  misc_feature (44)..(395): Homolog of NCBI NO: 15239438 NR Description: expressed protein [Arabidopsis thaliana]
  misc_feature (44)..(395): Homolog of NCBI NO: 21537379 NR Description: unknown [Arabidopsis thaliana]
  misc_feature (59)..(397): Homolog of NCBI NO: 15227439 NR Description: expressed protein [Arabidopsis thaliana]
  misc_feature (36)..(397): Homolog of NCBI NO: 30102997 NR Description: unknown protein [Oryza sativa (japonica
  misc_feature (37)..(398): Homolog of NCBI NO: 15227437 NR Description: expressed protein [Arabidopsis thaliana]
  misc_feature (79)..(401): Homolog of NCBI NO: 12321555 NR Description: unknown protein, 5' partial [Arabidopsis thaliana]
  misc_feature (37)..(401): Homolog of NCBI NO: 18398135 NR Description: expressed protein [Arabidopsis thaliana]
SISRSSSSHNLKFFGPFLSPLKLPSLTLLRGRTTETMAVPKAIILPILLLICGAALGAPASEGYLRNGNFEESPKKTDMKKTVLLGKNALPEWETTGFVEYIAGGPQPGGMYFPVAHGVHAVRLGNEATISQKLEVKPGSLYALTFGASRTCAQDEVLRVSVPSQSGDLPLQTLYNSFGGDVYAWAFVAKTSQVTVTFHNPGVQEDPACGPLLDAVAIKELVHPIYTRGNLVKNGGFEEGPHRLVNSTQGVLLPPKQEDLTSPLPGWIIESLKAVKFIDSKYFNVPFGHAAIELVAGKESAIAQVIRTSPGQTYTLSFVVGDAKNDCHGSMMVEAFAARDTLKVPHTSVGGGHVKTASFKFKAVEARTRITFFSGFYHTKKTDTVSLCGPVIDEIVVSHVA

SEQ ID NO: 20834 - protein, 365 aa, Arabidopsis thaliana
  peptide (1)..(365): Ceres Seq. ID no. 13486855
  misc_feature (43)..(365): Pfam Name: Protein of unknown function, DUF642 Pfam Description: Protein of unknown function, DUF642
  misc_feature (43)..(365): Pfam Name: Protein of unknown function, DUF642 Pfam Description: Protein of unknown function, DUF642
  misc_feature (25)..(359): Homolog of NCBI NO: 15239049 NR Description: expressed protein [Arabidopsis thaliana]
  misc_feature (8)..(359): Homolog of NCBI NO: 21537379 NR Description: unknown [Arabidopsis thaliana]
  misc_feature (8)..(359): Homolog of NCBI NO: 15809822 NR Description: AT5g25460/F18G18_200 [Arabidopsis thaliana]
  misc_feature (8)..(359): Homolog of NCBI NO: 15239438 NR Description: expressed protein [Arabidopsis thaliana]
  misc_feature (7)..(359): Homolog of NCBI NO: 7488898 NR Description: hypothetical protein - castor bean
  misc_feature (25)..(359): Homolog of NCBI NO: 15239049 NR Description: expressed protein [Arabidopsis thaliana]
  misc_feature (8)..(359): Homolog of NCBI NO: 15809822 NR Description: AT5g25460/F18G18_200 [Arabidopsis thaliana]
  misc_feature (7)..(359): Homolog of NCBI NO: 7488898 NR Description: hypothetical protein - castor bean
  misc_feature (1)..(365): Homolog of NCBI NO: 18398135 NR Description: expressed protein [Arabidopsis thaliana]
  misc_feature (43)..(365): Homolog of NCBI NO: 12321555 NR Description: unknown protein, 5' partial [Arabidopsis thaliana]
  misc_feature (1)..(362): Homolog of NCBI NO: 15227437 NR Description: expressed protein [Arabidopsis thaliana]
  misc_feature (1)..(361): Homolog of NCBI NO: 30102997 NR Description: unknown protein [Oryza sativa (japonica
  misc_feature (23)..(361): Homolog of NCBI NO: 15227439 NR Description: expressed protein [Arabidopsis thaliana]
  misc_feature (8)..(359): Homolog of NCBI NO: 15239438 NR Description: expressed protein [Arabidopsis thaliana]
  misc_feature (8)..(359): Homolog of NCBI NO: 21537379 NR Description: unknown [Arabidopsis thaliana]
  misc_feature (23)..(361): Homolog of NCBI NO: 15227439 NR Description: expressed protein [Arabidopsis thaliana]
  misc_feature (1)..(361): Homolog of NCBI NO: 30102997 NR Description: unknown protein [Oryza sativa (japonica
  misc_feature (1)..(362): Homolog of NCBI NO: 15227437 NR Description: expressed protein [Arabidopsis thaliana]
  misc_feature (43)..(365): Homolog of NCBI NO: 12321555 NR Description: unknown protein, 5' partial [Arabidopsis thaliana]
  misc_feature (1)..(365): Homolog of NCBI NO: 18398135 NR Description: expressed protein [Arabidopsis thaliana]
MAVPKAIILPILLLICGAALGAPASEGYLRNGNFEESPKKTDMKKTVLLGKNALPEWETTGFVEYIAGGPQPGGMYFPVAHGVHAVRLGNEATISQKLEVKPGSLYALTFGASRTCAQDEVLRVSVPSQSGDLPLQTLYNSFGGDVYAWAFVAKTSQVTVTFHNPGVQEDPACGPLLDAVAIKELVHPIYTRGNLVKNGGFEEGPHRLVNSTQGVLLPPKQEDLTSPLPGWIIESLKAVKFIDSKYFNVPFGHAAIELVAGKESAIAQVIRTSPGQTYTLSFVVGDAKNDCHGSMMVEAFAARDTLKVPHTSVGGGHVKTASFKFKAVEARTRITFFSGFYHTKKTDTVSLCGPVIDEIVVSHVA

SEQ ID NO: 20835 - protein, 323 aa, Arabidopsis thaliana
  peptide (1)..(323): Ceres Seq. ID no. 13486856
  misc_feature (1)..(323): Pfam Name: Protein of unknown function, DUF642 Pfam Description: Protein of unknown function, DUF642
  misc_feature (1)..(323): Pfam Name: Protein of unknown function, DUF642 Pfam Description: Protein of unknown function, DUF642
  misc_feature (1)..(317): Homolog of NCBI NO: 15239049 NR Description: expressed protein [Arabidopsis thaliana]
  misc_feature (1)..(317): Homolog of NCBI NO: 21537379 NR Description: unknown [Arabidopsis thaliana]
  misc_feature (1)..(317): Homolog of NCBI NO: 15809822 NR Description: AT5g25460/F18G18_200 [Arabidopsis thaliana]
  misc_feature (1)..(317): Homolog of NCBI NO: 15239438 NR Description: expressed protein [Arabidopsis thaliana]
  misc_feature (1)..(317): Homolog of NCBI NO: 7488898 NR Description: hypothetical protein - castor bean
  misc_feature (1)..(317): Homolog of NCBI NO: 15239049 NR Description: expressed protein [Arabidopsis thaliana]
  misc_feature (1)..(317): Homolog of NCBI NO: 15809822 NR Description: AT5g25460/F18G18_200 [Arabidopsis thaliana]
  misc_feature (1)..(317): Homolog of NCBI NO: 7488898 NR Description: hypothetical protein - castor bean
  misc_feature (1)..(323): Homolog of NCBI NO: 18398135 NR Description: expressed protein [Arabidopsis thaliana]
  misc_feature (1)..(323): Homolog of NCBI NO: 12321555 NR Description: unknown protein, 5' partial [Arabidopsis thaliana]
  misc_feature (1)..(320): Homolog of NCBI NO: 15227437 NR Description: expressed protein [Arabidopsis thaliana]
  misc_feature (1)..(319): Homolog of NCBI NO: 30102997 NR Description: unknown protein [Oryza sativa (japonica
  misc_feature (1)..(319): Homolog of NCBI NO: 15227439 NR Description: expressed protein [Arabidopsis thaliana]
  misc_feature (1)..(317): Homolog of NCBI NO: 15239438 NR Description: expressed protein [Arabidopsis thaliana]
  misc_feature (1)..(317): Homolog of NCBI NO: 21537379 NR Description: unknown [Arabidopsis thaliana]
  misc_feature (1)..(319): Homolog of NCBI NO: 15227439 NR Description: expressed protein [Arabidopsis thaliana]
  misc_feature (1)..(319): Homolog of NCBI NO: 30102997 NR Description: unknown protein [Oryza sativa (japonica
  misc_feature (1)..(320): Homolog of NCBI NO: 15227437 NR Description: expressed protein [Arabidopsis thaliana]
  misc_feature (1)..(323): Homolog of NCBI NO: 12321555 NR Description: unknown protein, 5' partial [Arabidopsis thaliana]
  misc_feature (1)..(323): Homolog of NCBI NO: 18398135 NR Description: expressed protein [Arabidopsis thaliana]
MKKTVLLGKNALPEWETTGFVEYIAGGPQPGGMYFPVAHGVHAVRLGNEATISQKLEVKPGSLYALTFGASRTCAQDEVLRVSVPSQSGDLPLQTLYNSFGGDVYAWAFVAKTSQVTVTFHNPGVQEDPACGPLLDAVAIKELVHPIYTRGNLVKNGGFEEGPHRLVNSTQGVLLPPKQEDLTSPLPGWIIESLKAVKFIDSKYFNVPFGHAAIELVAGKESAIAQVIRTSPGQTYTLSFVVGDAKNDCHGSMMVEAFAARDTLKVPHTSVGGGHVKTASFKFKAVEARTRITFFSGFYHTKKTDTVSLCGPVIDEIVVSHVA

SEQ ID NO: 20836 - DNA, 1534 bp, Arabidopsis thaliana
  misc_feature (1)..(1534): Ceres Seq. ID no. 13492473
  misc_feature: MA Experiment ID: 108434 Result: Down-regulated in Transcription
  misc_feature: MA Experiment 108434 PARAMETER Experiment Name: At_Root_Tips_cDNA_P Parameter: Tissue Value: Root Tips
  misc_feature: MA Experiment ID: 108577 Result: Down-regulated in Transcription
  misc_feature: MA Experiment 108577 PARAMETER Experiment Name: At_42deg_Heat_cDNA_P Parameter: Temperature (deg C) Value: 42 vs. 22
  misc_feature: MA Experiment 108577 PARAMETER Experiment Name: At_42deg_Heat_cDNA_P Parameter: Timepoint (hr) Value: 6
  misc_feature: MA Experiment 108577 PARAMETER Experiment Name: At_42deg_Heat_cDNA_P Parameter: Tissue Value: Aerial
  misc_feature: MA Experiment ID: 108585 Result: Up-regulated in Transcription
  misc_feature: MA Experiment 108585 PARAMETER Experiment Name: At_5mM_NaNP_cDNA_P Parameter: Timepoint (hr) Value: 6
  misc_feature: MA Experiment 108585 PARAMETER Experiment Name: At_5mM_NaNP_cDNA_P Parameter: Tissue Value: Aerial
  misc_feature: MA Experiment 108585 PARAMETER Experiment Name: At_5mM_NaNP_cDNA_P Parameter: Treatment Value: null
  misc_feature: MA Experiment ID: 20000113 Result: Down-regulated in Transcription
  misc_feature: MA Experiment 20000113 PARAMETER Experiment Name: At_42deg_Heat_cDNA_P Parameter: Temperature (deg C) Value: 42 vs. 22
  misc_feature: MA Experiment 20000113 PARAMETER Experiment Name: At_42deg_Heat_cDNA_P Parameter: Timepoint (hr) Value: 8
  misc_feature: MA Experiment 20000113 PARAMETER Experiment Name: At_42deg_Heat_cDNA_P Parameter: Tissue Value: Aerial
  misc_feature: MA Experiment ID: 20000144 Result: Down-regulated in Transcription
  misc_feature: MA Experiment 20000144 PARAMETER Experiment Name: At_42deg_Heat_cDNA_P Parameter: Temperature (deg C) Value: 42 vs. 22
  misc_feature: MA Experiment 20000144 PARAMETER Experiment Name: At_42deg_Heat_cDNA_P Parameter: Timepoint (hr) Value: 1
  misc_feature: MA Experiment 20000144 PARAMETER Experiment Name: At_42deg_Heat_cDNA_P Parameter: Tissue Value: Aerial
  misc_feature: MA Experiment ID: 20000171 Result: Down-regulated in Transcription
  misc_feature: MA Experiment 20000171 PARAMETER Experiment Name: At_42deg_Heat_P Parameter: Age (day) Value: 14
  misc_feature: MA Experiment 20000171 PARAMETER Experiment Name: At_42deg_Heat_P Parameter: Organism Value: A. thaliana
  misc_feature: MA Experiment 20000171 PARAMETER Experiment Name: At_42deg_Heat_P Parameter: Plant Line Value: WS
  misc_feature: MA Experiment 20000171 PARAMETER Experiment Name: At_42deg_Heat_P Parameter: Temperature (deg C) Value: 42 vs. 22
  misc_feature: MA Experiment 20000171 PARAMETER Experiment Name: At_42deg_Heat_P Parameter: Timepoint (hr) Value: 1
  misc_feature: MA Experiment 20000171 PARAMETER Experiment Name: At_42deg_Heat_P Parameter: Tissue Value: Aerial
  misc_feature: MA Experiment ID: 20000173 Result: Down-regulated in Transcription
  misc_feature: MA Experiment 20000173 PARAMETER Experiment Name: At_42deg_Heat_P Parameter: Age (day) Value: 14
  misc_feature: MA Experiment 20000173 PARAMETER Experiment Name: At_42deg_Heat_P Parameter: Organism Value: A. thaliana
  misc_feature: MA Experiment 20000173 PARAMETER Experiment Name: At_42deg_Heat_P Parameter: Plant Line Value: WS
  misc_feature: MA Experiment 20000173 PARAMETER Experiment Name: At_42deg_Heat_P Parameter: Temperature (deg C) Value: 42 vs. 22
  misc_feature: MA Experiment 20000173 PARAMETER Experiment Name: At_42deg_Heat_P Parameter: Timepoint (hr) Value: 6
  misc_feature: MA Experiment 20000173 PARAMETER Experiment Name: At_42deg_Heat_P Parameter: Tissue Value: Aerial
  misc_feature: MA Experiment ID: 20000184 Result: Down-regulated in Transcription
  misc_feature: MA Experiment 20000184 PARAMETER Experiment Name: At_Shoots__P Parameter: Age (day) Value: 7
  misc_feature: MA Experiment 20000184 PARAMETER Experiment Name: At_Shoots__P Parameter: Tissue Value: Shoots vs. Whole Plant
  misc_feature: MA Experiment ID: 20000185 Result: Down-regulated in Transcription
  misc_feature: MA Experiment 20000185 PARAMETER Experiment Name: At_Roots__P Parameter: Age (day) Value: 7 vs. 21
  misc_feature: MA Experiment 20000185 PARAMETER Experiment Name: At_Roots__P Parameter: Organism Value: A. thaliana
  misc_feature: MA Experiment 20000185 PARAMETER Experiment Name: At_Roots__P Parameter: Tissue Value: Roots vs. Whole Plant
  misc_feature: MA Experiment ID: 20000234 Result: Down-regulated in Transcription
  misc_feature: MA Experiment 20000234 PARAMETER Experiment Name: At_Siliques_P Parameter: Age (day) Value: 21
  misc_feature: MA Experiment 20000234 PARAMETER Experiment Name: At_Siliques_P Parameter: Organism Value: A. thaliana
  misc_feature: MA Experiment 20000234 PARAMETER Experiment Name: At_Siliques_P Parameter: Plant Line Value: WS
  misc_feature: MA Experiment 20000234 PARAMETER Experiment Name: At_Siliques_P Parameter: Tissue Value: Less Than 5mm Siliques vs. Whole Plant
  misc_feature: MA Experiment ID: 20000235 Result: Down-regulated in Transcription
  misc_feature: MA Experiment 20000235 PARAMETER Experiment Name: At_Siliques_P Parameter: Age (day) Value: 21
  misc_feature: MA Experiment 20000235 PARAMETER Experiment Name: At_Siliques_P Parameter: Organism Value: A. thaliana
  misc_feature: MA Experiment 20000235 PARAMETER Experiment Name: At_Siliques_P Parameter: Plant Line Value: WS
  misc_feature: MA Experiment 20000235 PARAMETER Experiment Name: At_Siliques_P Parameter: Tissue Value: 5-10mm Siliques vs. Whole Plant
  misc_feature: MA Experiment ID: 20000264 Result: Down-regulated in Transcription
  misc_feature: MA Experiment 20000264 PARAMETER Experiment Name: At_Open_Flower_P Parameter: Age (day) Value: 21
  misc_feature: MA Experiment 20000264 PARAMETER Experiment Name: At_Open_Flower_P Parameter: Plant Line Value: WS
  misc_feature: MA Experiment 20000264 PARAMETER Experiment Name: At_Open_Flower_P Parameter: Tissue Value: Open Flower vs. Whole Plant
  misc_feature: MA Experiment ID: 20000265 Result: Down-regulated in Transcription
  misc_feature: MA Experiment 20000265 PARAMETER Experiment Name: At_Open_Flower_P Parameter: Age (day) Value: 21
  misc_feature: MA Experiment 20000265 PARAMETER Experiment Name: At_Open_Flower_P Parameter: Plant Line Value: WS
  misc_feature: MA Experiment 20000265 PARAMETER Experiment Name: At_Open_Flower_P Parameter: Tissue Value: Closed Flower vs. Whole Plant
  misc_feature: MA Experiment ID: 20000286 Result: Down-regulated in Transcription
  misc_feature: MA Experiment 20000286 PARAMETER Experiment Name: At_Open_Flower_P Parameter: Age (day) Value: 21
  misc_feature: MA Experiment 20000286 PARAMETER Experiment Name: At_Open_Flower_P Parameter: Plant Line Value: WS
  misc_feature: MA Experiment 20000286 PARAMETER Experiment Name: At_Open_Flower_P Parameter: Tissue Value: Half Open vs. Whole Plant
  misc_feature: MA Experiment ID: 20000438 Result: Down-regulated in Transcription
  misc_feature: MA Experiment 20000438 PARAMETER Experiment Name: At_Shoots__P Parameter: Age (day) Value: 14
  misc_feature: MA Experiment 20000438 PARAMETER Experiment Name: At_Shoots__P Parameter: Tissue Value: Shoots vs. Whole Plant
  misc_feature: MA Experiment ID: 20000439 Result: Down-regulated in Transcription
  misc_feature: MA Experiment 20000439 PARAMETER Experiment Name: At_Roots__P Parameter: Age (day) Value: 14 vs. 21
  misc_feature: MA Experiment 20000439 PARAMETER Experiment Name: At_Roots__P Parameter: Organism Value: A. thaliana
  misc_feature: MA Experiment 20000439 PARAMETER Experiment Name: At_Roots__P Parameter: Tissue Value: Roots vs. Whole Plant
  misc_feature: MA Experiment ID: 20000574 Result: Down-regulated in Transcription
  misc_feature: MA Experiment 20000574 PARAMETER Experiment Name: At_100uM_ABA_Mutants__P Parameter: Organism Value: A. thaliana
  misc_feature: MA Experiment 20000574 PARAMETER Experiment Name: At_100uM_ABA_Mutants__P Parameter: Plant Line Value: CS23 vs. Ler wt
  misc_feature: MA Experiment 20000574 PARAMETER Experiment Name: At_100uM_ABA_Mutants__P Parameter: Timepoint (hr) Value: N/A
  misc_feature: MA Experiment 20000574 PARAMETER Experiment Name: At_100uM_ABA_Mutants__P Parameter: Tissue Value: Whole Plant
  misc_feature: MA Experiment 20000574 PARAMETER Experiment Name: At_100uM_ABA_Mutants__P Parameter: Treatment Value: None
  misc_feature: MA Experiment ID: 20000794 Result: Down-regulated in Transcription
  misc_feature: MA Experiment 20000794 PARAMETER Experiment Name: At_Petals_P Parameter: Age (day) Value: 23-25 days
  misc_feature: MA Experiment 20000794 PARAMETER Experiment Name: At_Petals_P Parameter: Plant Line Value: WS
  misc_feature: MA Experiment 20000794 PARAMETER Experiment Name: At_Petals_P Parameter: Tissue Value: Petals vs. Whole plant
  misc_feature: MA Experiment ID: 20001247 Result: Up-regulated in Transcription
  misc_feature: MA Experiment 20001247 PARAMETER Experiment Name: At_Far-red-induction_P Parameter: Age (day) Value: 7
  misc_feature: MA Experiment 20001247 PARAMETER Experiment Name: At_Far-red-induction_P Parameter: Light Value: Far-red vs. White
  misc_feature: MA Experiment 20001247 PARAMETER Experiment Name: At_Far-red-induction_P Parameter: Organism Value: A. thaliana
  misc_feature: MA Experiment 20001247 PARAMETER Experiment Name: At_Far-red-induction_P Parameter: Plant Line Value: Columbia
  misc_feature: MA Experiment 20001247 PARAMETER Experiment Name: At_Far-red-induction_P Parameter: Timepoint (hr) Value: 1
  misc_feature: MA Experiment 20001247 PARAMETER Experiment Name: At_Far-red-induction_P Parameter: Tissue Value: Whole Plant
  misc_feature: MA Experiment ID: 20001560 Result: Down-regulated in Transcription
  misc_feature: MA Experiment 20001560 PARAMETER Experiment Name: At_Drought_Soil_Dry_P Parameter: Age (day) Value: 28
  misc_feature: MA Experiment 20001560 PARAMETER Experiment Name: At_Drought_Soil_Dry_P Parameter: Organism Value: A. thaliana
  misc_feature: MA Experiment 20001560 PARAMETER Experiment Name: At_Drought_Soil_Dry_P Parameter: Plant Line Value: WS
  misc_feature: MA Experiment 20001560 PARAMETER Experiment Name: At_Drought_Soil_Dry_P Parameter: Post Timepoint (hr) Value: None
  misc_feature: MA Experiment 20001560 PARAMETER Experiment Name: At_Drought_Soil_Dry_P Parameter: Post-Treatment Value: None
  misc_feature: MA Experiment 20001560 PARAMETER Experiment Name: At_Drought_Soil_Dry_P Parameter: Timepoint (day) Value: 14
  misc_feature: MA Experiment 20001560 PARAMETER Experiment Name: At_Drought_Soil_Dry_P Parameter: Treatment Value: Drought vs. No Drought
gctcaattttctttctttctttctttctttctctgggagtttgggattttcttaagggtctttttcaatctcgctccattttgtacgcatagaactgggtttgtgtttacacacataaagctcttatcttttttcttctttcaatcgagaagattatagagctgagtgactgattggtggtttcttggagttttaatgggaggttgtttcagcaatcggattaaaacagatattgcttccagtacatggctaagttcgaaattcttgagtagagatgggagcaagggctcgtcgaccgcttccttctcttatatgcctcgaacagaaggcgagatcttgcaaaatgctaatctcaagaactttagtctcagtgaactgaaatctgcaactaggaatttccggcctgatagtgtggttggtgaaggtggatttggttgcgttttcaaaggctggatcgatgagtcctctctcgctccttctaaaccggggaccgggattgtcattgctgtgaaaagacttaaccaagaagggtttcaaggtcatcgagagtggctggctgagatcaattatttaggccagctggatcatcctaaccttgtgaaactgattggatactgcttggaagaggagcacaggcttcttgtttacgagtttatgactcgtggtagtcttgagaatcacttattcagaagaggaacattctatcagccactttcatggaacacgcgggttcgtatggctcttggtgcagctagaggacttgcttttcttcacaatgctcaaccgcaagttatataccgagacttcaaagcatctaacatcttgctagattcgaactacaacgcaaagctttcggatttcggtttggctagagatggtccaatgggtgacaacagccatgtttctaccagagtcatgggaactcagggatacgctgctccagaatatctagctacaggtcatttatcggtgaagagcgatgtatacagttttggggttgtgttactggagttgttatcaggaagacgagcaattgacaagaatcaaccagtaggagaacacaatctcgtggattgggcaagaccctacttaacaaacaagagaagacttctgcgagtgatggatcctcgtctccaaggtcaatactcactaacccgagctttgaaaattgcagttcttgcactcgattgcatatctatagatgccaagagtagaccgaccatgaacgaaatcgtcaagacaatggaagaacttcatatccagaaggaagcatcaaaagagcagcagaatcctcaaatcagcattgacaacatcatcaacaaatctccacaagctgtgaattatcctaggccttcaattatgtaacaatcctaggcgagctatttacccgggttttagagatgtatagactctttaccttctgtctgtttagatatgttgtttggtagtaacaaaagagctggcaatgtaagggagagaaggaaacttactagttgtaaacttaggttctcttacaacgttcacatgttatctc

SEQ ID NO: 20837 - protein, 389 aa, Arabidopsis thaliana
  peptide (1)..(389): Ceres Seq. ID no. 13492474
  misc_feature (1)..(366): Homolog of NCBI NO: 15225520 NR Description: protein kinase, putative [Arabidopsis thaliana]
  misc_feature (1)..(389): Homolog of NCBI NO: 34897424 NR Description: putative protein kinase [Oryza sativa (japonica
  misc_feature (1)..(368): Homolog of NCBI NO: 14719339 NR Description: putative protein kinase [Oryza sativa]
  misc_feature (255)..(356): Homolog of NCBI NO: 8778537 NR Description: F22G5.5 [Arabidopsis thaliana]
  misc_feature (1)..(273): Homolog of NCBI NO: 8778537 NR Description: F22G5.5 [Arabidopsis thaliana]
  misc_feature (1)..(380): Homolog of NCBI NO: 15227001 NR Description: protein kinase (APK1b) [Arabidopsis thaliana]
  misc_feature (1)..(356): Homolog of NCBI NO: 15222437 NR Description: protein kinase (APK1a) [Arabidopsis thaliana]
  misc_feature (1)..(367): Homolog of NCBI NO: 34906046 NR Description: putative serine/threonine-specific protein kinase
  misc_feature (1)..(389): Homolog of NCBI NO: 166809 NR Description: protein kinase
  misc_feature (1)..(389): Homolog of NCBI NO: 15241749 NR Description: protein kinase, putative [Arabidopsis thaliana]
MGGCFSNRIKTDIASSTWLSSKFLSRDGSKGSSTASFSYMPRTEGEILQNANLKNFSLSELKSATRNFRPDSVVGEGGFGCVFKGWIDESSLAPSKPGTGIVIAVKRLNQEGFQGHREWLAEINYLGQLDHPNLVKLIGYCLEEEHRLLVYEFMTRGSLENHLFRRGTFYQPLSWNTRVRMALGAARGLAFLHNAQPQVIYRDFKASNILLDSNYNAKLSDFGLARDGPMGDNSHVSTRVMGTQGYAAPEYLATGHLSVKSDVYSFGVVLLELLSGRRAIDKNQPVGEHNLVDWARPYLTNKRRLLRVMDPRLQGQYSLTRALKIAVLALDCISIDAKSRPTMNEIVKTMEELHIQKEASKEQQNPQISIDNIINKSPQAVNYPRPSIM

SEQ ID NO: 20838 - protein, 350 aa, Arabidopsis thaliana
  peptide (1)..(350): Ceres Seq. ID no. 13492475
  misc_feature (1)..(327): Homolog of NCBI NO: 15225520 NR Description: protein kinase, putative [Arabidopsis thaliana]
  misc_feature (1)..(350): Homolog of NCBI NO: 34897424 NR Description: putative protein kinase [Oryza sativa (japonica
  misc_feature (1)..(329): Homolog of NCBI NO: 14719339 NR Description: putative protein kinase [Oryza sativa]
  misc_feature (216)..(317): Homolog of NCBI NO: 8778537 NR Description: F22G5.5 [Arabidopsis thaliana]
  misc_feature (1)..(234): Homolog of NCBI NO: 8778537 NR Description: F22G5.5 [Arabidopsis thaliana]
  misc_feature (1)..(341): Homolog of NCBI NO: 15227001 NR Description: protein kinase (APK1b) [Arabidopsis thaliana]
  misc_feature (1)..(317): Homolog of NCBI NO: 15222437 NR Description: protein kinase (APK1a) [Arabidopsis thaliana]
  misc_feature (1)..(328): Homolog of NCBI NO: 34906046 NR Description: putative serine/threonine-specific protein kinase
  misc_feature (1)..(350): Homolog of NCBI NO: 166809 NR Description: protein kinase
  misc_feature (1)..(350): Homolog of NCBI NO: 15241749 NR Description: protein kinase, putative [Arabidopsis thaliana]
MPRTEGEILQNANLKNFSLSELKSATRNFRPDSVVGEGGFGCVFKGWIDESSLAPSKPGTGIVIAVKRLNQEGFQGHREWLAEINYLGQLDHPNLVKLIGYCLEEEHRLLVYEFMTRGSLENHLFRRGTFYQPLSWNTRVRMALGAARGLAFLHNAQPQVIYRDFKASNILLDSNYNAKLSDFGLARDGPMGDNSHVSTRVMGTQGYAAPEYLATGHLSVKSDVYSFGVVLLELLSGRRAIDKNQPVGEHNLVDWARPYLTNKRRLLRVMDPRLQGQYSLTRALKIAVLALDCISIDAKSRPTMNEIVKTMEELHIQKEASKEQQNPQISIDNIINKSPQAVNYPRPSIM

SEQ ID NO: 20839 - protein, 236 aa, Arabidopsis thaliana
  peptide (1)..(236): Ceres Seq. ID no. 13492476
  misc_feature (1)..(213): Homolog of NCBI NO: 15225520 NR Description: protein kinase, putative [Arabidopsis thaliana]
  misc_feature (1)..(236): Homolog of NCBI NO: 34897424 NR Description: putative protein kinase [Oryza sativa (japonica
  misc_feature (1)..(215): Homolog of NCBI NO: 14719339 NR Description: putative protein kinase [Oryza sativa]
  misc_feature (102)..(203): Homolog of NCBI NO: 8778537 NR Description: F22G5.5 [Arabidopsis thaliana]
  misc_feature (1)..(120): Homolog of NCBI NO: 8778537 NR Description: F22G5.5 [Arabidopsis thaliana]
  misc_feature (1)..(227): Homolog of NCBI NO: 15227001 NR Description: protein kinase (APK1b) [Arabidopsis thaliana]
  misc_feature (1)..(203): Homolog of NCBI NO: 15222437 NR Description: protein kinase (APK1a) [Arabidopsis thaliana]
  misc_feature (1)..(214): Homolog of NCBI NO: 34906046 NR Description: putative serine/threonine-specific protein kinase
  misc_feature (1)..(236): Homolog of NCBI NO: 166809 NR Description: protein kinase
  misc_feature (1)..(236): Homolog of NCBI NO: 15241749 NR Description: protein kinase, putative [Arabidopsis thaliana]
MTRGSLENHLFRRGTFYQPLSWNTRVRMALGAARGLAFLHNAQPQVIYRDFKASNILLDSNYNAKLSDFGLARDGPMGDNSHVSTRVMGTQGYAAPEYLATGHLSVKSDVYSFGVVLLELLSGRRAIDKNQPVGEHNLVDWARPYLTNKRRLLRVMDPRLQGQYSLTRALKIAVLALDCISIDAKSRPTMNEIVKTMEELHIQKEASKEQQNPQISIDNIINKSPQAVNYPRPSIM

SEQ ID NO: 20840 - DNA, 2064 bp, Arabidopsis thaliana
  misc_feature (1)..(2064): Ceres Seq. ID no. 13494142
  misc_feature: MA Experiment ID: 20000227 Result: Up-regulated in Transcription
  misc_feature: MA Experiment 20000227 PARAMETER Experiment Name: At_Root-Tips-vs-Tops_P Parameter: Tissue Value: Root Tips vs. Root Tops
  misc_feature: MA Experiment ID: 20000234 Result: Up-regulated in Transcription
  misc_feature: MA Experiment 20000234 PARAMETER Experiment Name: At_Siliques_P Parameter: Age (day) Value: 21
  misc_feature: MA Experiment 20000234 PARAMETER Experiment Name: At_Siliques_P Parameter: Organism Value: A. thaliana
  misc_feature: MA Experiment 20000234 PARAMETER Experiment Name: At_Siliques_P Parameter: Plant Line Value: WS
  misc_feature: MA Experiment 20000234 PARAMETER Experiment Name: At_Siliques_P Parameter: Tissue Value: Less Than 5mm Siliques vs. Whole Plant
  misc_feature: MA Experiment ID: 20000235 Result: Up-regulated in Transcription
  misc_feature: MA Experiment 20000235 PARAMETER Experiment Name: At_Siliques_P Parameter: Age (day) Value: 21
  misc_feature: MA Experiment 20000235 PARAMETER Experiment Name: At_Siliques_P Parameter: Organism Value: A. thaliana
  misc_feature: MA Experiment 20000235 PARAMETER Experiment Name: At_Siliques_P Parameter: Plant Line Value: WS
  misc_feature: MA Experiment 20000235 PARAMETER Experiment Name: At_Siliques_P Parameter: Tissue Value: 5-10mm Siliques vs. Whole Plant
  misc_feature: MA Experiment ID: 20000437 Result: Down-regulated in Transcription
  misc_feature: MA Experiment 20000437 PARAMETER Experiment Name: At_Drought_P Parameter: Age (day) Value: 8
  misc_feature: MA Experiment 20000437 PARAMETER Experiment Name: At_Drought_P Parameter: Organism Value: A. thaliana
  misc_feature: MA Experiment 20000437 PARAMETER Experiment Name: At_Drought_P Parameter: Plant Line Value: WS
  misc_feature: MA Experiment 20000437 PARAMETER Experiment Name: At_Drought_P Parameter: Timepoint (hr) Value: 24
  misc_feature: MA Experiment 20000437 PARAMETER Experiment Name: At_Drought_P Parameter: Tissue Value: Whole Plant
  misc_feature: MA Experiment 20000437 PARAMETER Experiment Name: At_Drought_P Parameter: Treatment Value: Drought vs. No Drought
  misc_feature: MA Experiment ID: 20000495 Result: Up-regulated in Transcription
  misc_feature: MA Experiment 20000495 PARAMETER Experiment Name: At_Guard_Cells_P Parameter: Harvest Date Value: 8/2/2002
  misc_feature: MA Experiment 20000495 PARAMETER Experiment Name: At_Guard_Cells_P Parameter: Organism Value: A. thaliana
  misc_feature: MA Experiment 20000495 PARAMETER Experiment Name: At_Guard_Cells_P Parameter: Tissue Value: Guard Cells vs. Leaves
  misc_feature: MA Experiment ID: 20001557 Result: Up-regulated in Transcription
  misc_feature: MA Experiment 20001557 PARAMETER Experiment Name: At_Drought_Soil_Dry_P Parameter: Age (day) Value: 27
  misc_feature: MA Experiment 20001557 PARAMETER Experiment Name: At_Drought_Soil_Dry_P Parameter: Organism Value: A. thaliana
  misc_feature: MA Experiment 20001557 PARAMETER Experiment Name: At_Drought_Soil_Dry_P Parameter: Plant Line Value: WS
  misc_feature: MA Experiment 20001557 PARAMETER Experiment Name: At_Drought_Soil_Dry_P Parameter: Post Timepoint (hr) Value: 3
  misc_feature: MA Experiment 20001557 PARAMETER Experiment Name: At_Drought_Soil_Dry_P Parameter: Post-Treatment Value: Re-Water vs. No Drought
  misc_feature: MA Experiment 20001557 PARAMETER Experiment Name: At_Drought_Soil_Dry_P Parameter: Timepoint (day) Value: 13
  misc_feature: MA Experiment 20001557 PARAMETER Experiment Name: At_Drought_Soil_Dry_P Parameter: Treatment Value: Drought vs. No Drought
  misc_feature: MA Experiment ID: 20001905 Result: Down-regulated in Transcription
  misc_feature: MA Experiment 20001905 PARAMETER Experiment Name: At_Drought_Reproduction_P Parameter: Age (day) Value: 40
  misc_feature: MA Experiment 20001905 PARAMETER Experiment Name: At_Drought_Reproduction_P Parameter: Organism Value: A. thaliana
  misc_feature: MA Experiment 20001905 PARAMETER Experiment Name: At_Drought_Reproduction_P Parameter: Plant Line Value: WS
  misc_feature: MA Experiment 20001905 PARAMETER Experiment Name: At_Drought_Reproduction_P Parameter: Timepoint (day) Value: 10
  misc_feature: MA Experiment 20001905 PARAMETER Experiment Name: At_Drought_Reproduction_P Parameter: Tissue Value: Rosettes
  misc_feature: MA Experiment 20001905 PARAMETER Experiment Name: At_Drought_Reproduction_P Parameter: Treatment Value: Drought vs. No Drought
agaaacaagaaaaagaaagatgggagatttaatggctcggtctctctcttgatctgacgacgacgatgatggtgaagcttcgcaatcttgttcttttcttcatgctcctcaccgtcgttgctcatatccttctctacaccgatcccgctgcctccttcaagacccccttttctaaacgcgatttcctcgaggacgtaaccgccttgactttcaattccgatgagaatcgtttgaatcttcttcctcgggaatctcccgctgtgctcagaggaggactcgtcggtgctgtctattccgataagaattcacggcggctagaccaattgtctgctcgagttctttccgccaccgacgatgatactcactcacatactgacatttccatcaaacaagtcactcatgatgcagcctcagactcgcatattaatagggaaaatatgcatgttcaattgacccaacaaacctctgaaaaagttgatgagcaaccagagcctaatgcttttggagctaagaaagatactggaaacgtgttgatgcctgatgctcaagtgaggcatcttaaagatcagcttattagggcaaaggtttatctttcccttccatctgcaaaggccaatgctcattttgtgagagagcttcgactccgtattaaagaagttcaacgggcacttgcagatgcctccaaggattcggatctgccaaagactgctatagaaaagctaaaagcaatggagcaaacactggccaaaggcaagcagatccaagatgactgttctacagtggtcaagaagctacgtgctatgctccactccgcagatgagcagctacgggtccataagaagcaaaccatgtttttgactcaattgactgctaagaccattcctaaaggacttcactgccttcctctgcgcctcactacagactattatgctttaaattcatctgaacaacaatttccaaatcaggagaaactagaagatactcagctgtatcactatgcccttttctctgataatgttttggctacgtcagttgttgttaactctaccataaccaatgcaaagcatcccttaaagcatgtcttccacatcgtcacagacagactcaattatgcggcaatgaggatgtggttcctggacaatccacctggcaaagccaccatccaggttcagaatgttgaagaatttacatggctgaattcaagctacagtcccgttctcaaacagcttagttctagatcgatgatagattattacttcagagcccaccatacaaattcagacaccaacttgaagttccggaatccaaaatacttatcgatccttaatcatcttcgtttttacttgcctgagatctttcccaagctcagcaaagtgctcttcttggatgatgatatagttgtgcagaaggacctttctggtctttggtcagttgatctgaaaggtaatgttaacggtgctgtagagacgtgtggggaaagctttcatcgctttgaccgttatctgaacttctcaaatccactcatttccaagaactttgaccctcgagcttgtggttgggcgtatggtatgaatgtctttgatctggatgaatggaagaggcaaaacatcacagaagtttatcatcgatggcaggatctgaatcaagaccgagaattgtggaagctagggacgttgccgcctggtctaatcacattttggagacgaacatatccgctagaccggaaatggcacatactagggcttggatacaacccgagtgtgaaccaaagggatattgagagggcagccgtgatacactataatggcaacctcaaaccatggctagagattgggattccaagatacagaggcttctggtcaaagcatgtagactatgagcacgtttatctcagagaatgcaacatcaatccttagaattagagtctgttgtgagggcaatattatacgtttataatctgacgagatgatcattacatgaaattgtatatgtcacggtaaaaggagttccaataggcacgaccgatgttattattgcaacatatatatcaacaagaggaatgac

SEQ ID NO: 20841 - protein, 616 aa, Arabidopsis thaliana
  peptide (1)..(616): Ceres Seq. ID no. 13494143
  misc_feature (152)..(615): Homolog of NCBI NO: 18399484 NR Description: glycosyltransferase family 8 [Arabidopsis
  misc_feature (487)..(614): Homolog of NCBI NO: 15227235 NR Description: glycosyltransferase family 8 [Arabidopsis
  misc_feature (134)..(473): Homolog of NCBI NO: 15227235 NR Description: glycosyltransferase family 8 [Arabidopsis
  misc_feature (159)..(553): Homolog of NCBI NO: 14517362 NR Description: AT3g61130/T20K12_30 [Arabidopsis thaliana]
  misc_feature (159)..(612): Homolog of NCBI NO: 37533460 NR Description: hypothetical protein [Oryza sativa (japonica
  misc_feature (159)..(615): Homolog of NCBI NO: 30691875 NR Description: glycosyltransferase family 8 [Arabidopsis
  misc_feature (159)..(615): Homolog of NCBI NO: 7485958 NR Description: hypothetical protein F22I13.40 - Arabidopsis
  misc_feature (159)..(615): Homolog of NCBI NO: 7271113 NR Description: 68 kDa protein [Cicer arietinum]
  misc_feature (159)..(615): Homolog of NCBI NO: 15233046 NR Description: glycosyltransferase family 8 [Arabidopsis
  misc_feature (82)..(616): Homolog of NCBI NO: 38423965 NR Description: putative glycosyltransferase
MMVKLRNLVLFFMLLTVVAHILLYTDPAASFKTPFSKRDFLEDVTALTFNSDENRLNLLPRESPAVLRGGLVGAVYSDKNSRRLDQLSARVLSATDDDTHSHTDISIKQVTHDAASDSHINRENMHVQLTQQTSEKVDEQPEPNAFGAKKDTGNVLMPDAQVRHLKDQLIRAKVYLSLPSAKANAHFVRELRLRIKEVQRALADASKDSDLPKTAIEKLKAMEQTLAKGKQIQDDCSTVVKKLRAMLHSADEQLRVHKKQTMFLTQLTAKTIPKGLHCLPLRLTTDYYALNSSEQQFPNQEKLEDTQLYHYALFSDNVLATSVVVNSTITNAKHPLKHVFHIVTDRLNYAAMRMWFLDNPPGKATIQVQNVEEFTWLNSSYSPVLKQLSSRSMIDYYFRAHHTNSDTNLKFRNPKYLSILNHLRFYLPEIFPKLSKVLFLDDDIVVQKDLSGLWSVDLKGNVNGAVETCGESFHRFDRYLNFSNPLISKNFDPRACGWAYGMNVFDLDEWKRQNITEVYHRWQDLNQDRELWKLGTLPPGLITFWRRTYPLDRKWHILGLGYNPSVNQRDIERAAVIHYNGNLKPWLEIGIPRYRGFWSKHVDYEHVYLRECNINP

SEQ ID NO: 20842 - protein, 615 aa, Arabidopsis thaliana
  peptide (1)..(615): Ceres Seq. ID no. 13494144
  misc_feature (133)..(472): Homolog of NCBI NO: 15227235 NR Description: glycosyltransferase family 8 [Arabidopsis
  misc_feature (158)..(552): Homolog of NCBI NO: 14517362 NR Description: AT3g61130/T20K12_30 [Arabidopsis thaliana]
  misc_feature (158)..(611): Homolog of NCBI NO: 37533460 NR Description: hypothetical protein [Oryza sativa (japonica
  misc_feature (158)..(614): Homolog of NCBI NO: 30691875 NR Description: glycosyltransferase family 8 [Arabidopsis
  misc_feature (158)..(614): Homolog of NCBI NO: 7485958 NR Description: hypothetical protein F22I13.40 - Arabidopsis
  misc_feature (158)..(614): Homolog of NCBI NO: 7271113 NR Description: 68 kDa protein [Cicer arietinum]
  misc_feature (158)..(614): Homolog of NCBI NO: 15233046 NR Description: glycosyltransferase family 8 [Arabidopsis
  misc_feature (81)..(615): Homolog of NCBI NO: 38423965 NR Description: putative glycosyltransferase
  misc_feature (151)..(614): Homolog of NCBI NO: 18399484 NR Description: glycosyltransferase family 8 [Arabidopsis
  misc_feature (486)..(613): Homolog of NCBI NO: 15227235 NR Description: glycosyltransferase family 8 [Arabidopsis
MVKLRNLVLFFMLLTVVAHILLYTDPAASFKTPFSKRDFLEDVTALTFNSDENRLNLLPRESPAVLRGGLVGAVYSDKNSRRLDQLSARVLSATDDDTHSHTDISIKQVTHDAASDSHINRENMHVQLTQQTSEKVDEQPEPNAFGAKKDTGNVLMPDAQVRHLKDQLIRAKVYLSLPSAKANAHFVRELRLRIKEVQRALADASKDSDLPKTAIEKLKAMEQTLAKGKQIQDDCSTVVKKLRAMLHSADEQLRVHKKQTMFLTQLTAKTIPKGLHCLPLRLTTDYYALNSSEQQFPNQEKLEDTQLYHYALFSDNVLATSVVVNSTITNAKHPLKHVFHIVTDRLNYAAMRMWFLDNPPGKATIQVQNVEEFTWLNSSYSPVLKQLSSRSMIDYYFRAHHTNSDTNLKFRNPKYLSILNHLRFYLPEIFPKLSKVLFLDDDIVVQKDLSGLWSVDLKGNVNGAVETCGESFHRFDRYLNFSNPLISKNFDPRACGWAYGMNVFDLDEWKRQNITEVYHRWQDLNQDRELWKLGTLPPGLITFWRRTYPLDRKWHILGLGYNPSVNQRDIERAAVIHYNGNLKPWLEIGIPRYRGFWSKHVDYEHVYLRECNINP

SEQ ID NO: 20843 - protein, 604 aa, Arabidopsis thaliana
  peptide (1)..(604): Ceres Seq. ID no. 13494145
  misc_feature (140)..(603): Homolog of NCBI NO: 18399484 NR Description: glycosyltransferase family 8 [Arabidopsis
  misc_feature (475)..(602): Homolog of NCBI NO: 15227235 NR Description: glycosyltransferase family 8 [Arabidopsis
  misc_feature (122)..(461): Homolog of NCBI NO: 15227235 NR Description: glycosyltransferase family 8 [Arabidopsis
  misc_feature (147)..(541): Homolog of NCBI NO: 14517362 NR Description: AT3g61130/T20K12_30 [Arabidopsis thaliana]
  misc_feature (147)..(600): Homolog of NCBI NO: 37533460 NR Description: hypothetical protein [Oryza sativa (japonica
  misc_feature (147)..(603): Homolog of NCBI NO: 30691875 NR Description: glycosyltransferase family 8 [Arabidopsis
  misc_feature (147)..(603): Homolog of NCBI NO: 7485958 NR Description: hypothetical protein F22I13.40 - Arabidopsis
  misc_feature (147)..(603): Homolog of NCBI NO: 7271113 NR Description: 68 kDa protein [Cicer arietinum]
  misc_feature (147)..(603): Homolog of NCBI NO: 15233046 NR Description: glycosyltransferase family 8 [Arabidopsis
  misc_feature (70)..(604): Homolog of NCBI NO: 38423965 NR Description: putative glycosyltransferase
MLLTVVAHILLYTDPAASFKTPFSKRDFLEDVTALTFNSDENRLNLLPRESPAVLRGGLVGAVYSDKNSRRLDQLSARVLSATDDDTHSHTDISIKQVTHDAASDSHINRENMHVQLTQQTSEKVDEQPEPNAFGAKKDTGNVLMPDAQVRHLKDQLIRAKVYLSLPSAKANAHFVRELRLRIKEVQRALADASKDSDLPKTAIEKLKAMEQTLAKGKQIQDDCSTVVKKLRAMLHSADEQLRVHKKQTMFLTQLTAKTIPKGLHCLPLRLTTDYYALNSSEQQFPNQEKLEDTQLYHYALFSDNVLATSVVVNSTITNAKHPLKHVFHIVTDRLNYAAMRMWFLDNPPGKATIQVQNVEEFTWLNSSYSPVLKQLSSRSMIDYYFRAHHTNSDTNLKFRNPKYLSILNHLRFYLPEIFPKLSKVLFLDDDIVVQKDLSGLWSVDLKGNVNGAVETCGESFHRFDRYLNFSNPLISKNFDPRACGWAYGMNVFDLDEWKRQNITEVYHRWQDLNQDRELWKLGTLPPGLITFWRRTYPLDRKWHILGLGYNPSVNQRDIERAAVIHYNGNLKPWLEIGIPRYRGFWSKHVDYEHVYLRECNINP

SEQ ID NO: 20844 - DNA, 987 bp, Arabidopsis thaliana
  misc_feature (1)..(987): Ceres Seq. ID no. 12327780
  misc_feature: MA Experiment ID: 108434 Result: Down-regulated in Transcription
  misc_feature: MA Experiment 108434 PARAMETER Experiment Name: At_Root_Tips_cDNA_P Parameter: Tissue Value: Root Tips
  misc_feature: MA Experiment ID: 108462 Result: Up-regulated in Transcription
  misc_feature: MA Experiment 108462 PARAMETER Experiment Name: At_Germinating_Seeds_cDNA_P Parameter: Age (day) Value: 2 vs. 0
  misc_feature: MA Experiment 108462 PARAMETER Experiment Name: At_Germinating_Seeds_cDNA_P Parameter: Tissue Value: Germinating Seeds
  misc_feature: MA Experiment ID: 108463 Result: Up-regulated in Transcription
  misc_feature: MA Experiment 108463 PARAMETER Experiment Name: At_Germinating_Seeds_cDNA_P Parameter: Age (day) Value: 3 vs. 0
  misc_feature: MA Experiment 108463 PARAMETER Experiment Name: At_Germinating_Seeds_cDNA_P Parameter: Tissue Value: Germinating Seeds
  misc_feature: MA Experiment ID: 108464 Result: Up-regulated in Transcription
  misc_feature: MA Experiment 108464 PARAMETER Experiment Name: At_Germinating_Seeds_cDNA_P Parameter: Age (day) Value: 4 vs. 0
  misc_feature: MA Experiment 108464 PARAMETER Experiment Name: At_Germinating_Seeds_cDNA_P Parameter: Tissue Value: Germinating Seeds
  misc_feature: MA Experiment ID: 108473 Result: Up-regulated in Transcription
  misc_feature: MA Experiment 108473 PARAMETER Experiment Name: At_Drought_Flowers_cDNA_P Parameter: Timepoint (hr) Value: 7 d
  misc_feature: MA Experiment 108473 PARAMETER Experiment Name: At_Drought_Flowers_cDNA_P Parameter: Tissue Value: Flower
  misc_feature: MA Experiment 108473 PARAMETER Experiment Name: At_Drought_Flowers_cDNA_P Parameter: Treatment Value: Drought vs. No Drought
  misc_feature: MA Experiment ID: 108488 Result: Down-regulated in Transcription
  misc_feature: MA Experiment ID: 108561 Result: Up-regulated in Transcription
  misc_feature: MA Experiment 108561 PARAMETER Experiment Name: At_100uM_ABA_cDNA_P Parameter: Timepoint (hr) Value: 6
  misc_feature: MA Experiment 108561 PARAMETER Experiment Name: At_100uM_ABA_cDNA_P Parameter: Tissue Value: Aerial
  misc_feature: MA Experiment 108561 PARAMETER Experiment Name: At_100uM_ABA_cDNA_P Parameter: Treatment Value: 100uM ABA vs. No Treatment
  misc_feature: MA Experiment ID: 108573 Result: Up-regulated in Transcription
  misc_feature: MA Experiment 108573 PARAMETER Experiment Name: At_Drought_cDNA_P Parameter: Timepoint (hr) Value: 6
  misc_feature: MA Experiment 108573 PARAMETER Experiment Name: At_Drought_cDNA_P Parameter: Tissue Value: Aerial
  misc_feature: MA Experiment 108573 PARAMETER Experiment Name: At_Drought_cDNA_P Parameter: Treatment Value: Drought vs. No Drought
  misc_feature: MA Experiment ID: 108574 Result: Up-regulated in Transcription
  misc_feature: MA Experiment 108574 PARAMETER Experiment Name: At_Wounding__cDNA_P Parameter: Timepoint (hr) Value: 1
  misc_feature: MA Experiment 108574 PARAMETER Experiment Name: At_Wounding__cDNA_P Parameter: Tissue Value: Aerial
  misc_feature: MA Experiment 108574 PARAMETER Experiment Name: At_Wounding__cDNA_P Parameter: Treatment Value: Wounding vs. No Wounding
  misc_feature: MA Experiment ID: 108577 Result: Down-regulated in Transcription
  misc_feature: MA Experiment 108577 PARAMETER Experiment Name: At_42deg_Heat_cDNA_P Parameter: Temperature (deg C) Value: 42 vs. 22
  misc_feature: MA Experiment 108577 PARAMETER Experiment Name: At_42deg_Heat_cDNA_P Parameter: Timepoint (hr) Value: 6
  misc_feature: MA Experiment 108577 PARAMETER Experiment Name: At_42deg_Heat_cDNA_P Parameter: Tissue Value: Aerial
  misc_feature: MA Experiment ID: 108579 Result: Up-regulated in Transcription
  misc_feature: MA Experiment 108579 PARAMETER Experiment Name: At_4deg_Cold_cDNA_P Parameter: Temperature (deg C) Value: 4 vs. 22
  misc_feature: MA Experiment 108579 PARAMETER Experiment Name: At_4deg_Cold_cDNA_P Parameter: Timepoint (hr) Value: 6
  misc_feature: MA Experiment 108579 PARAMETER Experiment Name: At_4deg_Cold_cDNA_P Parameter: Tissue Value: Aerial
  misc_feature: MA Experiment ID: 108594 Result: Up-regulated in Transcription
  misc_feature: MA Experiment 108594 PARAMETER Experiment Name: At_Ler-rhl_Root_cDNA_P Parameter: Plant Line Value: null
  misc_feature: MA Experiment ID: 108595 Result: Up-regulated in Transcription
  misc_feature: MA Experiment 108595 PARAMETER Experiment Name: At_Ler-pi_Ovule_cDNA_P Parameter: Plant Line Value: null
  misc_feature: MA Experiment ID: 108605 Result: Up-regulated in Transcription
  misc_feature: MA Experiment 108605 PARAMETER Experiment Name: At_100uM_ABA_cDNA_P Parameter: Timepoint (hr) Value: 6
  misc_feature: MA Experiment 108605 PARAMETER Experiment Name: At_100uM_ABA_cDNA_P Parameter: Tissue Value: Aerial
  misc_feature: MA Experiment 108605 PARAMETER Experiment Name: At_100uM_ABA_cDNA_P Parameter: Treatment Value: 100uM ABA vs. No Treatment
  misc_feature: MA Experiment ID: 108607 Result: Up-regulated in Transcription
  misc_feature: MA Experiment 108607 PARAMETER Experiment Name: At_100uM_ABA_cDNA_P Parameter: Timepoint (hr) Value: 4
  misc_feature: MA Experiment 108607 PARAMETER Experiment Name: At_100uM_ABA_cDNA_P Parameter: Tissue Value: Aerial
  misc_feature: MA Experiment 108607 PARAMETER Experiment Name: At_100uM_ABA_cDNA_P Parameter: Treatment Value: 100uM ABA vs. No Treatment
  misc_feature: MA Experiment ID: 108608 Result: Up-regulated in Transcription
  misc_feature: MA Experiment 108608 PARAMETER Experiment Name: At_100uM_ABA_cDNA_P Parameter: Timepoint (hr) Value: 1
  misc_feature: MA Experiment 108608 PARAMETER Experiment Name: At_100uM_ABA_cDNA_P Parameter: Tissue Value: Aerial
  misc_feature: MA Experiment 108608 PARAMETER Experiment Name: At_100uM_ABA_cDNA_P Parameter: Treatment Value: 100uM ABA vs. No Treatment
  misc_feature: MA Experiment ID: 108609 Result: Up-regulated in Transcription
  misc_feature: MA Experiment 108609 PARAMETER Experiment Name: At_100uM_ABA_cDNA_P Parameter: Timepoint (hr) Value: 24
  misc_feature: MA Experiment 108609 PARAMETER Experiment Name: At_100uM_ABA_cDNA_P Parameter: Tissue Value: Aerial
  misc_feature: MA Experiment 108609 PARAMETER Experiment Name: At_100uM_ABA_cDNA_P Parameter: Treatment Value: 100uM ABA vs. No Treatment
  misc_feature: MA Experiment ID: 108667 Result: Up-regulated in Transcription
  misc_feature: MA Experiment 108667 PARAMETER Experiment Name: At_2mM_SA_cDNA_P Parameter: Plant Line Value: WS
  misc_feature: MA Experiment 108667 PARAMETER Experiment Name: At_2mM_SA_cDNA_P Parameter: Timepoint (hr) Value: 1
  misc_feature: MA Experiment 108667 PARAMETER Experiment Name: At_2mM_SA_cDNA_P Parameter: Treatment Value: 2mM SA vs. No Treatment
  misc_feature: MA Experiment ID: 20000069 Result: Up-regulated in Transcription
  misc_feature: MA Experiment 20000069 PARAMETER Experiment Name: At_100uM_ABA_Mutants_cDNA_P Parameter: Plant Line Value: CS23
  misc_feature: MA Experiment 20000069 PARAMETER Experiment Name: At_100uM_ABA_Mutants_cDNA_P Parameter: Timepoint (hr) Value: 6
  misc_feature: MA Experiment 20000069 PARAMETER Experiment Name: At_100uM_ABA_Mutants_cDNA_P Parameter: Tissue Value: Aerial
  misc_feature: MA Experiment 20000069 PARAMETER Experiment Name: At_100uM_ABA_Mutants_cDNA_P Parameter: Treatment Value: 100uM ABA vs. No Treatment
  misc_feature: MA Experiment ID: 20000070 Result: Up-regulated in Transcription
  misc_feature: MA Experiment 20000070 PARAMETER Experiment Name: At_100uM_ABA_Mutants_cDNA_P Parameter: Plant Line Value: CS24
  misc_feature: MA Experiment 20000070 PARAMETER Experiment Name: At_100uM_ABA_Mutants_cDNA_P Parameter: Timepoint (hr) Value: 6
  misc_feature: MA Experiment 20000070 PARAMETER Experiment Name: At_100uM_ABA_Mutants_cDNA_P Parameter: Tissue Value: Aerial
  misc_feature: MA Experiment 20000070 PARAMETER Experiment Name: At_100uM_ABA_Mutants_cDNA_P Parameter: Treatment Value: 100uM ABA vs. No Treatment
  misc_feature: MA Experiment ID: 20000071 Result: Up-regulated in Transcription
  misc_feature: MA Experiment 20000071 PARAMETER Experiment Name: At_100uM_ABA_Mutants_cDNA_P Parameter: Plant Line Value: CS8104
  misc_feature: MA Experiment 20000071 PARAMETER Experiment Name: At_100uM_ABA_Mutants_cDNA_P Parameter: Timepoint (hr) Value: 6
  misc_feature: MA Experiment 20000071 PARAMETER Experiment Name: At_100uM_ABA_Mutants_cDNA_P Parameter: Tissue Value: Aerial
  misc_feature: MA Experiment 20000071 PARAMETER Experiment Name: At_100uM_ABA_Mutants_cDNA_P Parameter: Treatment Value: 100uM ABA vs. No Treatment
  misc_feature: MA Experiment ID: 20000072 Result: Up-regulated in Transcription
  misc_feature: MA Experiment 20000072 PARAMETER Experiment Name: At_100uM_ABA_Mutants_cDNA_P Parameter: Plant Line Value: CS8105
  misc_feature: MA Experiment 20000072 PARAMETER Experiment Name: At_100uM_ABA_Mutants_cDNA_P Parameter: Timepoint (hr) Value: 6
  misc_feature: MA Experiment 20000072 PARAMETER Experiment Name: At_100uM_ABA_Mutants_cDNA_P Parameter: Tissue Value: Aerial
  misc_feature: MA Experiment 20000072 PARAMETER Experiment Name: At_100uM_ABA_Mutants_cDNA_P Parameter: Treatment Value: 100uM ABA vs. No Treatment
  misc_feature: MA Experiment ID: 20000086 Result: Up-regulated in Transcription
  misc_feature: MA Experiment 20000086 PARAMETER Experiment Name: At_100uM_ABA_Mutants_cDNA_P Parameter: Plant Line Value: CS22
  misc_feature: MA Experiment 20000086 PARAMETER Experiment Name: At_100uM_ABA_Mutants_cDNA_P Parameter: Timepoint (hr) Value: 6
  misc_feature: MA Experiment 20000086 PARAMETER Experiment Name: At_100uM_ABA_Mutants_cDNA_P Parameter: Tissue Value: Aerial
  misc_feature: MA Experiment 20000086 PARAMETER Experiment Name: At_100uM_ABA_Mutants_cDNA_P Parameter: Treatment Value: 100uM ABA vs. No Treatment
  misc_feature: MA Experiment ID: 20000087 Result: Up-regulated in Transcription
  misc_feature: MA Experiment 20000087 PARAMETER Experiment Name: At_100uM_ABA_Mutants_cDNA_P Parameter: Plant Line Value: WS
  misc_feature: MA Experiment 20000087 PARAMETER Experiment Name: At_100uM_ABA_Mutants_cDNA_P Parameter: Timepoint (hr) Value: 6
  misc_feature: MA Experiment 20000087 PARAMETER Experiment Name: At_100uM_ABA_Mutants_cDNA_P Parameter: Tissue Value: Aerial
  misc_feature: MA Experiment 20000087 PARAMETER Experiment Name: At_100uM_ABA_Mutants_cDNA_P Parameter: Treatment Value: 100uM ABA vs. No Treatment
  misc_feature: MA Experiment ID: 20000088 Result: Up-regulated in Transcription
  misc_feature: MA Experiment 20000088 PARAMETER Experiment Name: At_100uM_ABA_Mutants_cDNA_P Parameter: Plant Line Value: Landsberg
  misc_feature: MA Experiment 20000088 PARAMETER Experiment Name: At_100uM_ABA_Mutants_cDNA_P Parameter: Timepoint (hr) Value: 6
  misc_feature: MA Experiment 20000088 PARAMETER Experiment Name: At_100uM_ABA_Mutants_cDNA_P Parameter: Tissue Value: Aerial
  misc_feature: MA Experiment 20000088 PARAMETER Experiment Name: At_100uM_ABA_Mutants_cDNA_P Parameter: Treatment Value: 100uM ABA vs. No Treatment
  misc_feature: MA Experiment ID: 20000117 Result: Up-regulated in Transcription
  misc_feature: MA Experiment 20000117 PARAMETER Experiment Name: At_100uM_ABA_Mutants_cDNA_P Parameter: Plant Line Value: Columbia
  misc_feature: MA Experiment 20000117 PARAMETER Experiment Name: At_100uM_ABA_Mutants_cDNA_P Parameter: Timepoint (hr) Value: 6
  misc_feature: MA Experiment 20000117 PARAMETER Experiment Name: At_100uM_ABA_Mutants_cDNA_P Parameter: Tissue Value: Aerial
  misc_feature: MA Experiment 20000117 PARAMETER Experiment Name: At_100uM_ABA_Mutants_cDNA_P Parameter: Treatment Value: 100uM ABA vs. No Treatment
  misc_feature: MA Experiment ID: 20000166 Result: Up-regulated in Transcription
  misc_feature: MA Experiment 20000166 PARAMETER Experiment Name: At_100uM_ABA_P Parameter: Age (day) Value: 14
  misc_feature: MA Experiment 20000166 PARAMETER Experiment Name: At_100uM_ABA_P Parameter: Organism Value: A. thaliana
  misc_feature: MA Experiment 20000166 PARAMETER Experiment Name: At_100uM_ABA_P Parameter: Plant Line Value: WS
  misc_feature: MA Experiment 20000166 PARAMETER Experiment Name: At_100uM_ABA_P Parameter: Timepoint (hr) Value: 1
  misc_feature: MA Experiment 20000166 PARAMETER Experiment Name: At_100uM_ABA_P Parameter: Tissue Value: Aerial
  misc_feature: MA Experiment 20000166 PARAMETER Experiment Name: At_100uM_ABA_P Parameter: Treatment Value: 100uM ABA vs. No Treatment
  misc_feature: MA Experiment ID: 20000169 Result: Up-regulated in Transcription
  misc_feature: MA Experiment 20000169 PARAMETER Experiment Name: At_100uM_ABA_P Parameter: Age (day) Value: 14
  misc_feature: MA Experiment 20000169 PARAMETER Experiment Name: At_100uM_ABA_P Parameter: Organism Value: A. thaliana
  misc_feature: MA Experiment 20000169 PARAMETER Experiment Name: At_100uM_ABA_P Parameter: Plant Line Value: WS
  misc_feature: MA Experiment 20000169 PARAMETER Experiment Name: At_100uM_ABA_P Parameter: Timepoint (hr) Value: 6
  misc_feature: MA Experiment 20000169 PARAMETER Experiment Name: At_100uM_ABA_P Parameter: Tissue Value: Aerial
  misc_feature: MA Experiment 20000169 PARAMETER Experiment Name: At_100uM_ABA_P Parameter: Treatment Value: 100uM ABA vs. No Treatment
  misc_feature: MA Experiment ID: 20000179 Result: Up-regulated in Transcription
  misc_feature: MA Experiment 20000179 PARAMETER Experiment Name: At_Germinating_Seeds_P Parameter: Age (hr) Value: 6 vs. 0
  misc_feature: MA Experiment 20000179 PARAMETER Experiment Name: At_Germinating_Seeds_P Parameter: Tissue Value: Germinating Seeds
  misc_feature: MA Experiment ID: 20000184 Result: Down-regulated in Transcription
  misc_feature: MA Experiment 20000184 PARAMETER Experiment Name: At_Shoots__P Parameter: Age (day) Value: 7
  misc_feature: MA Experiment 20000184 PARAMETER Experiment Name: At_Shoots__P Parameter: Tissue Value: Shoots vs. Whole Plant
  misc_feature: MA Experiment ID: 20000185 Result: Down-regulated in Transcription
  misc_feature: MA Experiment 20000185 PARAMETER Experiment Name: At_Roots__P Parameter: Age (day) Value: 7 vs. 21
  misc_feature: MA Experiment 20000185 PARAMETER Experiment Name: At_Roots__P Parameter: Organism Value: A. thaliana
  misc_feature: MA Experiment 20000185 PARAMETER Experiment Name: At_Roots__P Parameter: Tissue Value: Roots vs. Whole Plant
  misc_feature: MA Experiment ID: 20000213 Result: Up-regulated in Transcription
  misc_feature: MA Experiment 20000213 PARAMETER Experiment Name: At_4deg_Cold_P Parameter: Timepoint (hr) Value: 2
  misc_feature: MA Experiment ID: 20000265 Result: Down-regulated in Transcription
  misc_feature: MA Experiment 20000265 PARAMETER Experiment Name: At_Open_Flower_P Parameter: Age (day) Value: 21
  misc_feature: MA Experiment 20000265 PARAMETER Experiment Name: At_Open_Flower_P Parameter: Plant Line Value: WS
  misc_feature: MA Experiment 20000265 PARAMETER Experiment Name: At_Open_Flower_P Parameter: Tissue Value: Closed Flower vs. Whole Plant
  misc_feature: MA Experiment ID: 20000268 Result: Down-regulated in Transcription
  misc_feature: MA Experiment 20000268 PARAMETER Experiment Name: At_100mM_NaCl__P Parameter: Age (day) Value: 14
  misc_feature: MA Experiment 20000268 PARAMETER Experiment Name: At_100mM_NaCl__P Parameter: Organism Value: A. thaliana
  misc_feature: MA Experiment 20000268 PARAMETER Experiment Name: At_100mM_NaCl__P Parameter: Plant Line Value: WS
  misc_feature: MA Experiment 20000268 PARAMETER Experiment Name: At_100mM_NaCl__P Parameter: Timepoint (hr) Value: 6
  misc_feature: MA Experiment 20000268 PARAMETER Experiment Name: At_100mM_NaCl__P Parameter: Tissue Value: Whole Plant
  misc_feature: MA Experiment 20000268 PARAMETER Experiment Name: At_100mM_NaCl__P Parameter: Treatment Value: 100mM NaCl vs. No Treatment
  misc_feature: MA Experiment ID: 20000437 Result: Up-regulated in Transcription
  misc_feature: MA Experiment 20000437 PARAMETER Experiment Name: At_Drought_P Parameter: Age (day) Value: 8
  misc_feature: MA Experiment 20000437 PARAMETER Experiment Name: At_Drought_P Parameter: Organism Value: A. thaliana
  misc_feature: MA Experiment 20000437 PARAMETER Experiment Name: At_Drought_P Parameter: Plant Line Value: WS
  misc_feature: MA Experiment 20000437 PARAMETER Experiment Name: At_Drought_P Parameter: Timepoint (hr) Value: 24
  misc_feature: MA Experiment 20000437 PARAMETER Experiment Name: At_Drought_P Parameter: Tissue Value: Whole Plant
  misc_feature: MA Experiment 20000437 PARAMETER Experiment Name: At_Drought_P Parameter: Treatment Value: Drought vs. No Drought
  misc_feature: MA Experiment ID: 20000438 Result: Down-regulated in Transcription
  misc_feature: MA Experiment 20000438 PARAMETER Experiment Name: At_Shoots__P Parameter: Age (day) Value: 14
  misc_feature: MA Experiment 20000438 PARAMETER Experiment Name: At_Shoots__P Parameter: Tissue Value: Shoots vs. Whole Plant
  misc_feature: MA Experiment ID: 20000439 Result: Down-regulated in Transcription
  misc_feature: MA Experiment 20000439 PARAMETER Experiment Name: At_Roots__P Parameter: Age (day) Value: 14 vs. 21
  misc_feature: MA Experiment 20000439 PARAMETER Experiment Name: At_Roots__P Parameter: Organism Value: A. thaliana
  misc_feature: MA Experiment 20000439 PARAMETER Experiment Name: At_Roots__P Parameter: Tissue Value: Roots vs. Whole Plant
  misc_feature: MA Experiment ID: 20000453 Result: Up-regulated in Transcription
  misc_feature: MA Experiment 20000453 PARAMETER Experiment Name: At_100uM_ABA_P Parameter: Age (day) Value: 15
  misc_feature: MA Experiment 20000453 PARAMETER Experiment Name: At_100uM_ABA_P Parameter: Organism Value: A. thaliana
  misc_feature: MA Experiment 20000453 PARAMETER Experiment Name: At_100uM_ABA_P Parameter: Plant Line Value: WS
  misc_feature: MA Experiment 20000453 PARAMETER Experiment Name: At_100uM_ABA_P Parameter: Timepoint (hr) Value: 24
  misc_feature: MA Experiment 20000453 PARAMETER Experiment Name: At_100uM_ABA_P Parameter: Tissue Value: Aerial
  misc_feature: MA Experiment 20000453 PARAMETER Experiment Name: At_100uM_ABA_P Parameter: Treatment Value: 100uM ABA vs. No Treatment
  misc_feature: MA Experiment ID: 20000460 Result: Up-regulated in Transcription
  misc_feature: MA Experiment 20000460 PARAMETER Experiment Name: At_10percent_PEG_P Parameter: Age (day) Value: 12
  misc_feature: MA Experiment 20000460 PARAMETER Experiment Name: At_10percent_PEG_P Parameter: Organism Value: A. thaliana
  misc_feature: MA Experiment 20000460 PARAMETER Experiment Name: At_10percent_PEG_P Parameter: Plant Line Value: WS
  misc_feature: MA Experiment 20000460 PARAMETER Experiment Name: At_10percent_PEG_P Parameter: Timepoint (day) Value: 12
  misc_feature: MA Experiment 20000460 PARAMETER Experiment Name: At_10percent_PEG_P Parameter: Tissue Value: Whole Plant
  misc_feature: MA Experiment 20000460 PARAMETER Experiment Name: At_10percent_PEG_P Parameter: Treatment Value: 10percent PEG vs. No Treatment
  misc_feature: MA Experiment ID: 20000495 Result: Down-regulated in Transcription
  misc_feature: MA Experiment 20000495 PARAMETER Experiment Name: At_Guard_Cells_P Parameter: Harvest Date Value: 8/2/2002
  misc_feature: MA Experiment 20000495 PARAMETER Experiment Name: At_Guard_Cells_P Parameter: Organism Value: A. thaliana
  misc_feature: MA Experiment 20000495 PARAMETER Experiment Name: At_Guard_Cells_P Parameter: Tissue Value: Guard Cells vs. Leaves
  misc_feature: MA Experiment ID: 20000527 Result: Up-regulated in Transcription
  misc_feature: MA Experiment 20000527 PARAMETER Experiment Name: At_10percent_PEG_P Parameter: Age (day) Value: 20
  misc_feature: MA Experiment 20000527 PARAMETER Experiment Name: At_10percent_PEG_P Parameter: Organism Value: A. thaliana
  misc_feature: MA Experiment 20000527 PARAMETER Experiment Name: At_10percent_PEG_P Parameter: Plant Line Value: WS
  misc_feature: MA Experiment 20000527 PARAMETER Experiment Name: At_10percent_PEG_P Parameter: Timepoint (day) Value: 20
  misc_feature: MA Experiment 20000527 PARAMETER Experiment Name: At_10percent_PEG_P Parameter: Tissue Value: Whole Plant
  misc_feature: MA Experiment 20000527 PARAMETER Experiment Name: At_10percent_PEG_P Parameter: Treatment Value: 10percent PEG vs. No Treatment
  misc_feature: MA Experiment ID: 20000794 Result: Up-regulated in Transcription
  misc_feature: MA Experiment 20000794 PARAMETER Experiment Name: At_Petals_P Parameter: Age (day) Value: 23-25 days
  misc_feature: MA Experiment 20000794 PARAMETER Experiment Name: At_Petals_P Parameter: Plant Line Value: WS
  misc_feature: MA Experiment 20000794 PARAMETER Experiment Name: At_Petals_P Parameter: Tissue Value: Petals vs. Whole plant
  misc_feature: MA Experiment ID: 20001248 Result: Up-regulated in Transcription
  misc_feature: MA Experiment 20001248 PARAMETER Experiment Name: At_Far-red-induction_P Parameter: Age (day) Value: 7
  misc_feature: MA Experiment 20001248 PARAMETER Experiment Name: At_Far-red-induction_P Parameter: Light Value: Far-red vs. White
  misc_feature: MA Experiment 20001248 PARAMETER Experiment Name: At_Far-red-induction_P Parameter: Organism Value: A. thaliana
  misc_feature: MA Experiment 20001248 PARAMETER Experiment Name: At_Far-red-induction_P Parameter: Plant Line Value: Columbia
  misc_feature: MA Experiment 20001248 PARAMETER Experiment Name: At_Far-red-induction_P Parameter: Timepoint (hr) Value: 4
  misc_feature: MA Experiment 20001248 PARAMETER Experiment Name: At_Far-red-induction_P Parameter: Tissue Value: Whole Plant
  misc_feature: MA Experiment ID: 20001450 Result: Up-regulated in Transcription
  misc_feature: MA Experiment 20001450 PARAMETER Experiment Name: At_Far-red-induction_P Parameter: Age (day) Value: 7
  misc_feature: MA Experiment 20001450 PARAMETER Experiment Name: At_Far-red-induction_P Parameter: Light Value: Far-red vs. White
  misc_feature: MA Experiment 20001450 PARAMETER Experiment Name: At_Far-red-induction_P Parameter: Organism Value: A. thaliana
  misc_feature: MA Experiment 20001450 PARAMETER Experiment Name: At_Far-red-induction_P Parameter: Plant Line Value: Columbia
  misc_feature: MA Experiment 20001450 PARAMETER Experiment Name: At_Far-red-induction_P Parameter: Timepoint (hr) Value: 8
  misc_feature: MA Experiment 20001450 PARAMETER Experiment Name: At_Far-red-induction_P Parameter: Tissue Value: Whole Plant
  misc_feature: MA Experiment ID: 20001554 Result: Down-regulated in Transcription
  misc_feature: MA Experiment 20001554 PARAMETER Experiment Name: At_Drought_Soil_Dry_P Parameter: Age (day) Value: 21
  misc_feature: MA Experiment 20001554 PARAMETER Experiment Name: At_Drought_Soil_Dry_P Parameter: Organism Value: A. thaliana
  misc_feature: MA Experiment 20001554 PARAMETER Experiment Name: At_Drought_Soil_Dry_P Parameter: Plant Line Value: WS
  misc_feature: MA Experiment 20001554 PARAMETER Experiment Name: At_Drought_Soil_Dry_P Parameter: Post Timepoint (hr) Value: None
  misc_feature: MA Experiment 20001554 PARAMETER Experiment Name: At_Drought_Soil_Dry_P Parameter: Post-Treatment Value: None
  misc_feature: MA Experiment 20001554 PARAMETER Experiment Name: At_Drought_Soil_Dry_P Parameter: Timepoint (day) Value: 7
  misc_feature: MA Experiment 20001554 PARAMETER Experiment Name: At_Drought_Soil_Dry_P Parameter: Treatment Value: Drought vs. No Drought
  misc_feature: MA Experiment ID: 20001555 Result: Down-regulated in Transcription
  misc_feature: MA Experiment 20001555 PARAMETER Experiment Name: At_Drought_Soil_Dry_P Parameter: Age (day) Value: 24
  misc_feature: MA Experiment 20001555 PARAMETER Experiment Name: At_Drought_Soil_Dry_P Parameter: Organism Value: A. thaliana
  misc_feature: MA Experiment 20001555 PARAMETER Experiment Name: At_Drought_Soil_Dry_P Parameter: Plant Line Value: WS
  misc_feature: MA Experiment 20001555 PARAMETER Experiment Name: At_Drought_Soil_Dry_P Parameter: Post Timepoint (hr) Value: None
  misc_feature: MA Experiment 20001555 PARAMETER Experiment Name: At_Drought_Soil_Dry_P Parameter: Post-Treatment Value: None
  misc_feature: MA Experiment 20001555 PARAMETER Experiment Name: At_Drought_Soil_Dry_P Parameter: Timepoint (day) Value: 10
  misc_feature: MA Experiment 20001555 PARAMETER Experiment Name: At_Drought_Soil_Dry_P Parameter: Treatment Value: Drought vs. No Drought
  misc_feature: MA Experiment ID: 20001556 Result: Down-regulated in Transcription
  misc_feature: MA Experiment 20001556 PARAMETER Experiment Name: At_Drought_Soil_Dry_P Parameter: Age (day) Value: 26
  misc_feature: MA Experiment 20001556 PARAMETER Experiment Name: At_Drought_Soil_Dry_P Parameter: Organism Value: A. thaliana
  misc_feature: MA Experiment 20001556 PARAMETER Experiment Name: At_Drought_Soil_Dry_P Parameter: Plant Line Value: WS
  misc_feature: MA Experiment 20001556 PARAMETER Experiment Name: At_Drought_Soil_Dry_P Parameter: Post Timepoint (hr) Value: None
  misc_feature: MA Experiment 20001556 PARAMETER Experiment Name: At_Drought_Soil_Dry_P Parameter: Post-Treatment Value: None
  misc_feature: MA Experiment 20001556 PARAMETER Experiment Name: At_Drought_Soil_Dry_P Parameter: Timepoint (day) Value: 12
  misc_feature: MA Experiment 20001556 PARAMETER Experiment Name: At_Drought_Soil_Dry_P Parameter: Treatment Value: Drought vs. No Drought
  misc_feature: MA Experiment ID: 20001557 Result: Up-regulated in Transcription
  misc_feature: MA Experiment 20001557 PARAMETER Experiment Name: At_Drought_Soil_Dry_P Parameter: Age (day) Value: 27
  misc_feature: MA Experiment 20001557 PARAMETER Experiment Name: At_Drought_Soil_Dry_P Parameter: Organism Value: A. thaliana
  misc_feature: MA Experiment 20001557 PARAMETER Experiment Name: At_Drought_Soil_Dry_P Parameter: Plant Line Value: WS
  misc_feature: MA Experiment 20001557 PARAMETER Experiment Name: At_Drought_Soil_Dry_P Parameter: Post Timepoint (hr) Value: 3
  misc_feature: MA Experiment 20001557 PARAMETER Experiment Name: At_Drought_Soil_Dry_P Parameter: Post-Treatment Value: Re-Water vs. No Drought
  misc_feature: MA Experiment 20001557 PARAMETER Experiment Name: At_Drought_Soil_Dry_P Parameter: Timepoint (day) Value: 13
  misc_feature: MA Experiment 20001557 PARAMETER Experiment Name: At_Drought_Soil_Dry_P Parameter: Treatment Value: Drought vs. No Drought
  misc_feature: MA Experiment ID: 20001558 Result: Up-regulated in Transcription
  misc_feature: MA Experiment 20001558 PARAMETER Experiment Name: At_Drought_Soil_Dry_P Parameter: Age (day) Value: 27
  misc_feature: MA Experiment 20001558 PARAMETER Experiment Name: At_Drought_Soil_Dry_P Parameter: Organism Value: A. thaliana
  misc_feature: MA Experiment 20001558 PARAMETER Experiment Name: At_Drought_Soil_Dry_P Parameter: Plant Line Value: WS
  misc_feature: MA Experiment 20001558 PARAMETER Experiment Name: At_Drought_Soil_Dry_P Parameter: Post Timepoint (hr) Value: 6
  misc_feature: MA Experiment 20001558 PARAMETER Experiment Name: At_Drought_Soil_Dry_P Parameter: Post-Treatment Value: Re-Water vs. No Drought
  misc_feature: MA Experiment 20001558 PARAMETER Experiment Name: At_Drought_Soil_Dry_P Parameter: Timepoint (day) Value: 13
  misc_feature: MA Experiment 20001558 PARAMETER Experiment Name: At_Drought_Soil_Dry_P Parameter: Treatment Value: Drought vs. No Drought
  misc_feature: MA Experiment ID: 20001560 Result: Up-regulated in Transcription
  misc_feature: MA Experiment 20001560 PARAMETER Experiment Name: At_Drought_Soil_Dry_P Parameter: Age (day) Value: 28
  misc_feature: MA Experiment 20001560 PARAMETER Experiment Name: At_Drought_Soil_Dry_P Parameter: Organism Value: A. thaliana
  misc_feature: MA Experiment 20001560 PARAMETER Experiment Name: At_Drought_Soil_Dry_P Parameter: Plant Line Value: WS
  misc_feature: MA Experiment 20001560 PARAMETER Experiment Name: At_Drought_Soil_Dry_P Parameter: Post Timepoint (hr) Value: None
  misc_feature: MA Experiment 20001560 PARAMETER Experiment Name: At_Drought_Soil_Dry_P Parameter: Post-Treatment Value: None
  misc_feature: MA Experiment 20001560 PARAMETER Experiment Name: At_Drought_Soil_Dry_P Parameter: Timepoint (day) Value: 14
  misc_feature: MA Experiment 20001560 PARAMETER Experiment Name: At_Drought_Soil_Dry_P Parameter: Treatment Value: Drought vs. No Drought
  misc_feature: MA Experiment ID: 20001772 Result: Up-regulated in Transcription
  misc_feature: MA Experiment 20001772 PARAMETER Experiment Name: At_Far-red-enriched-adult_P Parameter: Age (day) Value: 29
  misc_feature: MA Experiment 20001772 PARAMETER Experiment Name: At_Far-red-enriched-adult_P Parameter: Light Value: Far-red enriched vs. White
  misc_feature: MA Experiment 20001772 PARAMETER Experiment Name: At_Far-red-enriched-adult_P Parameter: Organism Value: A. thaliana
  misc_feature: MA Experiment 20001772 PARAMETER Experiment Name: At_Far-red-enriched-adult_P Parameter: Plant Line Value: Columbia
  misc_feature: MA Experiment 20001772 PARAMETER Experiment Name: At_Far-red-enriched-adult_P Parameter: Timepoint (hr) Value: 24
  misc_feature: MA Experiment 20001772 PARAMETER Experiment Name: At_Far-red-enriched-adult_P Parameter: Tissue Value: Aerial
acatgtaaattcacatatctctctctcttatttgatcataaagatattattgcttcttcaagtaaacaaaaaatgggaagctttctcttcctcatcgtagtcatcttcctcttctcttcatccgttaacgcttgtgatcgatgtcttcaccgttctaaagcagcttatttctcctctgcctctgctctctcttctggagcttgtgcttatggctctatggctacgagtttcttcgccggacatatcgctgcagctatcccttctatctacaaagacggtgctggctgtggagcttgctttcaagtcagatgcaagaaccctaagctgtgtagcactaaaggaaccattgtgatgatcacagacttaaacaagagtaaccaaaccgatcttgtccttagtagcagagcttttagagctatggctaaacctattgttggtgctgacaaagaccttctcaaacaaggcattgtcgacatcgaataccaaagagttccttgcgattacggcaacaagaacatgaacgtgagagtagaagaagcaagcaagaaaccaaactacttagagataaagcttttataccaaggaggtcaaacagaagtagtatccatcgacattgctcaagtcggttcatcgccaaattggggttacatgacaagaagccacggagctgtttgggtaactgacaaagtacccaccggagctatccagttcaggttcgtagtaaccggtggatacgacggtaaaatgatttggtcacagagtgttcttccatccaattgggaagctgggaaaatttacgacgccggtgttcaaatcactgacattgctcaagaaggttgtgatccttgcgatgctcacatctggaactaagttatttagtggcacacaaacaaacatctttcataggtttatatataatgtgtgacagaggttattaatgaacatagttaaagaatgcttaatctaatgattctcatgattctacac

SEQ ID NO: 20845 - protein, 289 aa, Arabidopsis thaliana
  peptide (1)..(289): Ceres Seq. ID no. 12327781
  misc_feature (173)..(257): Pfam Name: Pollen allergen Pfam Description: Pollen allergen
  misc_feature (27)..(288): Homolog of NCBI NO: 34901594 NR Description: P0571D04.11 [Oryza sativa (japonica
  misc_feature (29)..(288): Homolog of NCBI NO: 20502989 NR Description: Putative pollen allergen [Oryza sativa (japonica
  misc_feature (29)..(288): Homolog of NCBI NO: 21654743 NR Description: expansin-like protein 1 [Oryza sativa]
  misc_feature (21)..(288): Homolog of NCBI NO: 37536544 NR Description: putative pollen allergen [Oryza sativa (japonica
  misc_feature (27)..(288): Homolog of NCBI NO: 33111959 NR Description: expansin-like protein [Quercus robur]
  misc_feature (73)..(289): Homolog of NCBI NO: 30692657 NR Description: expansin protein family (EXPL3) [Arabidopsis
  misc_feature (25)..(289): Homolog of NCBI NO: 20138389 NR Description: Expansin-like 3 precursor (At-EXPL3)
  misc_feature (28)..(289): Homolog of NCBI NO: 15233841 NR Description: putative pollen allergen
  misc_feature (25)..(289): Homolog of NCBI NO: 21555265 NR Description: Expansin-like 1 precursor (At-EXPL1)
  misc_feature (25)..(289): Homolog of NCBI NO: 15231303 NR Description: putative protein
TCKFTYLSLLFDHKDIIASSSKQKMGSFLFLIVVIFLFSSSVNACDRCLHRSKAAYFSSASALSSGACAYGSMATSFFAGHIAAAIPSIYKDGAGCGACFQVRCKNPKLCSTKGTIVMITDLNKSNQTDLVLSSRAFRAMAKPIVGADKDLLKQGIVDIEYQRVPCDYGNKNMNVRVEEASKKPNYLEIKLLYQGGQTEVVSIDIAQVGSSPNWGYMTRSHGAVWVTDKVPTGAIQFRFVVTGGYDGKMIWSQSVLPSNWEAGKIYDAGVQITDIAQEGCDPCDAHIWN

SEQ ID NO: 20846 - protein, 265 aa, Arabidopsis thaliana
  peptide (1)..(265): Ceres Seq. ID no. 12327782
  misc_feature (149)..(233): Pfam Name: Pollen allergen Pfam Description: Pollen allergen
  misc_feature (3)..(264): Homolog of NCBI NO: 34901594 NR Description: P0571D04.11 [Oryza sativa (japonica
  misc_feature (5)..(264): Homolog of NCBI NO: 20502989 NR Description: Putative pollen allergen [Oryza sativa (japonica
  misc_feature (5)..(264): Homolog of NCBI NO: 21654743 NR Description: expansin-like protein 1 [Oryza sativa]
  misc_feature (1)..(264): Homolog of NCBI NO: 37536544 NR Description: putative pollen allergen [Oryza sativa (japonica
  misc_feature (3)..(264): Homolog of NCBI NO: 33111959 NR Description: expansin-like protein [Quercus robur]
  misc_feature (49)..(265): Homolog of NCBI NO: 30692657 NR Description: expansin protein family (EXPL3) [Arabidopsis
  misc_feature (1)..(265): Homolog of NCBI NO: 20138389 NR Description: Expansin-like 3 precursor (At-EXPL3)
  misc_feature (4)..(265): Homolog of NCBI NO: 15233841 NR Description: putative pollen allergen
  misc_feature (1)..(265): Homolog of NCBI NO: 21555265 NR Description: Expansin-like 1 precursor (At-EXPL1)
  misc_feature (1)..(265): Homolog of NCBI NO: 15231303 NR Description: putative protein
MGSFLFLIVVIFLFSSSVNACDRCLHRSKAAYFSSASALSSGACAYGSMATSFFAGHIAAAIPSIYKDGAGCGACFQVRCKNPKLCSTKGTIVMITDLNKSNQTDLVLSSRAFRAMAKPIVGADKDLLKQGIVDIEYQRVPCDYGNKNMNVRVEEASKKPNYLEIKLLYQGGQTEVVSIDIAQVGSSPNWGYMTRSHGAVWVTDKVPTGAIQFRFVVTGGYDGKMIWSQSVLPSNWEAGKIYDAGVQITDIAQEGCDPCDAHIWN

SEQ ID NO: 20847 - protein, 217 aa, Arabidopsis thaliana
  peptide (1)..(217): Ceres Seq. ID no. 12327783
  misc_feature (101)..(185): Pfam Name: Pollen allergen Pfam Description: Pollen allergen
  misc_feature (1)..(216): Homolog of NCBI NO: 34901594 NR Description: P0571D04.11 [Oryza sativa (japonica
  misc_feature (1)..(216): Homolog of NCBI NO: 20502989 NR Description: Putative pollen allergen [Oryza sativa (japonica
  misc_feature (1)..(216): Homolog of NCBI NO: 21654743 NR Description: expansin-like protein 1 [Oryza sativa]
  misc_feature (1)..(216): Homolog of NCBI NO: 37536544 NR Description: putative pollen allergen [Oryza sativa (japonica
  misc_feature (1)..(216): Homolog of NCBI NO: 33111959 NR Description: expansin-like protein [Quercus robur]
  misc_feature (1)..(217): Homolog of NCBI NO: 30692657 NR Description: expansin protein family (EXPL3) [Arabidopsis
  misc_feature (1)..(217): Homolog of NCBI NO: 20138389 NR Description: Expansin-like 3 precursor (At-EXPL3)
  misc_feature (1)..(217): Homolog of NCBI NO: 15233841 NR Description: putative pollen allergen
  misc_feature (1)..(217): Homolog of NCBI NO: 21555265 NR Description: Expansin-like 1 precursor (At-EXPL1)
  misc_feature (1)..(217): Homolog of NCBI NO: 15231303 NR Description: putative protein
MATSFFAGHIAAAIPSIYKDGAGCGACFQVRCKNPKLCSTKGTIVMITDLNKSNQTDLVLSSRAFRAMAKPIVGADKDLLKQGIVDIEYQRVPCDYGNKNMNVRVEEASKKPNYLEIKLLYQGGQTEVVSIDIAQVGSSPNWGYMTRSHGAVWVTDKVPTGAIQFRFVVTGGYDGKMIWSQSVLPSNWEAGKIYDAGVQITDIAQEGCDPCDAHIWN

SEQ ID NO: 20848 - DNA, 863 bp, Arabidopsis thaliana
  misc_feature (1)..(863): Ceres Seq. ID no. 12322956
  misc_feature: MA Experiment ID: 108434 Result: Down-regulated in Transcription
  misc_feature: MA Experiment 108434 PARAMETER Experiment Name: At_Root_Tips_cDNA_P Parameter: Tissue Value: Root Tips
  misc_feature: MA Experiment ID: 108573 Result: Up-regulated in Transcription
  misc_feature: MA Experiment 108573 PARAMETER Experiment Name: At_Drought_cDNA_P Parameter: Timepoint (hr) Value: 6
  misc_feature: MA Experiment 108573 PARAMETER Experiment Name: At_Drought_cDNA_P Parameter: Tissue Value: Aerial
  misc_feature: MA Experiment 108573 PARAMETER Experiment Name: At_Drought_cDNA_P Parameter: Treatment Value: Drought vs. No Drought
  misc_feature: MA Experiment ID: 108595 Result: Down-regulated in Transcription
  misc_feature: MA Experiment 108595 PARAMETER Experiment Name: At_Ler-pi_Ovule_cDNA_P Parameter: Plant Line Value: null
aattggtcaaagaaaaaaaaagaaagacatagaggattgaacggtagacgtagacgccattggagtttgaaagggaattagtcgacgttttatggatcattgtcgtttcggtgtcattttcttcttcttctttcgctagcacgatttaaagcctgactagatccatcatcggccatggaggattctacagccacggctacgtcttcgtcttccactcattatctctccattttcacgaattatcctctcatttccgccgtcacctctttcactatcgctcaattcatcaaactcttcacctcctggtatagggaacggagatgggatctcaaacagcttattgggtctggaggaatgccttcttcgcattcagcgaccgttacagctctcgctgtagctattggtttacaagaaggctttggtggatcacattttgccattgctttgattttggcatctgttgtgatgtatgatgctaccggtgttagattacatgctggtcgtcaagctgaggttctcaatcagattgtatatgaacttcctgcagaacatccgctggctgaaagcagacctttgcgggaacttcttggtcatacccctccccaggtcgttgctggtggaatgcttggaagtgctacagcagtcaccggatacttatttttcaggatagctacaagctaacgtcaagaacatgcatagacacaactcttctgcttcattgcctattgaagccactggagagtaccaaaacagatttacaaccgaatccgagttaaaaatatatttattcttgtttaacattaccattaccatatgtaaagaaatcgtgaaacaccattacaaaaataacgtgattttatttg

SEQ ID NO: 20849 - protein, 168 aa, Arabidopsis thaliana
  peptide (1)..(168): Ceres Seq. ID no. 12322957
  misc_feature (17)..(161): Pfam Name: Divergent PAP2 family Pfam Description: Divergent PAP2 family
  misc_feature (22)..(145): Homolog of NCBI NO: 29150195 NR Description: putative protein [Oryza sativa (indica
  misc_feature (22)..(157): Homolog of NCBI NO: 38344227 NR Description: OJ991113_30.3 [Oryza sativa (japonica
  misc_feature (22)..(156): Homolog of NCBI NO: 30686309 NR Description: expressed protein [Arabidopsis thaliana]
  misc_feature (1)..(145): Homolog of NCBI NO: 12324675 NR Description: unknown protein [Arabidopsis thaliana]
  misc_feature (1)..(166): Homolog of NCBI NO: 15220480 NR Description: F12A21.27; protein id: At1g67600.1, supported by
  misc_feature (1)..(145): Homolog of NCBI NO: 26449729 NR Description: unknown protein [Arabidopsis thaliana]
  misc_feature (1)..(145): Homolog of NCBI NO: 9743358 NR Description: F21J9.1 [Arabidopsis thaliana]
  misc_feature (1)..(168): Homolog of NCBI NO: 7486375 NR Description: hypothetical protein F3I6.29 - Arabidopsis
  misc_feature (1)..(168): Homolog of NCBI NO: 18395459 NR Description: expressed protein
  misc_feature (1)..(168): Homolog of NCBI NO: 21555270 NR Description: unknown [Arabidopsis thaliana]
MEDSTATATSSSSTHYLSIFTNYPLISAVTSFTIAQFIKLFTSWYRERRWDLKQLIGSGGMPSSHSATVTALAVAIGLQEGFGGSHFAIALILASVVMYDATGVRLHAGRQAEVLNQIVYELPAEHPLAESRPLRELLGHTPPQVVAGGMLGSATAVTGYLFFRIATS

SEQ ID NO: 20850 - protein, 108 aa, Arabidopsis thaliana
  peptide (1)..(108): Ceres Seq. ID no. 12322958
  misc_feature (1)..(101): Pfam Name: Divergent PAP2 family Pfam Description: Divergent PAP2 family
  misc_feature (1)..(85): Homolog of NCBI NO: 29150195 NR Description: putative protein [Oryza sativa (indica
  misc_feature (1)..(97): Homolog of NCBI NO: 38344227 NR Description: OJ991113_30.3 [Oryza sativa (japonica
  misc_feature (1)..(96): Homolog of NCBI NO: 30686309 NR Description: expressed protein [Arabidopsis thaliana]
  misc_feature (1)..(85): Homolog of NCBI NO: 12324675 NR Description: unknown protein [Arabidopsis thaliana]
  misc_feature (1)..(106): Homolog of NCBI NO: 15220480 NR Description: F12A21.27; protein id: At1g67600.1, supported by
  misc_feature (1)..(85): Homolog of NCBI NO: 26449729 NR Description: unknown protein [Arabidopsis thaliana]
  misc_feature (1)..(85): Homolog of NCBI NO: 9743358 NR Description: F21J9.1 [Arabidopsis thaliana]
  misc_feature (1)..(108): Homolog of NCBI NO: 7486375 NR Description: hypothetical protein F3I6.29 - Arabidopsis
  misc_feature (1)..(108): Homolog of NCBI NO: 18395459 NR Description: expressed protein
  misc_feature (1)..(108): Homolog of NCBI NO: 21555270 NR Description: unknown [Arabidopsis thaliana]
MPSSHSATVTALAVAIGLQEGFGGSHFAIALILASVVMYDATGVRLHAGRQAEVLNQIVYELPAEHPLAESRPLRELLGHTPPQVVAGGMLGSATAVTGYLFFRIATS

SEQ ID NO: 20851 - DNA, 1016 bp, Arabidopsis thaliana
  misc_feature (1)..(1016): Ceres Seq. ID no. 12329124
  misc_feature: MA Experiment ID: 108569 Result: Up-regulated in Transcription
  misc_feature: MA Experiment 108569 PARAMETER Experiment Name: At_0.001%_MeJA__cDNA_P Parameter: Timepoint (hr) Value: 6
  misc_feature: MA Experiment 108569 PARAMETER Experiment Name: At_0.001%_MeJA__cDNA_P Parameter: Tissue Value: Aerial
  misc_feature: MA Experiment 108569 PARAMETER Experiment Name: At_0.001%_MeJA__cDNA_P Parameter: Treatment Value: 0.001% MeJA vs. No Treatment
  misc_feature: MA Experiment ID: 108579 Result: Down-regulated in Transcription
  misc_feature: MA Experiment 108579 PARAMETER Experiment Name: At_4deg_Cold_cDNA_P Parameter: Temperature (deg C) Value: 4 vs. 22
  misc_feature: MA Experiment 108579 PARAMETER Experiment Name: At_4deg_Cold_cDNA_P Parameter: Timepoint (hr) Value: 6
  misc_feature: MA Experiment 108579 PARAMETER Experiment Name: At_4deg_Cold_cDNA_P Parameter: Tissue Value: Aerial
  misc_feature: MA Experiment ID: 108595 Result: Down-regulated in Transcription
  misc_feature: MA Experiment 108595 PARAMETER Experiment Name: At_Ler-pi_Ovule_cDNA_P Parameter: Plant Line Value: null
  misc_feature: MA Experiment ID: 108607 Result: Down-regulated in Transcription
  misc_feature: MA Experiment 108607 PARAMETER Experiment Name: At_100uM_ABA_cDNA_P Parameter: Timepoint (hr) Value: 4
  misc_feature: MA Experiment 108607 PARAMETER Experiment Name: At_100uM_ABA_cDNA_P Parameter: Tissue Value: Aerial
  misc_feature: MA Experiment 108607 PARAMETER Experiment Name: At_100uM_ABA_cDNA_P Parameter: Treatment Value: 100uM ABA vs. No Treatment
  misc_feature: MA Experiment ID: 20000069 Result: Down-regulated in Transcription
  misc_feature: MA Experiment 20000069 PARAMETER Experiment Name: At_100uM_ABA_Mutants_cDNA_P Parameter: Plant Line Value: CS23
  misc_feature: MA Experiment 20000069 PARAMETER Experiment Name: At_100uM_ABA_Mutants_cDNA_P Parameter: Timepoint (hr) Value: 6
  misc_feature: MA Experiment 20000069 PARAMETER Experiment Name: At_100uM_ABA_Mutants_cDNA_P Parameter: Tissue Value: Aerial
  misc_feature: MA Experiment 20000069 PARAMETER Experiment Name: At_100uM_ABA_Mutants_cDNA_P Parameter: Treatment Value: 100uM ABA vs. No Treatment
  misc_feature: MA Experiment ID: 20000070 Result: Down-regulated in Transcription
  misc_feature: MA Experiment 20000070 PARAMETER Experiment Name: At_100uM_ABA_Mutants_cDNA_P Parameter: Plant Line Value: CS24
  misc_feature: MA Experiment 20000070 PARAMETER Experiment Name: At_100uM_ABA_Mutants_cDNA_P Parameter: Timepoint (hr) Value: 6
  misc_feature: MA Experiment 20000070 PARAMETER Experiment Name: At_100uM_ABA_Mutants_cDNA_P Parameter: Tissue Value: Aerial
  misc_feature: MA Experiment 20000070 PARAMETER Experiment Name: At_100uM_ABA_Mutants_cDNA_P Parameter: Treatment Value: 100uM ABA vs. No Treatment
  misc_feature: MA Experiment ID: 20000072 Result: Down-regulated in Transcription
  misc_feature: MA Experiment 20000072 PARAMETER Experiment Name: At_100uM_ABA_Mutants_cDNA_P Parameter: Plant Line Value: CS8105
  misc_feature: MA Experiment 20000072 PARAMETER Experiment Name: At_100uM_ABA_Mutants_cDNA_P Parameter: Timepoint (hr) Value: 6
  misc_feature: MA Experiment 20000072 PARAMETER Experiment Name: At_100uM_ABA_Mutants_cDNA_P Parameter: Tissue Value: Aerial
  misc_feature: MA Experiment 20000072 PARAMETER Experiment Name: At_100uM_ABA_Mutants_cDNA_P Parameter: Treatment Value: 100uM ABA vs. No Treatment
  misc_feature: MA Experiment ID: 20000086 Result: Down-regulated in Transcription
  misc_feature: MA Experiment 20000086 PARAMETER Experiment Name: At_100uM_ABA_Mutants_cDNA_P Parameter: Plant Line Value: CS22
  misc_feature: MA Experiment 20000086 PARAMETER Experiment Name: At_100uM_ABA_Mutants_cDNA_P Parameter: Timepoint (hr) Value: 6
  misc_feature: MA Experiment 20000086 PARAMETER Experiment Name: At_100uM_ABA_Mutants_cDNA_P Parameter: Tissue Value: Aerial
  misc_feature: MA Experiment 20000086 PARAMETER Experiment Name: At_100uM_ABA_Mutants_cDNA_P Parameter: Treatment Value: 100uM ABA vs. No Treatment
  misc_feature: MA Experiment ID: 20000087 Result: Down-regulated in Transcription
  misc_feature: MA Experiment 20000087 PARAMETER Experiment Name: At_100uM_ABA_Mutants_cDNA_P Parameter: Plant Line Value: WS
  misc_feature: MA Experiment 20000087 PARAMETER Experiment Name: At_100uM_ABA_Mutants_cDNA_P Parameter: Timepoint (hr) Value: 6
  misc_feature: MA Experiment 20000087 PARAMETER Experiment Name: At_100uM_ABA_Mutants_cDNA_P Parameter: Tissue Value: Aerial
  misc_feature: MA Experiment 20000087 PARAMETER Experiment Name: At_100uM_ABA_Mutants_cDNA_P Parameter: Treatment Value: 100uM ABA vs. No Treatment
  misc_feature: MA Experiment ID: 20000088 Result: Down-regulated in Transcription
  misc_feature: MA Experiment 20000088 PARAMETER Experiment Name: At_100uM_ABA_Mutants_cDNA_P Parameter: Plant Line Value: Landsberg
  misc_feature: MA Experiment 20000088 PARAMETER Experiment Name: At_100uM_ABA_Mutants_cDNA_P Parameter: Timepoint (hr) Value: 6
  misc_feature: MA Experiment 20000088 PARAMETER Experiment Name: At_100uM_ABA_Mutants_cDNA_P Parameter: Tissue Value: Aerial
  misc_feature: MA Experiment 20000088 PARAMETER Experiment Name: At_100uM_ABA_Mutants_cDNA_P Parameter: Treatment Value: 100uM ABA vs. No Treatment
  misc_feature: MA Experiment ID: 20000144 Result: Down-regulated in Transcription
  misc_feature: MA Experiment 20000144 PARAMETER Experiment Name: At_42deg_Heat_cDNA_P Parameter: Temperature (deg C) Value: 42 vs. 22
  misc_feature: MA Experiment 20000144 PARAMETER Experiment Name: At_42deg_Heat_cDNA_P Parameter: Timepoint (hr) Value: 1
  misc_feature: MA Experiment 20000144 PARAMETER Experiment Name: At_42deg_Heat_cDNA_P Parameter: Tissue Value: Aerial
  misc_feature: MA Experiment ID: 20000166 Result: Down-regulated in Transcription
  misc_feature: MA Experiment 20000166 PARAMETER Experiment Name: At_100uM_ABA_P Parameter: Age (day) Value: 14
  misc_feature: MA Experiment 20000166 PARAMETER Experiment Name: At_100uM_ABA_P Parameter: Organism Value: A. thaliana
  misc_feature: MA Experiment 20000166 PARAMETER Experiment Name: At_100uM_ABA_P Parameter: Plant Line Value: WS
  misc_feature: MA Experiment 20000166 PARAMETER Experiment Name: At_100uM_ABA_P Parameter: Timepoint (hr) Value: 1
  misc_feature: MA Experiment 20000166 PARAMETER Experiment Name: At_100uM_ABA_P Parameter: Tissue Value: Aerial
  misc_feature: MA Experiment 20000166 PARAMETER Experiment Name: At_100uM_ABA_P Parameter: Treatment Value: 100uM ABA vs. No Treatment
  misc_feature: MA Experiment ID: 20000169 Result: Down-regulated in Transcription
  misc_feature: MA Experiment 20000169 PARAMETER Experiment Name: At_100uM_ABA_P Parameter: Age (day) Value: 14
  misc_feature: MA Experiment 20000169 PARAMETER Experiment Name: At_100uM_ABA_P Parameter: Organism Value: A. thaliana
  misc_feature: MA Experiment 20000169 PARAMETER Experiment Name: At_100uM_ABA_P Parameter: Plant Line Value: WS
  misc_feature: MA Experiment 20000169 PARAMETER Experiment Name: At_100uM_ABA_P Parameter: Timepoint (hr) Value: 6
  misc_feature: MA Experiment 20000169 PARAMETER Experiment Name: At_100uM_ABA_P Parameter: Tissue Value: Aerial
  misc_feature: MA Experiment 20000169 PARAMETER Experiment Name: At_100uM_ABA_P Parameter: Treatment Value: 100uM ABA vs. No Treatment
  misc_feature: MA Experiment ID: 20000171 Result: Down-regulated in Transcription
  misc_feature: MA Experiment 20000171 PARAMETER Experiment Name: At_42deg_Heat_P Parameter: Age (day) Value: 14
  misc_feature: MA Experiment 20000171 PARAMETER Experiment Name: At_42deg_Heat_P Parameter: Organism Value: A. thaliana
  misc_feature: MA Experiment 20000171 PARAMETER Experiment Name: At_42deg_Heat_P Parameter: Plant Line Value: WS
  misc_feature: MA Experiment 20000171 PARAMETER Experiment Name: At_42deg_Heat_P Parameter: Temperature (deg C) Value: 42 vs. 22
  misc_feature: MA Experiment 20000171 PARAMETER Experiment Name: At_42deg_Heat_P Parameter: Timepoint (hr) Value: 1
  misc_feature: MA Experiment 20000171 PARAMETER Experiment Name: At_42deg_Heat_P Parameter: Tissue Value: Aerial
  misc_feature: MA Experiment ID: 20000173 Result: Down-regulated in Transcription
  misc_feature: MA Experiment 20000173 PARAMETER Experiment Name: At_42deg_Heat_P Parameter: Age (day) Value: 14
  misc_feature: MA Experiment 20000173 PARAMETER Experiment Name: At_42deg_Heat_P Parameter: Organism Value: A. thaliana
  misc_feature: MA Experiment 20000173 PARAMETER Experiment Name: At_42deg_Heat_P Parameter: Plant Line Value: WS
  misc_feature: MA Experiment 20000173 PARAMETER Experiment Name: At_42deg_Heat_P Parameter: Temperature (deg C) Value: 42 vs. 22
  misc_feature: MA Experiment 20000173 PARAMETER Experiment Name: At_42deg_Heat_P Parameter: Timepoint (hr) Value: 6
  misc_feature: MA Experiment 20000173 PARAMETER Experiment Name: At_42deg_Heat_P Parameter: Tissue Value: Aerial
  misc_feature: MA Experiment ID: 20000179 Result: Down-regulated in Transcription
  misc_feature: MA Experiment 20000179 PARAMETER Experiment Name: At_Germinating_Seeds_P Parameter: Age (hr) Value: 6 vs. 0
  misc_feature: MA Experiment 20000179 PARAMETER Experiment Name: At_Germinating_Seeds_P Parameter: Tissue Value: Germinating Seeds
  misc_feature: MA Experiment ID: 20000180 Result: Down-regulated in Transcription
  misc_feature: MA Experiment 20000180 PARAMETER Experiment Name: At_Germinating_Seeds_P Parameter: Age (hr) Value: 24 vs. 0
  misc_feature: MA Experiment 20000180 PARAMETER Experiment Name: At_Germinating_Seeds_P Parameter: Tissue Value: Germinating Seeds
  misc_feature: MA Experiment ID: 20000184 Result: Up-regulated in Transcription
  misc_feature: MA Experiment 20000184 PARAMETER Experiment Name: At_Shoots__P Parameter: Age (day) Value: 7
  misc_feature: MA Experiment 20000184 PARAMETER Experiment Name: At_Shoots__P Parameter: Tissue Value: Shoots vs. Whole Plant
  misc_feature: MA Experiment ID: 20000213 Result: Down-regulated in Transcription
  misc_feature: MA Experiment 20000213 PARAMETER Experiment Name: At_4deg_Cold_P Parameter: Timepoint (hr) Value: 2
  misc_feature: MA Experiment ID: 20000234 Result: Up-regulated in Transcription
  misc_feature: MA Experiment 20000234 PARAMETER Experiment Name: At_Siliques_P Parameter: Age (day) Value: 21
  misc_feature: MA Experiment 20000234 PARAMETER Experiment Name: At_Siliques_P Parameter: Organism Value: A. thaliana
  misc_feature: MA Experiment 20000234 PARAMETER Experiment Name: At_Siliques_P Parameter: Plant Line Value: WS
  misc_feature: MA Experiment 20000234 PARAMETER Experiment Name: At_Siliques_P Parameter: Tissue Value: Less Than 5mm Siliques vs. Whole Plant
  misc_feature: MA Experiment ID: 20000264 Result: Up-regulated in Transcription
  misc_feature: MA Experiment 20000264 PARAMETER Experiment Name: At_Open_Flower_P Parameter: Age (day) Value: 21
  misc_feature: MA Experiment 20000264 PARAMETER Experiment Name: At_Open_Flower_P Parameter: Plant Line Value: WS
  misc_feature: MA Experiment 20000264 PARAMETER Experiment Name: At_Open_Flower_P Parameter: Tissue Value: Open Flower vs. Whole Plant
  misc_feature: MA Experiment ID: 20000265 Result: Up-regulated in Transcription
  misc_feature: MA Experiment 20000265 PARAMETER Experiment Name: At_Open_Flower_P Parameter: Age (day) Value: 21
  misc_feature: MA Experiment 20000265 PARAMETER Experiment Name: At_Open_Flower_P Parameter: Plant Line Value: WS
  misc_feature: MA Experiment 20000265 PARAMETER Experiment Name: At_Open_Flower_P Parameter: Tissue Value: Closed Flower vs. Whole Plant
  misc_feature: MA Experiment ID: 20000267 Result: Down-regulated in Transcription
  misc_feature: MA Experiment 20000267 PARAMETER Experiment Name: At_Drought_P Parameter: Age (day) Value: 7
  misc_feature: MA Experiment 20000267 PARAMETER Experiment Name: At_Drought_P Parameter: Organism Value: A. thaliana
  misc_feature: MA Experiment 20000267 PARAMETER Experiment Name: At_Drought_P Parameter: Plant Line Value: WS
  misc_feature: MA Experiment 20000267 PARAMETER Experiment Name: At_Drought_P Parameter: Timepoint (hr) Value: 6
  misc_feature: MA Experiment 20000267 PARAMETER Experiment Name: At_Drought_P Parameter: Tissue Value: Whole Plant
  misc_feature: MA Experiment 20000267 PARAMETER Experiment Name: At_Drought_P Parameter: Treatment Value: Drought vs. No Drought
  misc_feature: MA Experiment ID: 20000286 Result: Up-regulated in Transcription
  misc_feature: MA Experiment 20000286 PARAMETER Experiment Name: At_Open_Flower_P Parameter: Age (day) Value: 21
  misc_feature: MA Experiment 20000286 PARAMETER Experiment Name: At_Open_Flower_P Parameter: Plant Line Value: WS
  misc_feature: MA Experiment 20000286 PARAMETER Experiment Name: At_Open_Flower_P Parameter: Tissue Value: Half Open vs. Whole Plant
  misc_feature: MA Experiment ID: 20000288 Result: Down-regulated in Transcription
  misc_feature: MA Experiment 20000288 PARAMETER Experiment Name: At_Drought_P Parameter: Age (day) Value: 7
  misc_feature: MA Experiment 20000288 PARAMETER Experiment Name: At_Drought_P Parameter: Organism Value: A. thaliana
  misc_feature: MA Experiment 20000288 PARAMETER Experiment Name: At_Drought_P Parameter: Plant Line Value: WS
  misc_feature: MA Experiment 20000288 PARAMETER Experiment Name: At_Drought_P Parameter: Timepoint (hr) Value: 1
  misc_feature: MA Experiment 20000288 PARAMETER Experiment Name: At_Drought_P Parameter: Tissue Value: Whole Plant
  misc_feature: MA Experiment 20000288 PARAMETER Experiment Name: At_Drought_P Parameter: Treatment Value: Drought vs. No Drought
  misc_feature: MA Experiment ID: 20000308 Result: Down-regulated in Transcription
  misc_feature: MA Experiment 20000308 PARAMETER Experiment Name: At_100mM_NaCl__P Parameter: Age (day) Value: 17
  misc_feature: MA Experiment 20000308 PARAMETER Experiment Name: At_100mM_NaCl__P Parameter: Organism Value: A. thaliana
  misc_feature: MA Experiment 20000308 PARAMETER Experiment Name: At_100mM_NaCl__P Parameter: Plant Line Value: WS
  misc_feature: MA Experiment 20000308 PARAMETER Experiment Name: At_100mM_NaCl__P Parameter: Timepoint (hr) Value: 72
  misc_feature: MA Experiment 20000308 PARAMETER Experiment Name: At_100mM_NaCl__P Parameter: Tissue Value: Whole Plant
  misc_feature: MA Experiment 20000308 PARAMETER Experiment Name: At_100mM_NaCl__P Parameter: Treatment Value: 100mM NaCl vs. No Treatment
  misc_feature: MA Experiment ID: 20000436 Result: Down-regulated in Transcription
  misc_feature: MA Experiment 20000436 PARAMETER Experiment Name: At_Drought_P Parameter: Age (day) Value: 7
  misc_feature: MA Experiment 20000436 PARAMETER Experiment Name: At_Drought_P Parameter: Organism Value: A. thaliana
  misc_feature: MA Experiment 20000436 PARAMETER Experiment Name: At_Drought_P Parameter: Plant Line Value: WS
  misc_feature: MA Experiment 20000436 PARAMETER Experiment Name: At_Drought_P Parameter: Timepoint (hr) Value: 12
  misc_feature: MA Experiment 20000436 PARAMETER Experiment Name: At_Drought_P Parameter: Tissue Value: Whole Plant
  misc_feature: MA Experiment 20000436 PARAMETER Experiment Name: At_Drought_P Parameter: Treatment Value: Drought vs. No Drought
  misc_feature: MA Experiment ID: 20000437 Result: Down-regulated in Transcription
  misc_feature: MA Experiment 20000437 PARAMETER Experiment Name: At_Drought_P Parameter: Age (day) Value: 8
  misc_feature: MA Experiment 20000437 PARAMETER Experiment Name: At_Drought_P Parameter: Organism Value: A. thaliana
  misc_feature: MA Experiment 20000437 PARAMETER Experiment Name: At_Drought_P Parameter: Plant Line Value: WS
  misc_feature: MA Experiment 20000437 PARAMETER Experiment Name: At_Drought_P Parameter: Timepoint (hr) Value: 24
  misc_feature: MA Experiment 20000437 PARAMETER Experiment Name: At_Drought_P Parameter: Tissue Value: Whole Plant
  misc_feature: MA Experiment 20000437 PARAMETER Experiment Name: At_Drought_P Parameter: Treatment Value: Drought vs. No Drought
  misc_feature: MA Experiment ID: 20000438 Result: Up-regulated in Transcription
  misc_feature: MA Experiment 20000438 PARAMETER Experiment Name: At_Shoots__P Parameter: Age (day) Value: 14
  misc_feature: MA Experiment 20000438 PARAMETER Experiment Name: At_Shoots__P Parameter: Tissue Value: Shoots vs. Whole Plant
  misc_feature: MA Experiment ID: 20000444 Result: Up-regulated in Transcription
  misc_feature: MA Experiment 20000444 PARAMETER Experiment Name: At_100uM_NAA__P Parameter: Age (day) Value: 14
  misc_feature: MA Experiment 20000444 PARAMETER Experiment Name: At_100uM_NAA__P Parameter: Organism Value: A. thaliana
  misc_feature: MA Experiment 20000444 PARAMETER Experiment Name: At_100uM_NAA__P Parameter: Plant Line Value: WS
  misc_feature: MA Experiment 20000444 PARAMETER Experiment Name: At_100uM_NAA__P Parameter: Timepoint (hr) Value: 1
  misc_feature: MA Experiment 20000444 PARAMETER Experiment Name: At_100uM_NAA__P Parameter: Tissue Value: Aerial
  misc_feature: MA Experiment 20000444 PARAMETER Experiment Name: At_100uM_NAA__P Parameter: Treatment Value: 100uM NAA vs. No Treatment
  misc_feature: MA Experiment ID: 20000451 Result: Up-regulated in Transcription
  misc_feature: MA Experiment 20000451 PARAMETER Experiment Name: At_CS6879_Shoots-Roots_P Parameter: Age (day) Value: 14
  misc_feature: MA Experiment 20000451 PARAMETER Experiment Name: At_CS6879_Shoots-Roots_P Parameter: Organism Value: A. thaliana
  misc_feature: MA Experiment 20000451 PARAMETER Experiment Name: At_CS6879_Shoots-Roots_P Parameter: Plant Line Value: CS6879 vs. WS
  misc_feature: MA Experiment 20000451 PARAMETER Experiment Name: At_CS6879_Shoots-Roots_P Parameter: Tissue Value: Roots
  misc_feature: MA Experiment ID: 20000453 Result: Down-regulated in Transcription
  misc_feature: MA Experiment 20000453 PARAMETER Experiment Name: At_100uM_ABA_P Parameter: Age (day) Value: 15
  misc_feature: MA Experiment 20000453 PARAMETER Experiment Name: At_100uM_ABA_P Parameter: Organism Value: A. thaliana
  misc_feature: MA Experiment 20000453 PARAMETER Experiment Name: At_100uM_ABA_P Parameter: Plant Line Value: WS
  misc_feature: MA Experiment 20000453 PARAMETER Experiment Name: At_100uM_ABA_P Parameter: Timepoint (hr) Value: 24
  misc_feature: MA Experiment 20000453 PARAMETER Experiment Name: At_100uM_ABA_P Parameter: Tissue Value: Aerial
  misc_feature: MA Experiment 20000453 PARAMETER Experiment Name: At_100uM_ABA_P Parameter: Treatment Value: 100uM ABA vs. No Treatment
  misc_feature: MA Experiment ID: 20000455 Result: Down-regulated in Transcription
  misc_feature: MA Experiment 20000455 PARAMETER Experiment Name: At_100uM_ABA_P Parameter: Age (day) Value: 16
  misc_feature: MA Experiment 20000455 PARAMETER Experiment Name: At_100uM_ABA_P Parameter: Organism Value: A. thaliana
  misc_feature: MA Experiment 20000455 PARAMETER Experiment Name: At_100uM_ABA_P Parameter: Plant Line Value: WS
  misc_feature: MA Experiment 20000455 PARAMETER Experiment Name: At_100uM_ABA_P Parameter: Timepoint (hr) Value: 48
  misc_feature: MA Experiment 20000455 PARAMETER Experiment Name: At_100uM_ABA_P Parameter: Tissue Value: Aerial
  misc_feature: MA Experiment 20000455 PARAMETER Experiment Name: At_100uM_ABA_P Parameter: Treatment Value: 100uM ABA vs. No Treatment
  misc_feature: MA Experiment ID: 20000573 Result: Down-regulated in Transcription
  misc_feature: MA Experiment 20000573 PARAMETER Experiment Name: At_100uM_ABA_Mutants__P Parameter: Organism Value: A. thaliana
  misc_feature: MA Experiment 20000573 PARAMETER Experiment Name: At_100uM_ABA_Mutants__P Parameter: Plant Line Value: CS22 vs. Ler wt
  misc_feature: MA Experiment 20000573 PARAMETER Experiment Name: At_100uM_ABA_Mutants__P Parameter: Timepoint (hr) Value: N/A
  misc_feature: MA Experiment 20000573 PARAMETER Experiment Name: At_100uM_ABA_Mutants__P Parameter: Tissue Value: Whole Plant
  misc_feature: MA Experiment 20000573 PARAMETER Experiment Name: At_100uM_ABA_Mutants__P Parameter: Treatment Value: None
  misc_feature: MA Experiment ID: 20000574 Result: Down-regulated in Transcription
  misc_feature: MA Experiment 20000574 PARAMETER Experiment Name: At_100uM_ABA_Mutants__P Parameter: Organism Value: A. thaliana
  misc_feature: MA Experiment 20000574 PARAMETER Experiment Name: At_100uM_ABA_Mutants__P Parameter: Plant Line Value: CS23 vs. Ler wt
  misc_feature: MA Experiment 20000574 PARAMETER Experiment Name: At_100uM_ABA_Mutants__P Parameter: Timepoint (hr) Value: N/A
  misc_feature: MA Experiment 20000574 PARAMETER Experiment Name: At_100uM_ABA_Mutants__P Parameter: Tissue Value: Whole Plant
  misc_feature: MA Experiment 20000574 PARAMETER Experiment Name: At_100uM_ABA_Mutants__P Parameter: Treatment Value: None
  misc_feature: MA Experiment ID: 20000578 Result: Down-regulated in Transcription
  misc_feature: MA Experiment 20000578 PARAMETER Experiment Name: At_CS3726__P Parameter: Organism Value: A. thaliana
  misc_feature: MA Experiment 20000578 PARAMETER Experiment Name: At_CS3726__P Parameter: Plant Line Value: CS3726
  misc_feature: MA Experiment 20000578 PARAMETER Experiment Name: At_CS3726__P Parameter: Tissue Value: Whole Plant
  misc_feature: MA Experiment ID: 20000794 Result: Up-regulated in Transcription
  misc_feature: MA Experiment 20000794 PARAMETER Experiment Name: At_Petals_P Parameter: Age (day) Value: 23-25 days
  misc_feature: MA Experiment 20000794 PARAMETER Experiment Name: At_Petals_P Parameter: Plant Line Value: WS
  misc_feature: MA Experiment 20000794 PARAMETER Experiment Name: At_Petals_P Parameter: Tissue Value: Petals vs. Whole plant
  misc_feature: MA Experiment ID: 20001247 Result: Down-regulated in Transcription
  misc_feature: MA Experiment 20001247 PARAMETER Experiment Name: At_Far-red-induction_P Parameter: Age (day) Value: 7
  misc_feature: MA Experiment 20001247 PARAMETER Experiment Name: At_Far-red-induction_P Parameter: Light Value: Far-red vs. White
  misc_feature: MA Experiment 20001247 PARAMETER Experiment Name: At_Far-red-induction_P Parameter: Organism Value: A. thaliana
  misc_feature: MA Experiment 20001247 PARAMETER Experiment Name: At_Far-red-induction_P Parameter: Plant Line Value: Columbia
  misc_feature: MA Experiment 20001247 PARAMETER Experiment Name: At_Far-red-induction_P Parameter: Timepoint (hr) Value: 1
  misc_feature: MA Experiment 20001247 PARAMETER Experiment Name: At_Far-red-induction_P Parameter: Tissue Value: Whole Plant
  misc_feature: MA Experiment ID: 20001248 Result: Down-regulated in Transcription
  misc_feature: MA Experiment 20001248 PARAMETER Experiment Name: At_Far-red-induction_P Parameter: Age (day) Value: 7
  misc_feature: MA Experiment 20001248 PARAMETER Experiment Name: At_Far-red-induction_P Parameter: Light Value: Far-red vs. White
  misc_feature: MA Experiment 20001248 PARAMETER Experiment Name: At_Far-red-induction_P Parameter: Organism Value: A. thaliana
  misc_feature: MA Experiment 20001248 PARAMETER Experiment Name: At_Far-red-induction_P Parameter: Plant Line Value: Columbia
  misc_feature: MA Experiment 20001248 PARAMETER Experiment Name: At_Far-red-induction_P Parameter: Timepoint (hr) Value: 4
  misc_feature: MA Experiment 20001248 PARAMETER Experiment Name: At_Far-red-induction_P Parameter: Tissue Value: Whole Plant
  misc_feature: MA Experiment ID: 20001451 Result: Down-regulated in Transcription
  misc_feature: MA Experiment 20001451 PARAMETER Experiment Name: At_Far-red-induction_P Parameter: Age (day) Value: 7
  misc_feature: MA Experiment 20001451 PARAMETER Experiment Name: At_Far-red-induction_P Parameter: Light Value: Far-red vs. White
  misc_feature: MA Experiment 20001451 PARAMETER Experiment Name: At_Far-red-induction_P Parameter: Organism Value: A. thaliana
  misc_feature: MA Experiment 20001451 PARAMETER Experiment Name: At_Far-red-induction_P Parameter: Plant Line Value: Columbia
  misc_feature: MA Experiment 20001451 PARAMETER Experiment Name: At_Far-red-induction_P Parameter: Timepoint (hr) Value: 24
  misc_feature: MA Experiment 20001451 PARAMETER Experiment Name: At_Far-red-induction_P Parameter: Tissue Value: Whole Plant
  misc_feature: MA Experiment ID: 20001554 Result: Down-regulated in Transcription
  misc_feature: MA Experiment 20001554 PARAMETER Experiment Name: At_Drought_Soil_Dry_P Parameter: Age (day) Value: 21
  misc_feature: MA Experiment 20001554 PARAMETER Experiment Name: At_Drought_Soil_Dry_P Parameter: Organism Value: A. thaliana
  misc_feature: MA Experiment 20001554 PARAMETER Experiment Name: At_Drought_Soil_Dry_P Parameter: Plant Line Value: WS
  misc_feature: MA Experiment 20001554 PARAMETER Experiment Name: At_Drought_Soil_Dry_P Parameter: Post Timepoint (hr) Value: None
  misc_feature: MA Experiment 20001554 PARAMETER Experiment Name: At_Drought_Soil_Dry_P Parameter: Post-Treatment Value: None
  misc_feature: MA Experiment 20001554 PARAMETER Experiment Name: At_Drought_Soil_Dry_P Parameter: Timepoint (day) Value: 7
  misc_feature: MA Experiment 20001554 PARAMETER Experiment Name: At_Drought_Soil_Dry_P Parameter: Treatment Value: Drought vs. No Drought
  misc_feature: MA Experiment ID: 20001555 Result: Down-regulated in Transcription
  misc_feature: MA Experiment 20001555 PARAMETER Experiment Name: At_Drought_Soil_Dry_P Parameter: Age (day) Value: 24
  misc_feature: MA Experiment 20001555 PARAMETER Experiment Name: At_Drought_Soil_Dry_P Parameter: Organism Value: A. thaliana
  misc_feature: MA Experiment 20001555 PARAMETER Experiment Name: At_Drought_Soil_Dry_P Parameter: Plant Line Value: WS
  misc_feature: MA Experiment 20001555 PARAMETER Experiment Name: At_Drought_Soil_Dry_P Parameter: Post Timepoint (hr) Value: None
  misc_feature: MA Experiment 20001555 PARAMETER Experiment Name: At_Drought_Soil_Dry_P Parameter: Post-Treatment Value: None
  misc_feature: MA Experiment 20001555 PARAMETER Experiment Name: At_Drought_Soil_Dry_P Parameter: Timepoint (day) Value: 10
  misc_feature: MA Experiment 20001555 PARAMETER Experiment Name: At_Drought_Soil_Dry_P Parameter: Treatment Value: Drought vs. No Drought
  misc_feature: MA Experiment ID: 20001556 Result: Down-regulated in Transcription
  misc_feature: MA Experiment 20001556 PARAMETER Experiment Name: At_Drought_Soil_Dry_P Parameter: Age (day) Value: 26
  misc_feature: MA Experiment 20001556 PARAMETER Experiment Name: At_Drought_Soil_Dry_P Parameter: Organism Value: A. thaliana
  misc_feature: MA Experiment 20001556 PARAMETER Experiment Name: At_Drought_Soil_Dry_P Parameter: Plant Line Value: WS
  misc_feature: MA Experiment 20001556 PARAMETER Experiment Name: At_Drought_Soil_Dry_P Parameter: Post Timepoint (hr) Value: None
  misc_feature: MA Experiment 20001556 PARAMETER Experiment Name: At_Drought_Soil_Dry_P Parameter: Post-Treatment Value: None
  misc_feature: MA Experiment 20001556 PARAMETER Experiment Name: At_Drought_Soil_Dry_P Parameter: Timepoint (day) Value: 12
  misc_feature: MA Experiment 20001556 PARAMETER Experiment Name: At_Drought_Soil_Dry_P Parameter: Treatment Value: Drought vs. No Drought
  misc_feature: MA Experiment ID: 20001557 Result: Down-regulated in Transcription
  misc_feature: MA Experiment 20001557 PARAMETER Experiment Name: At_Drought_Soil_Dry_P Parameter: Age (day) Value: 27
  misc_feature: MA Experiment 20001557 PARAMETER Experiment Name: At_Drought_Soil_Dry_P Parameter: Organism Value: A. thaliana
  misc_feature: MA Experiment 20001557 PARAMETER Experiment Name: At_Drought_Soil_Dry_P Parameter: Plant Line Value: WS
  misc_feature: MA Experiment 20001557 PARAMETER Experiment Name: At_Drought_Soil_Dry_P Parameter: Post Timepoint (hr) Value: 3
  misc_feature: MA Experiment 20001557 PARAMETER Experiment Name: At_Drought_Soil_Dry_P Parameter: Post-Treatment Value: Re-Water vs. No Drought
  misc_feature: MA Experiment 20001557 PARAMETER Experiment Name: At_Drought_Soil_Dry_P Parameter: Timepoint (day) Value: 13
  misc_feature: MA Experiment 20001557 PARAMETER Experiment Name: At_Drought_Soil_Dry_P Parameter: Treatment Value: Drought vs. No Drought
  misc_feature: MA Experiment ID: 20001558 Result: Down-regulated in Transcription
  misc_feature: MA Experiment 20001558 PARAMETER Experiment Name: At_Drought_Soil_Dry_P Parameter: Age (day) Value: 27
  misc_feature: MA Experiment 20001558 PARAMETER Experiment Name: At_Drought_Soil_Dry_P Parameter: Organism Value: A. thaliana
  misc_feature: MA Experiment 20001558 PARAMETER Experiment Name: At_Drought_Soil_Dry_P Parameter: Plant Line Value: WS
  misc_feature: MA Experiment 20001558 PARAMETER Experiment Name: At_Drought_Soil_Dry_P Parameter: Post Timepoint (hr) Value: 6
  misc_feature: MA Experiment 20001558 PARAMETER Experiment Name: At_Drought_Soil_Dry_P Parameter: Post-Treatment Value: Re-Water vs. No Drought
  misc_feature: MA Experiment 20001558 PARAMETER Experiment Name: At_Drought_Soil_Dry_P Parameter: Timepoint (day) Value: 13
  misc_feature: MA Experiment 20001558 PARAMETER Experiment Name: At_Drought_Soil_Dry_P Parameter: Treatment Value: Drought vs. No Drought
  misc_feature: MA Experiment ID: 20001559 Result: Down-regulated in Transcription
  misc_feature: MA Experiment 20001559 PARAMETER Experiment Name: At_Drought_Soil_Dry_P Parameter: Age (day) Value: 28
  misc_feature: MA Experiment 20001559 PARAMETER Experiment Name: At_Drought_Soil_Dry_P Parameter: Organism Value: A. thaliana
  misc_feature: MA Experiment 20001559 PARAMETER Experiment Name: At_Drought_Soil_Dry_P Parameter: Plant Line Value: WS
  misc_feature: MA Experiment 20001559 PARAMETER Experiment Name: At_Drought_Soil_Dry_P Parameter: Post Timepoint (hr) Value: 29
  misc_feature: MA Experiment 20001559 PARAMETER Experiment Name: At_Drought_Soil_Dry_P Parameter: Post-Treatment Value: Re-Water vs. No Drought
  misc_feature: MA Experiment 20001559 PARAMETER Experiment Name: At_Drought_Soil_Dry_P Parameter: Timepoint (day) Value: 14
  misc_feature: MA Experiment 20001559 PARAMETER Experiment Name: At_Drought_Soil_Dry_P Parameter: Treatment Value: Drought vs. No Drought
  misc_feature: MA Experiment ID: 20001560 Result: Down-regulated in Transcription
  misc_feature: MA Experiment 20001560 PARAMETER Experiment Name: At_Drought_Soil_Dry_P Parameter: Age (day) Value: 28
  misc_feature: MA Experiment 20001560 PARAMETER Experiment Name: At_Drought_Soil_Dry_P Parameter: Organism Value: A. thaliana
  misc_feature: MA Experiment 20001560 PARAMETER Experiment Name: At_Drought_Soil_Dry_P Parameter: Plant Line Value: WS
  misc_feature: MA Experiment 20001560 PARAMETER Experiment Name: At_Drought_Soil_Dry_P Parameter: Post Timepoint (hr) Value: None
  misc_feature: MA Experiment 20001560 PARAMETER Experiment Name: At_Drought_Soil_Dry_P Parameter: Post-Treatment Value: None
  misc_feature: MA Experiment 20001560 PARAMETER Experiment Name: At_Drought_Soil_Dry_P Parameter: Timepoint (day) Value: 14
  misc_feature: MA Experiment 20001560 PARAMETER Experiment Name: At_Drought_Soil_Dry_P Parameter: Treatment Value: Drought vs. No Drought
  misc_feature: MA Experiment ID: 20001772 Result: Up-regulated in Transcription
  misc_feature: MA Experiment 20001772 PARAMETER Experiment Name: At_Far-red-enriched-adult_P Parameter: Age (day) Value: 29
  misc_feature: MA Experiment 20001772 PARAMETER Experiment Name: At_Far-red-enriched-adult_P Parameter: Light Value: Far-red enriched vs. White
  misc_feature: MA Experiment 20001772 PARAMETER Experiment Name: At_Far-red-enriched-adult_P Parameter: Organism Value: A. thaliana
  misc_feature: MA Experiment 20001772 PARAMETER Experiment Name: At_Far-red-enriched-adult_P Parameter: Plant Line Value: Columbia
  misc_feature: MA Experiment 20001772 PARAMETER Experiment Name: At_Far-red-enriched-adult_P Parameter: Timepoint (hr) Value: 24
  misc_feature: MA Experiment 20001772 PARAMETER Experiment Name: At_Far-red-enriched-adult_P Parameter: Tissue Value: Aerial
  misc_feature: MA Experiment ID: 20001904 Result: Down-regulated in Transcription
  misc_feature: MA Experiment 20001904 PARAMETER Experiment Name: At_Drought_Reproduction_P Parameter: Age (day) Value: 37
  misc_feature: MA Experiment 20001904 PARAMETER Experiment Name: At_Drought_Reproduction_P Parameter: Organism Value: A. thaliana
  misc_feature: MA Experiment 20001904 PARAMETER Experiment Name: At_Drought_Reproduction_P Parameter: Plant Line Value: WS
  misc_feature: MA Experiment 20001904 PARAMETER Experiment Name: At_Drought_Reproduction_P Parameter: Timepoint (day) Value: 7
  misc_feature: MA Experiment 20001904 PARAMETER Experiment Name: At_Drought_Reproduction_P Parameter: Tissue Value: Rosettes
  misc_feature: MA Experiment 20001904 PARAMETER Experiment Name: At_Drought_Reproduction_P Parameter: Treatment Value: Drought vs. No Drought
  misc_feature: MA Experiment ID: 20001906 Result: Down-regulated in Transcription
  misc_feature: MA Experiment 20001906 PARAMETER Experiment Name: At_Drought_Reproduction_P Parameter: Age (day) Value: 35
  misc_feature: MA Experiment 20001906 PARAMETER Experiment Name: At_Drought_Reproduction_P Parameter: Organism Value: A. thaliana
  misc_feature: MA Experiment 20001906 PARAMETER Experiment Name: At_Drought_Reproduction_P Parameter: Plant Line Value: WS
  misc_feature: MA Experiment 20001906 PARAMETER Experiment Name: At_Drought_Reproduction_P Parameter: Timepoint (day) Value: 5
  misc_feature: MA Experiment 20001906 PARAMETER Experiment Name: At_Drought_Reproduction_P Parameter: Tissue Value: Siliques
  misc_feature: MA Experiment 20001906 PARAMETER Experiment Name: At_Drought_Reproduction_P Parameter: Treatment Value: Drought vs. No Drought
  misc_feature: MA Experiment ID: 20001911 Result: Down-regulated in Transcription
  misc_feature: MA Experiment 20001911 PARAMETER Experiment Name: At_Drought_Reproduction_P Parameter: Age (day) Value: 40
  misc_feature: MA Experiment 20001911 PARAMETER Experiment Name: At_Drought_Reproduction_P Parameter: Organism Value: A. thaliana
  misc_feature: MA Experiment 20001911 PARAMETER Experiment Name: At_Drought_Reproduction_P Parameter: Plant Line Value: WS
  misc_feature: MA Experiment 20001911 PARAMETER Experiment Name: At_Drought_Reproduction_P Parameter: Timepoint (day) Value: 10
  misc_feature: MA Experiment 20001911 PARAMETER Experiment Name: At_Drought_Reproduction_P Parameter: Tissue Value: Flowers
  misc_feature: MA Experiment 20001911 PARAMETER Experiment Name: At_Drought_Reproduction_P Parameter: Treatment Value: Drought vs. No Drought
ccatattattcacgattctcatcaaatcatctccgatactcacaaccgaaataactaacccctcctcaacaaaaaacaacaaaacatgtacactccatcatacttaaaatattcaataatctcaattatatccgtattattcctccaaggaactcatggagacgacggaggttggcaaggtggtcacgccacgttttacggcggcgaagatgcttccggcaccatgggcggagcttgtggctatggaaatttgtatggccaaggttacgggacgaacacggcggctttaagtacggctctattcaacaacggactcacgtgtggcgcgtgctatgagatgaagtgtaacgatgacccgaggtggtgtctcgggtcaaccatcaccgtcacagctacaaacttttgcccacctaaccctggcctctccaacgataatggaggttggtgcaatcctcctcttcagcatttcgacctcgccgagccagcttttcttcagatcgctcagtatcgtgccggcattgttcctgtctctttccgaagagtaccatgtatgaagaaaggaggaataaggtttacgatcaacggacactcatacttcaacctcgttctgatctccaacgtaggaggagcaggagacgtacacgccgtctcaatcaaaggctcaaaaacacagtcgtggcaagcgatgtctagaaactggggacaaaactggcagagcaattcatacatgaacgaccaaagcctttccttccaggtaacgaccagcgatggtcgcacactcgttagcaacgacgtggctccttctaattggcagttcggacaaacctaccaaggtggtcagttctgatccaaaccatcatccacatctctctgttttgggtgctgacgtggctgcatattgctgaggtggctcgtaagcacccgcttaattagcttagcctttttttctcttatttacgaattattgcttcaatggttgtattttcattgtgcctacaaaaaagcaaggttttttt

SEQ ID NO: 20852 - protein, 253 aa, Arabidopsis thaliana
  peptide (1)..(253): Ceres Seq. ID no. 12329125
  misc_feature (161)..(239): Pfam Name: Pollen allergen Pfam Description: Pollen allergen
  misc_feature (161)..(239): Pfam Name: Pollen allergen Pfam Description: Pollen allergen
  misc_feature (4)..(253): Homolog of NCBI NO: 3510538 NR Description: expansin [Prunus armeniaca]
  misc_feature (5)..(253): Homolog of NCBI NO: 29467501 NR Description: expansin [Pyrus communis]
  misc_feature (14)..(253): Homolog of NCBI NO: 38046728 NR Description: alpha-expansin 2 [Populus tremula x Populus
  misc_feature (2)..(253): Homolog of NCBI NO: 29467499 NR Description: expansin [Pyrus communis]
  misc_feature (5)..(253): Homolog of NCBI NO: 11907554 NR Description: expansin [Prunus persica]
  misc_feature (4)..(253): Homolog of NCBI NO: 3510538 NR Description: expansin [Prunus armeniaca]
  misc_feature (14)..(253): Homolog of NCBI NO: 38046728 NR Description: alpha-expansin 2 [Populus tremula x Populus
  misc_feature (5)..(253): Homolog of NCBI NO: 11907554 NR Description: expansin [Prunus persica]
  misc_feature (1)..(253): Homolog of NCBI NO: 15226718 NR Description: expansin, putative
  misc_feature (1)..(253): Homolog of NCBI NO: 29421120 NR Description: expansin [Vitis labrusca x Vitis vinifera]
  misc_feature (10)..(253): Homolog of NCBI NO: 7025493 NR Description: expansin 2 [Zinnia elegans]
  misc_feature (1)..(253): Homolog of NCBI NO: 29421122 NR Description: expansin [Vitis labrusca x Vitis vinifera]
  misc_feature (5)..(253): Homolog of NCBI NO: 11932092 NR Description: expansin [Cicer arietinum]
  misc_feature (2)..(253): Homolog of NCBI NO: 29467499 NR Description: expansin [Pyrus communis]
  misc_feature (5)..(253): Homolog of NCBI NO: 29467501 NR Description: expansin [Pyrus communis]
  misc_feature (5)..(253): Homolog of NCBI NO: 11932092 NR Description: expansin [Cicer arietinum]
  misc_feature (1)..(253): Homolog of NCBI NO: 29421122 NR Description: expansin [Vitis labrusca x Vitis vinifera]
  misc_feature (10)..(253): Homolog of NCBI NO: 7025493 NR Description: expansin 2 [Zinnia elegans]
  misc_feature (1)..(253): Homolog of NCBI NO: 29421120 NR Description: expansin [Vitis labrusca x Vitis vinifera]
  misc_feature (1)..(253): Homolog of NCBI NO: 15226718 NR Description: expansin, putative
MYTPSYLKYSIISIISVLFLQGTHGDDGGWQGGHATFYGGEDASGTMGGACGYGNLYGQGYGTNTAALSTALFNNGLTCGACYEMKCNDDPRWCLGSTITVTATNFCPPNPGLSNDNGGWCNPPLQHFDLAEPAFLQIAQYRAGIVPVSFRRVPCMKKGGIRFTINGHSYFNLVLISNVGGAGDVHAVSIKGSKTQSWQAMSRNWGQNWQSNSYMNDQSLSFQVTTSDGRTLVSNDVAPSNWQFGQTYQGGQF

SEQ ID NO: 20853 - protein, 207 aa, Arabidopsis thaliana
  peptide (1)..(207): Ceres Seq. ID no. 12329126
  misc_feature (115)..(193): Pfam Name: Pollen allergen Pfam Description: Pollen allergen
  misc_feature (115)..(193): Pfam Name: Pollen allergen Pfam Description: Pollen allergen
  misc_feature (1)..(207): Homolog of NCBI NO: 3510538 NR Description: expansin [Prunus armeniaca]
  misc_feature (1)..(207): Homolog of NCBI NO: 29467501 NR Description: expansin [Pyrus communis]
  misc_feature (1)..(207): Homolog of NCBI NO: 38046728 NR Description: alpha-expansin 2 [Populus tremula x Populus
  misc_feature (1)..(207): Homolog of NCBI NO: 29467499 NR Description: expansin [Pyrus communis]
  misc_feature (1)..(207): Homolog of NCBI NO: 11907554 NR Description: expansin [Prunus persica]
  misc_feature (1)..(207): Homolog of NCBI NO: 3510538 NR Description: expansin [Prunus armeniaca]
  misc_feature (1)..(207): Homolog of NCBI NO: 38046728 NR Description: alpha-expansin 2 [Populus tremula x Populus
  misc_feature (1)..(207): Homolog of NCBI NO: 11907554 NR Description: expansin [Prunus persica]
  misc_feature (1)..(207): Homolog of NCBI NO: 15226718 NR Description: expansin, putative
  misc_feature (1)..(207): Homolog of NCBI NO: 29421120 NR Description: expansin [Vitis labrusca x Vitis vinifera]
  misc_feature (1)..(207): Homolog of NCBI NO: 7025493 NR Description: expansin 2 [Zinnia elegans]
  misc_feature (1)..(207): Homolog of NCBI NO: 29421122 NR Description: expansin [Vitis labrusca x Vitis vinifera]
  misc_feature (1)..(207): Homolog of NCBI NO: 11932092 NR Description: expansin [Cicer arietinum]
  misc_feature (1)..(207): Homolog of NCBI NO: 29467499 NR Description: expansin [Pyrus communis]
  misc_feature (1)..(207): Homolog of NCBI NO: 29467501 NR Description: expansin [Pyrus communis]
  misc_feature (1)..(207): Homolog of NCBI NO: 11932092 NR Description: expansin [Cicer arietinum]
  misc_feature (1)..(207): Homolog of NCBI NO: 29421122 NR Description: expansin [Vitis labrusca x Vitis vinifera]
  misc_feature (1)..(207): Homolog of NCBI NO: 7025493 NR Description: expansin 2 [Zinnia elegans]
  misc_feature (1)..(207): Homolog of NCBI NO: 29421120 NR Description: expansin [Vitis labrusca x Vitis vinifera]
  misc_feature (1)..(207): Homolog of NCBI NO: 15226718 NR Description: expansin, putative
MGGACGYGNLYGQGYGTNTAALSTALFNNGLTCGACYEMKCNDDPRWCLGSTITVTATNFCPPNPGLSNDNGGWCNPPLQHFDLAEPAFLQIAQYRAGIVPVSFRRVPCMKKGGIRFTINGHSYFNLVLISNVGGAGDVHAVSIKGSKTQSWQAMSRNWGQNWQSNSYMNDQSLSFQVTTSDGRTLVSNDVAPSNWQFGQTYQGGQF

SEQ ID NO: 20854 - protein, 169 aa, Arabidopsis thaliana
  peptide (1)..(169): Ceres Seq. ID no. 12329127
  misc_feature (77)..(155): Pfam Name: Pollen allergen Pfam Description: Pollen allergen
  misc_feature (77)..(155): Pfam Name: Pollen allergen Pfam Description: Pollen allergen
  misc_feature (1)..(169): Homolog of NCBI NO: 3510538 NR Description: expansin [Prunus armeniaca]
  misc_feature (1)..(169): Homolog of NCBI NO: 29467501 NR Description: expansin [Pyrus communis]
  misc_feature (1)..(169): Homolog of NCBI NO: 38046728 NR Description: alpha-expansin 2 [Populus tremula x Populus
  misc_feature (1)..(169): Homolog of NCBI NO: 29467499 NR Description: expansin [Pyrus communis]
  misc_feature (1)..(169): Homolog of NCBI NO: 11907554 NR Description: expansin [Prunus persica]
  misc_feature (1)..(169): Homolog of NCBI NO: 3510538 NR Description: expansin [Prunus armeniaca]
  misc_feature (1)..(169): Homolog of NCBI NO: 38046728 NR Description: alpha-expansin 2 [Populus tremula x Populus
  misc_feature (1)..(169): Homolog of NCBI NO: 11907554 NR Description: expansin [Prunus persica]
  misc_feature (1)..(169): Homolog of NCBI NO: 15226718 NR Description: expansin, putative
  misc_feature (1)..(169): Homolog of NCBI NO: 29421120 NR Description: expansin [Vitis labrusca x Vitis vinifera]
  misc_feature (1)..(169): Homolog of NCBI NO: 7025493 NR Description: expansin 2 [Zinnia elegans]
  misc_feature (1)..(169): Homolog of NCBI NO: 29421122 NR Description: expansin [Vitis labrusca x Vitis vinifera]
  misc_feature (1)..(169): Homolog of NCBI NO: 11932092 NR Description: expansin [Cicer arietinum]
  misc_feature (1)..(169): Homolog of NCBI NO: 29467499 NR Description: expansin [Pyrus communis]
  misc_feature (1)..(169): Homolog of NCBI NO: 29467501 NR Description: expansin [Pyrus communis]
  misc_feature (1)..(169): Homolog of NCBI NO: 11932092 NR Description: expansin [Cicer arietinum]
  misc_feature (1)..(169): Homolog of NCBI NO: 29421122 NR Description: expansin [Vitis labrusca x Vitis vinifera]
  misc_feature (1)..(169): Homolog of NCBI NO: 7025493 NR Description: expansin 2 [Zinnia elegans]
  misc_feature (1)..(169): Homolog of NCBI NO: 29421120 NR Description: expansin [Vitis labrusca x Vitis vinifera]
  misc_feature (1)..(169): Homolog of NCBI NO: 15226718 NR Description: expansin, putative
MKCNDDPRWCLGSTITVTATNFCPPNPGLSNDNGGWCNPPLQHFDLAEPAFLQIAQYRAGIVPVSFRRVPCMKKGGIRFTINGHSYFNLVLISNVGGAGDVHAVSIKGSKTQSWQAMSRNWGQNWQSNSYMNDQSLSFQVTTSDGRTLVSNDVAPSNWQFGQTYQGGQF

SEQ ID NO: 20855 - DNA, 665 bp, Arabidopsis thaliana
  misc_feature (1)..(665): Ceres Seq. ID no. 12329987
  misc_feature: MA Experiment ID: 108435 Result: Down-regulated in Transcription
  misc_feature: MA Experiment 108435 PARAMETER Experiment Name: At_stm_Mutants_cDNA_P Parameter: Plant Line Value: wt Landsburg vs stm
  misc_feature: MA Experiment 108435 PARAMETER Experiment Name: At_stm_Mutants_cDNA_P Parameter: Tissue Value: Shoot Apical Meristem Region
  misc_feature: MA Experiment ID: 108577 Result: Down-regulated in Transcription
  misc_feature: MA Experiment 108577 PARAMETER Experiment Name: At_42deg_Heat_cDNA_P Parameter: Temperature (deg C) Value: 42 vs. 22
  misc_feature: MA Experiment 108577 PARAMETER Experiment Name: At_42deg_Heat_cDNA_P Parameter: Timepoint (hr) Value: 6
  misc_feature: MA Experiment 108577 PARAMETER Experiment Name: At_42deg_Heat_cDNA_P Parameter: Tissue Value: Aerial
  misc_feature: MA Experiment ID: 20000090 Result: Up-regulated in Transcription
  misc_feature: MA Experiment ID: 20000179 Result: Up-regulated in Transcription
  misc_feature: MA Experiment 20000179 PARAMETER Experiment Name: At_Germinating_Seeds_P Parameter: Age (hr) Value: 6 vs. 0
  misc_feature: MA Experiment 20000179 PARAMETER Experiment Name: At_Germinating_Seeds_P Parameter: Tissue Value: Germinating Seeds
  misc_feature: MA Experiment ID: 20000180 Result: Up-regulated in Transcription
  misc_feature: MA Experiment 20000180 PARAMETER Experiment Name: At_Germinating_Seeds_P Parameter: Age (hr) Value: 24 vs. 0
  misc_feature: MA Experiment 20000180 PARAMETER Experiment Name: At_Germinating_Seeds_P Parameter: Tissue Value: Germinating Seeds
ttttggaatctgaagtgaatcgtcgaaaaaatttatcagtttcgagattcggagatctgcaagggagaagatgatcgtttgcgtcgccgtcgtcggccaccagaacaatccgctttacatacaaagcttcacggatgttgacgatgctctcaagctccaccacattgttcattgctcccttgatgtcatcgaagagcgagtgaacaatccgaaaaagtctggtacaacactgaacgaggcttttcttggcttgctctatcctactgtgaactacaaagtgtatggttacttgactaataccaaggttaaatttatattggtcactactgatttggatgttagagacaccgatgtgagaagtttcttcaggaagttccatgctgcttacgttgatgcagtctcaaacccctttcatgtccctggcaaaaagataacctcgagaacctttgcgcaaactgtaagcaacatcgttggatcgtacggtttgaactgaccttctcttataagttgctttttgtacctcaaacttgtgttttacggagcattgagcaagtctcatttctttatcatcatatgttgttaatatcaactctgaaattgctgtaaggtgacttgttgcttcacatgttacctttttactcgactagttcctctcaatttgaccc

SEQ ID NO: 20856 - protein, 140 aa, Arabidopsis thaliana
  peptide (1)..(140): Ceres Seq. ID no. 12329988
  misc_feature (1)..(134): Homolog of NCBI NO: 27659496 NR Description: similar to hypothetical protein, 2-6
  misc_feature (1)..(134): Homolog of NCBI NO: 6841572 NR Description: HSPC176 [Homo sapiens]
  misc_feature (1)..(116): Homolog of NCBI NO: 25338945 NR Description: hypothetical protein At2g20930 [imported] -
  misc_feature (1)..(140): Homolog of NCBI NO: 18399520 NR Description: expressed protein
  misc_feature (1)..(140): Homolog of NCBI NO: 21555278 NR Description: unknown [Arabidopsis thaliana]
  misc_feature (13)..(133): Homolog of NCBI NO: 39582671 NR Description: Hypothetical protein CBG21319 [Caenorhabditis
  misc_feature (1)..(134): Homolog of NCBI NO: 24652658 NR Description: CG9067-PA [Drosophila melanogaster]
  misc_feature (1)..(134): Homolog of NCBI NO: 7706429 NR Description: unknown [Homo sapiens]
  misc_feature (3)..(134): Homolog of NCBI NO: 34851319 NR Description: similar to hypothetical protein, 2-6 [Rattus
  misc_feature (1)..(134): Homolog of NCBI NO: 10946914 NR Description: hypothetical protein, 2-6 [Mus musculus]
MIVCVAVVGHQNNPLYIQSFTDVDDALKLHHIVHCSLDVIEERVNNPKKSGTTLNEAFLGLLYPTVNYKVYGYLTNTKVKFILVTTDLDVRDTDVRSFFRKFHAAYVDAVSNPFHVPGKKITSRTFAQTVSNIVGSYGLN

SEQ ID NO: 20857 - DNA, 2269 bp, Arabidopsis thaliana
  misc_feature (1)..(2269): Ceres Seq. ID no. 13491872
  misc_feature: MA Experiment ID: 20000112 Result: Down-regulated in Transcription
  misc_feature: MA Experiment 20000112 PARAMETER Experiment Name: At_42deg_Heat_cDNA_P Parameter: Temperature (deg C) Value: 42 vs. 22
  misc_feature: MA Experiment 20000112 PARAMETER Experiment Name: At_42deg_Heat_cDNA_P Parameter: Timepoint (hr) Value: 2
  misc_feature: MA Experiment 20000112 PARAMETER Experiment Name: At_42deg_Heat_cDNA_P Parameter: Tissue Value: Aerial
  misc_feature: MA Experiment ID: 20000113 Result: Down-regulated in Transcription
  misc_feature: MA Experiment 20000113 PARAMETER Experiment Name: At_42deg_Heat_cDNA_P Parameter: Temperature (deg C) Value: 42 vs. 22
  misc_feature: MA Experiment 20000113 PARAMETER Experiment Name: At_42deg_Heat_cDNA_P Parameter: Timepoint (hr) Value: 8
  misc_feature: MA Experiment 20000113 PARAMETER Experiment Name: At_42deg_Heat_cDNA_P Parameter: Tissue Value: Aerial
  misc_feature: MA Experiment ID: 20000144 Result: Down-regulated in Transcription
  misc_feature: MA Experiment 20000144 PARAMETER Experiment Name: At_42deg_Heat_cDNA_P Parameter: Temperature (deg C) Value: 42 vs. 22
  misc_feature: MA Experiment 20000144 PARAMETER Experiment Name: At_42deg_Heat_cDNA_P Parameter: Timepoint (hr) Value: 1
  misc_feature: MA Experiment 20000144 PARAMETER Experiment Name: At_42deg_Heat_cDNA_P Parameter: Tissue Value: Aerial
  misc_feature: MA Experiment ID: 20000173 Result: Down-regulated in Transcription
  misc_feature: MA Experiment 20000173 PARAMETER Experiment Name: At_42deg_Heat_P Parameter: Age (day) Value: 14
  misc_feature: MA Experiment 20000173 PARAMETER Experiment Name: At_42deg_Heat_P Parameter: Organism Value: A. thaliana
  misc_feature: MA Experiment 20000173 PARAMETER Experiment Name: At_42deg_Heat_P Parameter: Plant Line Value: WS
  misc_feature: MA Experiment 20000173 PARAMETER Experiment Name: At_42deg_Heat_P Parameter: Temperature (deg C) Value: 42 vs. 22
  misc_feature: MA Experiment 20000173 PARAMETER Experiment Name: At_42deg_Heat_P Parameter: Timepoint (hr) Value: 6
  misc_feature: MA Experiment 20000173 PARAMETER Experiment Name: At_42deg_Heat_P Parameter: Tissue Value: Aerial
  misc_feature: MA Experiment ID: 20000794 Result: Up-regulated in Transcription
  misc_feature: MA Experiment 20000794 PARAMETER Experiment Name: At_Petals_P Parameter: Age (day) Value: 23-25 days
  misc_feature: MA Experiment 20000794 PARAMETER Experiment Name: At_Petals_P Parameter: Plant Line Value: WS
  misc_feature: MA Experiment 20000794 PARAMETER Experiment Name: At_Petals_P Parameter: Tissue Value: Petals vs. Whole plant
atgtggaagtttaaaccttttgctcaaaaagaacctgcgggtctcgaaggtcgatttctcgagataggaaatctgaaagttcaagttagaaatgtcattgcggaaggaggtttctccagtgtttacttagctcaagatgtaaatcacgcgtcaaagcaatatgctttgaagcacatgatatgcaatgacgaggagtcacttgaactcgtaatgaaagagatctcggttctgaaatccctcaagggacatccaaatgttgtcacgctctacgcacatggtatcttggatatggggaggaataaaaaagaagctcttttggctatggatttttgtggtaaatctcttgtggatgtgcttgagaatagaggtgctggttactttgaagagaaacaagctcttacgatttttagagatgtgtgtaatgctgtctttgcaatgcattgtcaatccccacgcattgctcacagagacttgaaggctgagaatcttctattgagctcagatggacaatggaaattgtgtgattttggaagcgtttcgacaaatcacaagatttttgaaagagcagaagagatgggaattgaagaagataatattagaaaatacacaacaccaacatatagagctcctgagatgtgggatctctttcgaagggagatgataagcgagaaggtcgatatatgggctcttggatgtctcttgtttcggatatgctatttcaagaatgcatttgatggagaatcaaagctgcaaatcttaaacgggaattatcgtattccagaatcgcctaaatacagtgtatttattacggatctcatcaaagaaatgctccaagcttcacccgatgaacgaccagatattacacagatttggtttcgtgtcaatgagcagcttcctgctaatttacagaaatcattaccggatcgaccacctgaaatgcaatctactggagtccatgatggctcatcaaaatcagcaactaaaccttctccagcacctcgtagaagtccgccaccgccgccaccatcttctggagaatcagatagtggaggaccgctcggtgccttttgggcgactcagcatgctaaaacctcagttgtatcagaagataacaaaaacatgcctaaatttgatgaaccaaacagtaacacatctaaatctgaaagagttcgtgtggatagtcatcaacccaaaaaaccaagtcctgtgagaggagaggctcgtggtattcaaagaaataaagatcttgaaactacgatttctcagaagaatacaactcctgctgcagccaataacatgacaagagtgtccaaggatgatgccttcaactcgtttgttgctgactttgataccacaaagttcgataatggtaataaacctggcaaagaagaggcattggaagctgagatacagaggttaaaagacgagttgaagcaaacaaaatcagagaaggcagaaataactgctaagtttgaaaagctttctgctatctgcagatcgcaaaggcaagagttgcaggatctcaaacaaacacttgcctctaaaagtgcctcaccgtcaccgagcagagactcttcacaaaatcaaccctctccagggatgcattccatgtcatcaactccatcgagagataagatggaaggaacaatgtgggaacttcaacaggacagatctaactggtcaactggcagctctgatacaaattcatggcaaccttttagtgatgaagcgaaacccgtgatggaatctgcatcaaagggtaacaataatacgattaatcagtctgtgagaaccagaagtaaaccagcttctgctgcaggtactcaaggttttgagccatggggtttcgagacagaatcctttagagccgctgcaacgtctgcagctgctacttctgcatctggaacacaaagatctatgggctctggaaacagcacttcacagagatatgggaactcaaagatgagagaaaaccagaaaacagctcaacctgctggatgggccggcttctaaaactcactcagatgcgcattgctatttcttcctcatgcaacaacaacagcttcatgttgctgccattacagaatcttgaatctttttgtagatgatgatcatcccctgtttttgtgctgctgctaaatataccccacccatatccattatgttttatgtagagtcttaaactttacacattctctgagctgtggccagatatctcagcttatggattattattggaaaaataaataattcaagattcagacagctt

SEQ ID NO: 20858 - protein, 670 aa, Arabidopsis thaliana
  peptide (1)..(670): Ceres Seq. ID no. 13491873
  misc_feature (18)..(312): Homolog of NCBI NO: 23271902 NR Description: Similar to Bmp2-inducible kinase [Homo sapiens]
  misc_feature (18)..(328): Homolog of NCBI NO: 26338337 NR Description: unnamed protein product [Mus musculus]
  misc_feature (8)..(354): Homolog of NCBI NO: 21428728 NR Description: SD07306p [Drosophila melanogaster]
  misc_feature (8)..(448): Homolog of NCBI NO: 13591947 NR Description: cyclin G-associated kinase [Rattus norvegicus]
  misc_feature (10)..(448): Homolog of NCBI NO: 17375734 NR Description: Cyclin G-associated kinase
  misc_feature (10)..(448): Homolog of NCBI NO: 4885251 NR Description: cyclin G associated kinase [Homo sapiens]
  misc_feature (13)..(340): Homolog of NCBI NO: 40789031 NR Description: KIAA1048 protein [Homo sapiens]
  misc_feature (13)..(340): Homolog of NCBI NO: 29570780 NR Description: adaptor-associated kinase 1 [Homo sapiens]
  misc_feature (13)..(340): Homolog of NCBI NO: 12803719 NR Description: Similar to KIAA1048 protein [Homo sapiens]
  misc_feature (14)..(296): Homolog of NCBI NO: 28829923 NR Description: similar to Homo sapiens (Human). Hypothetical
MWKFKPFAQKEPAGLEGRFLEIGNLKVQVRNVIAEGGFSSVYLAQDVNHASKQYALKHMICNDEESLELVMKEISVLKSLKGHPNVVTLYAHGILDMGRNKKEALLAMDFCGKSLVDVLENRGAGYFEEKQALTIFRDVCNAVFAMHCQSPRIAHRDLKAENLLLSSDGQWKLCDFGSVSTNHKIFERAEEMGIEEDNIRKYTTPTYRAPEMWDLFRREMISEKVDIWALGCLLFRICYFKNAFDGESKLQILNGNYRIPESPKYSVFITDLIKEMLQASPDERPDITQIWFRVNEQLPANLQKSLPDRPPEMQSTGVHDGSSKSATKPSPAPRRSPPPPPPSSGESDSGGPLGAFWATQHAKTSVVSEDNKNMPKFDEPNSNTSKSERVRVDSHQPKKPSPVRGEARGIQRNKDLETTISQKNTTPAAANNMTRVSKDDAFNSFVADFDTTKFDNGNKPGKEEALEAEIQRLKDELKQTKSEKAEITAKFEKLSAICRSQRQELQDLKQTLASKSASPSPSRDSSQNQPSPGMHSMSSTPSRDKMEGTMWELQQDRSNWSTGSSDTNSWQPFSDEAKPVMESASKGNNNTINQSVRTRSKPASAAGTQGFEPWGFETESFRAAATSAAATSASGTQRSMGSGNSTSQRYGNSKMRENQKTAQPAGWAGF

SEQ ID NO: 20859 - protein, 612 aa, Arabidopsis thaliana
  peptide (1)..(612): Ceres Seq. ID no. 13491874
  misc_feature (1)..(254): Homolog of NCBI NO: 23271902 NR Description: Similar to Bmp2-inducible kinase [Homo sapiens]
  misc_feature (1)..(270): Homolog of NCBI NO: 26338337 NR Description: unnamed protein product [Mus musculus]
  misc_feature (1)..(296): Homolog of NCBI NO: 21428728 NR Description: SD07306p [Drosophila melanogaster]
  misc_feature (1)..(390): Homolog of NCBI NO: 13591947 NR Description: cyclin G-associated kinase [Rattus norvegicus]
  misc_feature (1)..(390): Homolog of NCBI NO: 17375734 NR Description: Cyclin G-associated kinase
  misc_feature (1)..(390): Homolog of NCBI NO: 4885251 NR Description: cyclin G associated kinase [Homo sapiens]
  misc_feature (1)..(282): Homolog of NCBI NO: 40789031 NR Description: KIAA1048 protein [Homo sapiens]
  misc_feature (1)..(282): Homolog of NCBI NO: 29570780 NR Description: adaptor-associated kinase 1 [Homo sapiens]
  misc_feature (1)..(282): Homolog of NCBI NO: 12803719 NR Description: Similar to KIAA1048 protein [Homo sapiens]
  misc_feature (1)..(238): Homolog of NCBI NO: 28829923 NR Description: similar to Homo sapiens (Human). Hypothetical
MICNDEESLELVMKEISVLKSLKGHPNVVTLYAHGILDMGRNKKEALLAMDFCGKSLVDVLENRGAGYFEEKQALTIFRDVCNAVFAMHCQSPRIAHRDLKAENLLLSSDGQWKLCDFGSVSTNHKIFERAEEMGIEEDNIRKYTTPTYRAPEMWDLFRREMISEKVDIWALGCLLFRICYFKNAFDGESKLQILNGNYRIPESPKYSVFITDLIKEMLQASPDERPDITQIWFRVNEQLPANLQKSLPDRPPEMQSTGVHDGSSKSATKPSPAPRRSPPPPPPSSGESDSGGPLGAFWATQHAKTSVVSEDNKNMPKFDEPNSNTSKSERVRVDSHQPKKPSPVRGEARGIQRNKDLETTISQKNTTPAAANNMTRVSKDDAFNSFVADFDTTKFDNGNKPGKEEALEAEIQRLKDELKQTKSEKAEITAKFEKLSAICRSQRQELQDLKQTLASKSASPSPSRDSSQNQPSPGMHSMSSTPSRDKMEGTMWELQQDRSNWSTGSSDTNSWQPFSDEAKPVMESASKGNNNTINQSVRTRSKPASAAGTQGFEPWGFETESFRAAATSAAATSASGTQRSMGSGNSTSQRYGNSKMRENQKTAQPAGWAGF

SEQ ID NO: 20860 - protein, 600 aa, Arabidopsis thaliana
  peptide (1)..(600): Ceres Seq. ID no. 13491875
  misc_feature (1)..(242): Homolog of NCBI NO: 23271902 NR Description: Similar to Bmp2-inducible kinase [Homo sapiens]
  misc_feature (1)..(258): Homolog of NCBI NO: 26338337 NR Description: unnamed protein product [Mus musculus]
  misc_feature (1)..(284): Homolog of NCBI NO: 21428728 NR Description: SD07306p [Drosophila melanogaster]
  misc_feature (1)..(378): Homolog of NCBI NO: 13591947 NR Description: cyclin G-associated kinase [Rattus norvegicus]
  misc_feature (1)..(378): Homolog of NCBI NO: 17375734 NR Description: Cyclin G-associated kinase
  misc_feature (1)..(378): Homolog of NCBI NO: 4885251 NR Description: cyclin G associated kinase [Homo sapiens]
  misc_feature (1)..(270): Homolog of NCBI NO: 40789031 NR Description: KIAA1048 protein [Homo sapiens]
  misc_feature (1)..(270): Homolog of NCBI NO: 29570780 NR Description: adaptor-associated kinase 1 [Homo sapiens]
  misc_feature (1)..(270): Homolog of NCBI NO: 12803719 NR Description: Similar to KIAA1048 protein [Homo sapiens]
  misc_feature (1)..(226): Homolog of NCBI NO: 28829923 NR Description: similar to Homo sapiens (Human). Hypothetical
MKEISVLKSLKGHPNVVTLYAHGILDMGRNKKEALLAMDFCGKSLVDVLENRGAGYFEEKQALTIFRDVCNAVFAMHCQSPRIAHRDLKAENLLLSSDGQWKLCDFGSVSTNHKIFERAEEMGIEEDNIRKYTTPTYRAPEMWDLFRREMISEKVDIWALGCLLFRICYFKNAFDGESKLQILNGNYRIPESPKYSVFITDLIKEMLQASPDERPDITQIWFRVNEQLPANLQKSLPDRPPEMQSTGVHDGSSKSATKPSPAPRRSPPPPPPSSGESDSGGPLGAFWATQHAKTSVVSEDNKNMPKFDEPNSNTSKSERVRVDSHQPKKPSPVRGEARGIQRNKDLETTISQKNTTPAAANNMTRVSKDDAFNSFVADFDTTKFDNGNKPGKEEALEAEIQRLKDELKQTKSEKAEITAKFEKLSAICRSQRQELQDLKQTLASKSASPSPSRDSSQNQPSPGMHSMSSTPSRDKMEGTMWELQQDRSNWSTGSSDTNSWQPFSDEAKPVMESASKGNNNTINQSVRTRSKPASAAGTQGFEPWGFETESFRAAATSAAATSASGTQRSMGSGNSTSQRYGNSKMRENQKTAQPAGWAGF

SEQ ID NO: 20861 - DNA, 924 bp, Arabidopsis thaliana
  misc_feature (1)..(924): Ceres Seq. ID no. 12327509
  misc_feature: MA Experiment ID: 108434 Result: Up-regulated in Transcription
  misc_feature: MA Experiment 108434 PARAMETER Experiment Name: At_Root_Tips_cDNA_P Parameter: Tissue Value: Root Tips
  misc_feature: MA Experiment ID: 108595 Result: Down-regulated in Transcription
  misc_feature: MA Experiment 108595 PARAMETER Experiment Name: At_Ler-pi_Ovule_cDNA_P Parameter: Plant Line Value: null
  misc_feature: MA Experiment ID: 20000112 Result: Up-regulated in Transcription
  misc_feature: MA Experiment 20000112 PARAMETER Experiment Name: At_42deg_Heat_cDNA_P Parameter: Temperature (deg C) Value: 42 vs. 22
  misc_feature: MA Experiment 20000112 PARAMETER Experiment Name: At_42deg_Heat_cDNA_P Parameter: Timepoint (hr) Value: 2
  misc_feature: MA Experiment 20000112 PARAMETER Experiment Name: At_42deg_Heat_cDNA_P Parameter: Tissue Value: Aerial
  misc_feature: MA Experiment ID: 20000180 Result: Up-regulated in Transcription
  misc_feature: MA Experiment 20000180 PARAMETER Experiment Name: At_Germinating_Seeds_P Parameter: Age (hr) Value: 24 vs. 0
  misc_feature: MA Experiment 20000180 PARAMETER Experiment Name: At_Germinating_Seeds_P Parameter: Tissue Value: Germinating Seeds
  misc_feature: MA Experiment ID: 20000185 Result: Down-regulated in Transcription
  misc_feature: MA Experiment 20000185 PARAMETER Experiment Name: At_Roots__P Parameter: Age (day) Value: 7 vs. 21
  misc_feature: MA Experiment 20000185 PARAMETER Experiment Name: At_Roots__P Parameter: Organism Value: A. thaliana
  misc_feature: MA Experiment 20000185 PARAMETER Experiment Name: At_Roots__P Parameter: Tissue Value: Roots vs. Whole Plant
gtcttcgcaaaagaaaattccgaaattgtttcgaaaaatcctgaagaagaagaggtctttgaatcaacaacagttccatgttgtgcccaacgtatacaccaagtgtttaccattttcaaacgcaaaagccagttttccggaaacagaggtttcgggtttgttcatctacttctggtggtgagaatgatagattcaaagtagagtacactccttggcttatcgttgggttgggcaatccaggaaacaagtatcatggaacaagacacaatgttggtttcgagatgatcgatgtgttggctagaaaagaaggggtgttgatgaacactatacagtccaaagctctaatcggaataggtgctattgaagatgtacctatcttgttggctaaacctcagacttatatgaacttcagcggcgaatcggttggatctctagcttcacactatcgagtaccattgcgccacattttaatgatttacgatgagatggctttaccaaatggggttttgagacttcaaccgaaaggaggtcaaggctatcacaacggagtgaagagtgtaatggggcatttggatggtcgtcgaaactttcctcgtttaagcataggcattggtaaaccacctggaaacatggatatgaaagcttttcttcttcagaagtttagtccattggaacagaaacagatcgaggaagcactcgagcaaggaagtgaagcagtgaagactcttgtgcttaatggcttcaatcaaggaatttcgagatttaatcttgtgcagaaatataaattccataaagtatagactccgatttgcaacaaaagcaatcatgtagagattggtttagcactatcattttatcgtctcaagagacactctttcgttacgaagtgtatgaagtttcttagattaatataattcagtctcg

SEQ ID NO: 20862 - protein, 240 aa, Arabidopsis thaliana
  peptide (1)..(240): Ceres Seq. ID no. 12327510
  misc_feature (45)..(230): Homolog of NCBI NO: 26453108 NR Description: unknown protein [Arabidopsis thaliana]
  misc_feature (45)..(230): Homolog of NCBI NO: 30685853 NR Description: expressed protein [Arabidopsis thaliana]
  misc_feature (43)..(239): Homolog of NCBI NO: 30687503 NR Description: expressed protein [Arabidopsis thaliana]
  misc_feature (41)..(238): Homolog of NCBI NO: 40889732 NR Description: Chain A, Structure Of The Chloroplast Group Ii
  misc_feature (41)..(240): Homolog of NCBI NO: 40889731 NR Description: Chain A, Structure Of The Group Ii Intron
  misc_feature (41)..(240): Homolog of NCBI NO: 40889730 NR Description: Chain A, Crystal Structure Of The Chloroplast
  misc_feature (41)..(240): Homolog of NCBI NO: 6752919 NR Description: CRS2 [Zea mays]
  misc_feature (1)..(240): Homolog of NCBI NO: 26451849 NR Description: putative CRS2 [Arabidopsis thaliana]
  misc_feature (1)..(240): Homolog of NCBI NO: 15240875 NR Description: CRS2 -like protein; protein id: At5g38290.1
  misc_feature (1)..(240): Homolog of NCBI NO: 15237280 NR Description: CRS2-like protein; protein id: At5g16140.1
MLCPTYTPSVYHFQTQKPVFRKQRFRVCSSTSGGENDRFKVEYTPWLIVGLGNPGNKYHGTRHNVGFEMIDVLARKEGVLMNTIQSKALIGIGAIEDVPILLAKPQTYMNFSGESVGSLASHYRVPLRHILMIYDEMALPNGVLRLQPKGGQGYHNGVKSVMGHLDGRRNFPRLSIGIGKPPGNMDMKAFLLQKFSPLEQKQIEEALEQGSEAVKTLVLNGFNQGISRFNLVQKYKFHKV

SEQ ID NO: 20863 - protein, 172 aa, Arabidopsis thaliana
  peptide (1)..(172): Ceres Seq. ID no. 12327511
  misc_feature (1)..(162): Homolog of NCBI NO: 26453108 NR Description: unknown protein [Arabidopsis thaliana]
  misc_feature (1)..(162): Homolog of NCBI NO: 30685853 NR Description: expressed protein [Arabidopsis thaliana]
  misc_feature (1)..(171): Homolog of NCBI NO: 30687503 NR Description: expressed protein [Arabidopsis thaliana]
  misc_feature (1)..(170): Homolog of NCBI NO: 40889732 NR Description: Chain A, Structure Of The Chloroplast Group Ii
  misc_feature (1)..(172): Homolog of NCBI NO: 40889731 NR Description: Chain A, Structure Of The Group Ii Intron
  misc_feature (1)..(172): Homolog of NCBI NO: 40889730 NR Description: Chain A, Crystal Structure Of The Chloroplast
  misc_feature (1)..(172): Homolog of NCBI NO: 6752919 NR Description: CRS2 [Zea mays]
  misc_feature (1)..(172): Homolog of NCBI NO: 26451849 NR Description: putative CRS2 [Arabidopsis thaliana]
  misc_feature (1)..(172): Homolog of NCBI NO: 15240875 NR Description: CRS2 -like protein; protein id: At5g38290.1
  misc_feature (1)..(172): Homolog of NCBI NO: 15237280 NR Description: CRS2-like protein; protein id: At5g16140.1
MIDVLARKEGVLMNTIQSKALIGIGAIEDVPILLAKPQTYMNFSGESVGSLASHYRVPLRHILMIYDEMALPNGVLRLQPKGGQGYHNGVKSVMGHLDGRRNFPRLSIGIGKPPGNMDMKAFLLQKFSPLEQKQIEEALEQGSEAVKTLVLNGFNQGISRFNLVQKYKFHKV

SEQ ID NO: 20864 - protein, 160 aa, Arabidopsis thaliana
  peptide (1)..(160): Ceres Seq. ID no. 12327512
  misc_feature (1)..(150): Homolog of NCBI NO: 26453108 NR Description: unknown protein [Arabidopsis thaliana]
  misc_feature (1)..(150): Homolog of NCBI NO: 30685853 NR Description: expressed protein [Arabidopsis thaliana]
  misc_feature (1)..(159): Homolog of NCBI NO: 30687503 NR Description: expressed protein [Arabidopsis thaliana]
  misc_feature (1)..(158): Homolog of NCBI NO: 40889732 NR Description: Chain A, Structure Of The Chloroplast Group Ii
  misc_feature (1)..(160): Homolog of NCBI NO: 40889731 NR Description: Chain A, Structure Of The Group Ii Intron
  misc_feature (1)..(160): Homolog of NCBI NO: 40889730 NR Description: Chain A, Crystal Structure Of The Chloroplast
  misc_feature (1)..(160): Homolog of NCBI NO: 6752919 NR Description: CRS2 [Zea mays]
  misc_feature (1)..(160): Homolog of NCBI NO: 26451849 NR Description: putative CRS2 [Arabidopsis thaliana]
  misc_feature (1)..(160): Homolog of NCBI NO: 15240875 NR Description: CRS2 -like protein; protein id: At5g38290.1
  misc_feature (1)..(160): Homolog of NCBI NO: 15237280 NR Description: CRS2-like protein; protein id: At5g16140.1
MNTIQSKALIGIGAIEDVPILLAKPQTYMNFSGESVGSLASHYRVPLRHILMIYDEMALPNGVLRLQPKGGQGYHNGVKSVMGHLDGRRNFPRLSIGIGKPPGNMDMKAFLLQKFSPLEQKQIEEALEQGSEAVKTLVLNGFNQGISRFNLVQKYKFHKV

SEQ ID NO: 20865 - DNA, 751 bp, Arabidopsis thaliana
  misc_feature (1)..(751): Ceres Seq. ID no. 12562691
  misc_feature: MA Experiment ID: 108501 Result: Up-regulated in Transcription
  misc_feature: MA Experiment 108501 PARAMETER Experiment Name: At_ap2_floral_buds_cDNA_P Parameter: Plant Line Value: ap2 (Ler.)
  misc_feature: MA Experiment 108501 PARAMETER Experiment Name: At_ap2_floral_buds_cDNA_P Parameter: Tissue Value: Closed Flower
  misc_feature: MA Experiment ID: 20000234 Result: Up-regulated in Transcription
  misc_feature: MA Experiment 20000234 PARAMETER Experiment Name: At_Siliques_P Parameter: Age (day) Value: 21
  misc_feature: MA Experiment 20000234 PARAMETER Experiment Name: At_Siliques_P Parameter: Organism Value: A. thaliana
  misc_feature: MA Experiment 20000234 PARAMETER Experiment Name: At_Siliques_P Parameter: Plant Line Value: WS
  misc_feature: MA Experiment 20000234 PARAMETER Experiment Name: At_Siliques_P Parameter: Tissue Value: Less Than 5mm Siliques vs. Whole Plant
  misc_feature: MA Experiment ID: 20000235 Result: Up-regulated in Transcription
  misc_feature: MA Experiment 20000235 PARAMETER Experiment Name: At_Siliques_P Parameter: Age (day) Value: 21
  misc_feature: MA Experiment 20000235 PARAMETER Experiment Name: At_Siliques_P Parameter: Organism Value: A. thaliana
  misc_feature: MA Experiment 20000235 PARAMETER Experiment Name: At_Siliques_P Parameter: Plant Line Value: WS
  misc_feature: MA Experiment 20000235 PARAMETER Experiment Name: At_Siliques_P Parameter: Tissue Value: 5-10mm Siliques vs. Whole Plant
aaaaagcatagtctctctctctctctctctctcataatacatagaggagaataaaaaaatgatgtgtttccaaaacttcaaagttcgtaaattctttacgtcgaggaactccggtaaagtatctccagacaccgtctcaaaatcagcggagaacagattgtggaaagaatttcaagaaaaagatgacgttctgaagatccatgtgagatcgtggttaccttcgccggaaaatattttccggtgggaagccaccgttagcggcccggtgggttgcccttacgaaaaaggagtcttcaccgtctctgttcacatcccacccaaatatccttatgaaccacccaaaatcacattcaagactaagatttttcatcctaatataagcgaaattggagaaagctttgttgatatattgggatcacgatggtcatcagccttgaccattaacttggtgttgctctctatatgttcgattttatcgaacccggttgaaccgttattggttagcaatcatgccgcgagactgtaccagaaagaccggaaagcttacgagaaagttgcgcgagaatggactttgaagtatgcaaagggatgattagttgttctcaagtttttttgatgtctattgcgattaaactatatgacttctgttttgtttcgtcagtttagtgtcgtgtaaggtcgtttactaccgagagattggatacaatagttgtatttgtattcaagacgtcagcagctgctaaaccttgtt

SEQ ID NO: 20866 - protein, 177 aa, Arabidopsis thaliana
  peptide (1)..(177): Ceres Seq. ID no. 12562692
  misc_feature (30)..(177): Homolog of NCBI NO: 456568 NR Description: ubiquitin conjugating enzyme
  misc_feature (30)..(177): Homolog of NCBI NO: 30693871 NR Description: ubiquitin-conjugating enzyme 8 (UBC8)
  misc_feature (30)..(177): Homolog of NCBI NO: 30025160 NR Description: ubiquitin-conjugating enzyme [Hordeum vulgare]
  misc_feature (54)..(177): Homolog of NCBI NO: 18398206 NR Description: E2, ubiquitin-conjugating enzyme 11 (UBC11)
  misc_feature (30)..(177): Homolog of NCBI NO: 28569263 NR Description: ubiquitin-conjugating enzyme E2 [Gossypium
  misc_feature (30)..(177): Homolog of NCBI NO: 464981 NR Description: Ubiquitin-conjugating enzyme E2-17 kDa
  misc_feature (30)..(177): Homolog of NCBI NO: 34909292 NR Description: ubiquitin conjugating enzyme
  misc_feature (30)..(177): Homolog of NCBI NO: 2668744 NR Description: ubiquitin conjugating enzyme [Zea mays]
  misc_feature (1)..(177): Homolog of NCBI NO: 18403085 NR Description: E2, ubiquitin-conjugating enzyme, putative
  misc_feature (1)..(177): Homolog of NCBI NO: 21555293 NR Description: E2, ubiquitin-conjugating enzyme, putative
MMCFQNFKVRKFFTSRNSGKVSPDTVSKSAENRLWKEFQEKDDVLKIHVRSWLPSPENIFRWEATVSGPVGCPYEKGVFTVSVHIPPKYPYEPPKITFKTKIFHPNISEIGESFVDILGSRWSSALTINLVLLSICSILSNPVEPLLVSNHAARLYQKDRKAYEKVAREWTLKYAKG

SEQ ID NO: 20867 - protein, 176 aa, Arabidopsis thaliana
  peptide (1)..(176): Ceres Seq. ID no. 12562693
  misc_feature (29)..(176): Homolog of NCBI NO: 456568 NR Description: ubiquitin conjugating enzyme
  misc_feature (29)..(176): Homolog of NCBI NO: 30693871 NR Description: ubiquitin-conjugating enzyme 8 (UBC8)
  misc_feature (29)..(176): Homolog of NCBI NO: 30025160 NR Description: ubiquitin-conjugating enzyme [Hordeum vulgare]
  misc_feature (53)..(176): Homolog of NCBI NO: 18398206 NR Description: E2, ubiquitin-conjugating enzyme 11 (UBC11)
  misc_feature (29)..(176): Homolog of NCBI NO: 28569263 NR Description: ubiquitin-conjugating enzyme E2 [Gossypium
  misc_feature (29)..(176): Homolog of NCBI NO: 464981 NR Description: Ubiquitin-conjugating enzyme E2-17 kDa
  misc_feature (29)..(176): Homolog of NCBI NO: 34909292 NR Description: ubiquitin conjugating enzyme
  misc_feature (29)..(176): Homolog of NCBI NO: 2668744 NR Description: ubiquitin conjugating enzyme [Zea mays]
  misc_feature (1)..(176): Homolog of NCBI NO: 18403085 NR Description: E2, ubiquitin-conjugating enzyme, putative
  misc_feature (1)..(176): Homolog of NCBI NO: 21555293 NR Description: E2, ubiquitin-conjugating enzyme, putative
MCFQNFKVRKFFTSRNSGKVSPDTVSKSAENRLWKEFQEKDDVLKIHVRSWLPSPENIFRWEATVSGPVGCPYEKGVFTVSVHIPPKYPYEPPKITFKTKIFHPNISEIGESFVDILGSRWSSALTINLVLLSICSILSNPVEPLLVSNHAARLYQKDRKAYEKVAREWTLKYAKG

SEQ ID NO: 20868 - DNA, 856 bp, Arabidopsis thaliana
  misc_feature (1)..(856): Ceres Seq. ID no. 12712848
  misc_feature: MA Experiment ID: 20000112 Result: Up-regulated in Transcription
  misc_feature: MA Experiment 20000112 PARAMETER Experiment Name: At_42deg_Heat_cDNA_P Parameter: Temperature (deg C) Value: 42 vs. 22
  misc_feature: MA Experiment 20000112 PARAMETER Experiment Name: At_42deg_Heat_cDNA_P Parameter: Timepoint (hr) Value: 2
  misc_feature: MA Experiment 20000112 PARAMETER Experiment Name: At_42deg_Heat_cDNA_P Parameter: Tissue Value: Aerial
  misc_feature: MA Experiment ID: 20000113 Result: Up-regulated in Transcription
  misc_feature: MA Experiment 20000113 PARAMETER Experiment Name: At_42deg_Heat_cDNA_P Parameter: Temperature (deg C) Value: 42 vs. 22
  misc_feature: MA Experiment 20000113 PARAMETER Experiment Name: At_42deg_Heat_cDNA_P Parameter: Timepoint (hr) Value: 8
  misc_feature: MA Experiment 20000113 PARAMETER Experiment Name: At_42deg_Heat_cDNA_P Parameter: Tissue Value: Aerial
  misc_feature: MA Experiment ID: 20000185 Result: Up-regulated in Transcription
  misc_feature: MA Experiment 20000185 PARAMETER Experiment Name: At_Roots__P Parameter: Age (day) Value: 7 vs. 21
  misc_feature: MA Experiment 20000185 PARAMETER Experiment Name: At_Roots__P Parameter: Organism Value: A. thaliana
  misc_feature: MA Experiment 20000185 PARAMETER Experiment Name: At_Roots__P Parameter: Tissue Value: Roots vs. Whole Plant
  misc_feature: MA Experiment ID: 20000438 Result: Up-regulated in Transcription
  misc_feature: MA Experiment 20000438 PARAMETER Experiment Name: At_Shoots__P Parameter: Age (day) Value: 14
  misc_feature: MA Experiment 20000438 PARAMETER Experiment Name: At_Shoots__P Parameter: Tissue Value: Shoots vs. Whole Plant
  misc_feature: MA Experiment ID: 20000439 Result: Up-regulated in Transcription
  misc_feature: MA Experiment 20000439 PARAMETER Experiment Name: At_Roots__P Parameter: Age (day) Value: 14 vs. 21
  misc_feature: MA Experiment 20000439 PARAMETER Experiment Name: At_Roots__P Parameter: Organism Value: A. thaliana
  misc_feature: MA Experiment 20000439 PARAMETER Experiment Name: At_Roots__P Parameter: Tissue Value: Roots vs. Whole Plant
  misc_feature: MA Experiment ID: 20001248 Result: Down-regulated in Transcription
  misc_feature: MA Experiment 20001248 PARAMETER Experiment Name: At_Far-red-induction_P Parameter: Age (day) Value: 7
  misc_feature: MA Experiment 20001248 PARAMETER Experiment Name: At_Far-red-induction_P Parameter: Light Value: Far-red vs. White
  misc_feature: MA Experiment 20001248 PARAMETER Experiment Name: At_Far-red-induction_P Parameter: Organism Value: A. thaliana
  misc_feature: MA Experiment 20001248 PARAMETER Experiment Name: At_Far-red-induction_P Parameter: Plant Line Value: Columbia
  misc_feature: MA Experiment 20001248 PARAMETER Experiment Name: At_Far-red-induction_P Parameter: Timepoint (hr) Value: 4
  misc_feature: MA Experiment 20001248 PARAMETER Experiment Name: At_Far-red-induction_P Parameter: Tissue Value: Whole Plant
  misc_feature: MA Experiment ID: 20001756 Result: Up-regulated in Transcription
  misc_feature: MA Experiment 20001756 PARAMETER Experiment Name: At_50mM_NH4NO3_L-to-H_P Parameter: Timepoint (hr) Value: 4
  misc_feature: MA Experiment 20001756 PARAMETER Experiment Name: At_50mM_NH4NO3_L-to-H_P Parameter: Tissue Value: Leaf
  misc_feature: MA Experiment 20001756 PARAMETER Experiment Name: At_50mM_NH4NO3_L-to-H_P Parameter: Treatment Value: 50mM NH4NO3 vs 100mM Mannitol
  misc_feature: MA Experiment ID: 20001757 Result: Up-regulated in Transcription
  misc_feature: MA Experiment 20001757 PARAMETER Experiment Name: At_50mM_NH4NO3_L-to-H_P Parameter: Timepoint (hr) Value: 6
  misc_feature: MA Experiment 20001757 PARAMETER Experiment Name: At_50mM_NH4NO3_L-to-H_P Parameter: Tissue Value: Leaf
  misc_feature: MA Experiment 20001757 PARAMETER Experiment Name: At_50mM_NH4NO3_L-to-H_P Parameter: Treatment Value: 50mM NH4NO3 vs 100mM Mannitol
  misc_feature: MA Experiment ID: 20001905 Result: Down-regulated in Transcription
  misc_feature: MA Experiment 20001905 PARAMETER Experiment Name: At_Drought_Reproduction_P Parameter: Age (day) Value: 40
  misc_feature: MA Experiment 20001905 PARAMETER Experiment Name: At_Drought_Reproduction_P Parameter: Organism Value: A. thaliana
  misc_feature: MA Experiment 20001905 PARAMETER Experiment Name: At_Drought_Reproduction_P Parameter: Plant Line Value: WS
  misc_feature: MA Experiment 20001905 PARAMETER Experiment Name: At_Drought_Reproduction_P Parameter: Timepoint (day) Value: 10
  misc_feature: MA Experiment 20001905 PARAMETER Experiment Name: At_Drought_Reproduction_P Parameter: Tissue Value: Rosettes
  misc_feature: MA Experiment 20001905 PARAMETER Experiment Name: At_Drought_Reproduction_P Parameter: Treatment Value: Drought vs. No Drought
atgccttttaattgaaacgcaccacaaatagaacaaagaaccccacacacacaccaatggaaccaaagctaacccatctttgttattgccttctactttttcttccactactctgccaatccaccatagccaaaccttcatcatcaccaaaccctagcagcagcatcaacttcattgtctcatcatgccgcgtcacgcgttaccaaactctctgcgtcaaatgccttgccgcttttgcagacaaaatccgccgcaacgaaaaccagttagctcaaaccgctttagccgttactctagtccgggttcagtccacgacaatctatgtagggaagctgactaaagctaggagaatcaaaaggagagagtacttagccgtgaaggattgtgttgaaaatcttggagacggtttagagatgttggctcagtcgatgagggagttgaagcaagttggtcgatctggtcgtgatcgagacgagttcttgtggagactaagtaacgttgagacttgggttagtgctgccttaacggatgagacaacgtgtctggatgggttcgatggaaaggttatggacggtgtggtaaaatcagcgattagaagaagagtggttcatgtggctcgagttactagtaatgcattggctcttgtaaaccggttcgcggctaggcataagtcatagaatattcggctaataaattaaaattcggtccttaataaggttttgtcatgtattttcttttttgtcctagtgggtgatttgtttctttatgatactttgtatttatgtgtaggcttgggatgtttatgcttttgtcatggtttcgactagagataacgatgattttaacgggtttatgg

SEQ ID NO: 20869 - protein, 206 aa, Arabidopsis thaliana
  peptide (1)..(206): Ceres Seq. ID no. 12712849
  misc_feature (34)..(204): Homolog of NCBI NO: 7488727 NR Description: 21K protein precursor - alfalfa
  misc_feature (13)..(205): Homolog of NCBI NO: 112717 NR Description: 21 KD PROTEIN PRECURSOR (1.2 PROTEIN)
  misc_feature (14)..(204): Homolog of NCBI NO: 15232790 NR Description: putative protein; protein id: At3g47380.1
  misc_feature (12)..(204): Homolog of NCBI NO: 7406663 NR Description: putative ripening-related protein [Vitis vinifera]
  misc_feature (18)..(201): Homolog of NCBI NO: 21618088 NR Description: ripening-related protein-like [Arabidopsis
  misc_feature (18)..(201): Homolog of NCBI NO: 15241799 NR Description: ripening-related protein - like
  misc_feature (14)..(203): Homolog of NCBI NO: 18407657 NR Description: expressed protein
  misc_feature (14)..(203): Homolog of NCBI NO: 21618013 NR Description: putative ripening-related protein [Arabidopsis
  misc_feature (1)..(206): Homolog of NCBI NO: 21555297 NR Description: unknown [Arabidopsis thaliana]
  misc_feature (1)..(206): Homolog of NCBI NO: 15234547 NR Description: putative protein
MEPKLTHLCYCLLLFLPLLCQSTIAKPSSSPNPSSSINFIVSSCRVTRYQTLCVKCLAAFADKIRRNENQLAQTALAVTLVRVQSTTIYVGKLTKARRIKRREYLAVKDCVENLGDGLEMLAQSMRELKQVGRSGRDRDEFLWRLSNVETWVSAALTDETTCLDGFDGKVMDGVVKSAIRRRVVHVARVTSNALALVNRFAARHKS

SEQ ID NO: 20870 - DNA, 599 bp, Arabidopsis thaliana
  misc_feature (1)..(599): Ceres Seq. ID no. 12334009
  misc_feature: MA Experiment ID: 108434 Result: Down-regulated in Transcription
  misc_feature: MA Experiment 108434 PARAMETER Experiment Name: At_Root_Tips_cDNA_P Parameter: Tissue Value: Root Tips
  misc_feature: MA Experiment ID: 108435 Result: Down-regulated in Transcription
  misc_feature: MA Experiment 108435 PARAMETER Experiment Name: At_stm_Mutants_cDNA_P Parameter: Plant Line Value: wt Landsburg vs stm
  misc_feature: MA Experiment 108435 PARAMETER Experiment Name: At_stm_Mutants_cDNA_P Parameter: Tissue Value: Shoot Apical Meristem Region
  misc_feature: MA Experiment ID: 108461 Result: Up-regulated in Transcription
  misc_feature: MA Experiment 108461 PARAMETER Experiment Name: At_Germinating_Seeds_cDNA_P Parameter: Age (day) Value: 1 vs. 0
  misc_feature: MA Experiment 108461 PARAMETER Experiment Name: At_Germinating_Seeds_cDNA_P Parameter: Tissue Value: Germinating Seeds
  misc_feature: MA Experiment ID: 108462 Result: Up-regulated in Transcription
  misc_feature: MA Experiment 108462 PARAMETER Experiment Name: At_Germinating_Seeds_cDNA_P Parameter: Age (day) Value: 2 vs. 0
  misc_feature: MA Experiment 108462 PARAMETER Experiment Name: At_Germinating_Seeds_cDNA_P Parameter: Tissue Value: Germinating Seeds
  misc_feature: MA Experiment ID: 108464 Result: Up-regulated in Transcription
  misc_feature: MA Experiment 108464 PARAMETER Experiment Name: At_Germinating_Seeds_cDNA_P Parameter: Age (day) Value: 4 vs. 0
  misc_feature: MA Experiment 108464 PARAMETER Experiment Name: At_Germinating_Seeds_cDNA_P Parameter: Tissue Value: Germinating Seeds
  misc_feature: MA Experiment ID: 108488 Result: Up-regulated in Transcription
  misc_feature: MA Experiment ID: 108489 Result: Down-regulated in Transcription
  misc_feature: MA Experiment ID: 108577 Result: Down-regulated in Transcription
  misc_feature: MA Experiment 108577 PARAMETER Experiment Name: At_42deg_Heat_cDNA_P Parameter: Temperature (deg C) Value: 42 vs. 22
  misc_feature: MA Experiment 108577 PARAMETER Experiment Name: At_42deg_Heat_cDNA_P Parameter: Timepoint (hr) Value: 6
  misc_feature: MA Experiment 108577 PARAMETER Experiment Name: At_42deg_Heat_cDNA_P Parameter: Tissue Value: Aerial
  misc_feature: MA Experiment ID: 108595 Result: Down-regulated in Transcription
  misc_feature: MA Experiment 108595 PARAMETER Experiment Name: At_Ler-pi_Ovule_cDNA_P Parameter: Plant Line Value: null
  misc_feature: MA Experiment ID: 20000180 Result: Up-regulated in Transcription
  misc_feature: MA Experiment 20000180 PARAMETER Experiment Name: At_Germinating_Seeds_P Parameter: Age (hr) Value: 24 vs. 0
  misc_feature: MA Experiment 20000180 PARAMETER Experiment Name: At_Germinating_Seeds_P Parameter: Tissue Value: Germinating Seeds
  misc_feature: MA Experiment ID: 20000185 Result: Down-regulated in Transcription
  misc_feature: MA Experiment 20000185 PARAMETER Experiment Name: At_Roots__P Parameter: Age (day) Value: 7 vs. 21
  misc_feature: MA Experiment 20000185 PARAMETER Experiment Name: At_Roots__P Parameter: Organism Value: A. thaliana
  misc_feature: MA Experiment 20000185 PARAMETER Experiment Name: At_Roots__P Parameter: Tissue Value: Roots vs. Whole Plant
  misc_feature: MA Experiment ID: 20000264 Result: Down-regulated in Transcription
  misc_feature: MA Experiment 20000264 PARAMETER Experiment Name: At_Open_Flower_P Parameter: Age (day) Value: 21
  misc_feature: MA Experiment 20000264 PARAMETER Experiment Name: At_Open_Flower_P Parameter: Plant Line Value: WS
  misc_feature: MA Experiment 20000264 PARAMETER Experiment Name: At_Open_Flower_P Parameter: Tissue Value: Open Flower vs. Whole Plant
  misc_feature: MA Experiment ID: 20000286 Result: Down-regulated in Transcription
  misc_feature: MA Experiment 20000286 PARAMETER Experiment Name: At_Open_Flower_P Parameter: Age (day) Value: 21
  misc_feature: MA Experiment 20000286 PARAMETER Experiment Name: At_Open_Flower_P Parameter: Plant Line Value: WS
  misc_feature: MA Experiment 20000286 PARAMETER Experiment Name: At_Open_Flower_P Parameter: Tissue Value: Half Open vs. Whole Plant
  misc_feature: MA Experiment ID: 20000439 Result: Down-regulated in Transcription
  misc_feature: MA Experiment 20000439 PARAMETER Experiment Name: At_Roots__P Parameter: Age (day) Value: 14 vs. 21
  misc_feature: MA Experiment 20000439 PARAMETER Experiment Name: At_Roots__P Parameter: Organism Value: A. thaliana
  misc_feature: MA Experiment 20000439 PARAMETER Experiment Name: At_Roots__P Parameter: Tissue Value: Roots vs. Whole Plant
  misc_feature: MA Experiment ID: 20000794 Result: Down-regulated in Transcription
  misc_feature: MA Experiment 20000794 PARAMETER Experiment Name: At_Petals_P Parameter: Age (day) Value: 23-25 days
  misc_feature: MA Experiment 20000794 PARAMETER Experiment Name: At_Petals_P Parameter: Plant Line Value: WS
  misc_feature: MA Experiment 20000794 PARAMETER Experiment Name: At_Petals_P Parameter: Tissue Value: Petals vs. Whole plant
  misc_feature: MA Experiment ID: 20001557 Result: Down-regulated in Transcription
  misc_feature: MA Experiment 20001557 PARAMETER Experiment Name: At_Drought_Soil_Dry_P Parameter: Age (day) Value: 27
  misc_feature: MA Experiment 20001557 PARAMETER Experiment Name: At_Drought_Soil_Dry_P Parameter: Organism Value: A. thaliana
  misc_feature: MA Experiment 20001557 PARAMETER Experiment Name: At_Drought_Soil_Dry_P Parameter: Plant Line Value: WS
  misc_feature: MA Experiment 20001557 PARAMETER Experiment Name: At_Drought_Soil_Dry_P Parameter: Post Timepoint (hr) Value: 3
  misc_feature: MA Experiment 20001557 PARAMETER Experiment Name: At_Drought_Soil_Dry_P Parameter: Post-Treatment Value: Re-Water vs. No Drought
  misc_feature: MA Experiment 20001557 PARAMETER Experiment Name: At_Drought_Soil_Dry_P Parameter: Timepoint (day) Value: 13
  misc_feature: MA Experiment 20001557 PARAMETER Experiment Name: At_Drought_Soil_Dry_P Parameter: Treatment Value: Drought vs. No Drought
  misc_feature: MA Experiment ID: 20001558 Result: Down-regulated in Transcription
  misc_feature: MA Experiment 20001558 PARAMETER Experiment Name: At_Drought_Soil_Dry_P Parameter: Age (day) Value: 27
  misc_feature: MA Experiment 20001558 PARAMETER Experiment Name: At_Drought_Soil_Dry_P Parameter: Organism Value: A. thaliana
  misc_feature: MA Experiment 20001558 PARAMETER Experiment Name: At_Drought_Soil_Dry_P Parameter: Plant Line Value: WS
  misc_feature: MA Experiment 20001558 PARAMETER Experiment Name: At_Drought_Soil_Dry_P Parameter: Post Timepoint (hr) Value: 6
  misc_feature: MA Experiment 20001558 PARAMETER Experiment Name: At_Drought_Soil_Dry_P Parameter: Post-Treatment Value: Re-Water vs. No Drought
  misc_feature: MA Experiment 20001558 PARAMETER Experiment Name: At_Drought_Soil_Dry_P Parameter: Timepoint (day) Value: 13
  misc_feature: MA Experiment 20001558 PARAMETER Experiment Name: At_Drought_Soil_Dry_P Parameter: Treatment Value: Drought vs. No Drought
  misc_feature: MA Experiment ID: 20001757 Result: Up-regulated in Transcription
  misc_feature: MA Experiment 20001757 PARAMETER Experiment Name: At_50mM_NH4NO3_L-to-H_P Parameter: Timepoint (hr) Value: 6
  misc_feature: MA Experiment 20001757 PARAMETER Experiment Name: At_50mM_NH4NO3_L-to-H_P Parameter: Tissue Value: Leaf
  misc_feature: MA Experiment 20001757 PARAMETER Experiment Name: At_50mM_NH4NO3_L-to-H_P Parameter: Treatment Value: 50mM NH4NO3 vs 100mM Mannitol
  misc_feature: MA Experiment ID: 20001904 Result: Down-regulated in Transcription
  misc_feature: MA Experiment 20001904 PARAMETER Experiment Name: At_Drought_Reproduction_P Parameter: Age (day) Value: 37
  misc_feature: MA Experiment 20001904 PARAMETER Experiment Name: At_Drought_Reproduction_P Parameter: Organism Value: A. thaliana
  misc_feature: MA Experiment 20001904 PARAMETER Experiment Name: At_Drought_Reproduction_P Parameter: Plant Line Value: WS
  misc_feature: MA Experiment 20001904 PARAMETER Experiment Name: At_Drought_Reproduction_P Parameter: Timepoint (day) Value: 7
  misc_feature: MA Experiment 20001904 PARAMETER Experiment Name: At_Drought_Reproduction_P Parameter: Tissue Value: Rosettes
  misc_feature: MA Experiment 20001904 PARAMETER Experiment Name: At_Drought_Reproduction_P Parameter: Treatment Value: Drought vs. No Drought
  misc_feature: MA Experiment ID: 20001906 Result: Down-regulated in Transcription
  misc_feature: MA Experiment 20001906 PARAMETER Experiment Name: At_Drought_Reproduction_P Parameter: Age (day) Value: 35
  misc_feature: MA Experiment 20001906 PARAMETER Experiment Name: At_Drought_Reproduction_P Parameter: Organism Value: A. thaliana
  misc_feature: MA Experiment 20001906 PARAMETER Experiment Name: At_Drought_Reproduction_P Parameter: Plant Line Value: WS
  misc_feature: MA Experiment 20001906 PARAMETER Experiment Name: At_Drought_Reproduction_P Parameter: Timepoint (day) Value: 5
  misc_feature: MA Experiment 20001906 PARAMETER Experiment Name: At_Drought_Reproduction_P Parameter: Tissue Value: Siliques
  misc_feature: MA Experiment 20001906 PARAMETER Experiment Name: At_Drought_Reproduction_P Parameter: Treatment Value: Drought vs. No Drought
  misc_feature: MA Experiment ID: 20001908 Result: Down-regulated in Transcription
  misc_feature: MA Experiment 20001908 PARAMETER Experiment Name: At_Drought_Reproduction_P Parameter: Age (day) Value: 40
  misc_feature: MA Experiment 20001908 PARAMETER Experiment Name: At_Drought_Reproduction_P Parameter: Organism Value: A. thaliana
  misc_feature: MA Experiment 20001908 PARAMETER Experiment Name: At_Drought_Reproduction_P Parameter: Plant Line Value: WS
  misc_feature: MA Experiment 20001908 PARAMETER Experiment Name: At_Drought_Reproduction_P Parameter: Timepoint (day) Value: 10
  misc_feature: MA Experiment 20001908 PARAMETER Experiment Name: At_Drought_Reproduction_P Parameter: Tissue Value: Siliques
  misc_feature: MA Experiment 20001908 PARAMETER Experiment Name: At_Drought_Reproduction_P Parameter: Treatment Value: Drought vs. No Drought
accttttcggatcactcacacaacttccaacgatcacacacaaatggcgatgacgtcagcagctaccggatttattctcacggccaacgtcccggcggcaataggcggtggttcttcaaagagcaccaccattgtgtctttcttgccgatgagaagcttcggttcaaggctagtagtcagagcggcggaagatacacctccggcaaccgcctcgtcggatagttcttccaccaccgctgctgctgctccggcgaaagttccggccgctaaggctaaacctcctccaattggcccaaagagaggatccaaggtcaagattctaaggaaagaatcatactggtacaagaacgttggatcagttgtggccgttgatcaggacccgaagacccgatatccggttgtggtccggttcgccaaggtgaattacgcgaatatatcgaccaacaactacgcattggacgaggtggaagaagtaaaatgagagacatggtttatctctaaaccggttcgtctgtttgtaatcttaaacaaaaccgtatgtaccaaaaagttaaccaacaattcatcttttatcttttacaatctcaagatcgatttcc

SEQ ID NO: 20871 - protein, 159 aa, Arabidopsis thaliana
  peptide (1)..(159): Ceres Seq. ID no. 12334010
  misc_feature (98)..(159): Pfam Name: Photosystem I reaction centre subunit IV / PsaE Pfam Description: Photosystem I reaction centre subunit IV / PsaE
  misc_feature (17)..(159): Homolog of NCBI NO: 34394725 NR Description: putative Photosystem I reaction center subunit IV
  misc_feature (16)..(159): Homolog of NCBI NO: 2499967 NR Description: Photosystem I reaction center subunit IV B,
  misc_feature (17)..(158): Homolog of NCBI NO: 131176 NR Description: Photosystem I reaction center subunit IV,
  misc_feature (17)..(159): Homolog of NCBI NO: 2499966 NR Description: Photosystem I reaction center subunit IV A,
  misc_feature (50)..(158): Homolog of NCBI NO: 11692884 NR Description: AT4g28750 [Arabidopsis thaliana]
  misc_feature (45)..(158): Homolog of NCBI NO: 22091414 NR Description: putative photosystem I subunit PSI-E [Arabidopsis
  misc_feature (17)..(158): Homolog of NCBI NO: 24030202 NR Description: putative photosystem I subunit PSI-E protein
  misc_feature (15)..(158): Homolog of NCBI NO: 30688100 NR Description: photosystem I subunit PSI-E - like protein
  misc_feature (17)..(159): Homolog of NCBI NO: 21555308 NR Description: Photosystem I reaction center subunit IV B,
  misc_feature (15)..(159): Homolog of NCBI NO: 15225331 NR Description: putative photosystem I reaction center subunit IV
PFRITHTTSNDHTQMAMTSAATGFILTANVPAAIGGGSSKSTTIVSFLPMRSFGSRLVVRAAEDTPPATASSDSSSTTAAAAPAKVPAAKAKPPPIGPKRGSKVKILRKESYWYKNVGSVVAVDQDPKTRYPVVVRFAKVNYANISTNNYALDEVEEVK

SEQ ID NO: 20872 - protein, 145 aa, Arabidopsis thaliana
  peptide (1)..(145): Ceres Seq. ID no. 12334011
  misc_feature (84)..(145): Pfam Name: Photosystem I reaction centre subunit IV / PsaE Pfam Description: Photosystem I reaction centre subunit IV / PsaE
  misc_feature (3)..(145): Homolog of NCBI NO: 34394725 NR Description: putative Photosystem I reaction center subunit IV
  misc_feature (2)..(145): Homolog of NCBI NO: 2499967 NR Description: Photosystem I reaction center subunit IV B,
  misc_feature (3)..(144): Homolog of NCBI NO: 131176 NR Description: Photosystem I reaction center subunit IV,
  misc_feature (3)..(145): Homolog of NCBI NO: 2499966 NR Description: Photosystem I reaction center subunit IV A,
  misc_feature (36)..(144): Homolog of NCBI NO: 11692884 NR Description: AT4g28750 [Arabidopsis thaliana]
  misc_feature (31)..(144): Homolog of NCBI NO: 22091414 NR Description: putative photosystem I subunit PSI-E [Arabidopsis
  misc_feature (3)..(144): Homolog of NCBI NO: 24030202 NR Description: putative photosystem I subunit PSI-E protein
  misc_feature (1)..(144): Homolog of NCBI NO: 30688100 NR Description: photosystem I subunit PSI-E - like protein
  misc_feature (3)..(145): Homolog of NCBI NO: 21555308 NR Description: Photosystem I reaction center subunit IV B,
  misc_feature (1)..(145): Homolog of NCBI NO: 15225331 NR Description: putative photosystem I reaction center subunit IV
MAMTSAATGFILTANVPAAIGGGSSKSTTIVSFLPMRSFGSRLVVRAAEDTPPATASSDSSSTTAAAAPAKVPAAKAKPPPIGPKRGSKVKILRKESYWYKNVGSVVAVDQDPKTRYPVVVRFAKVNYANISTNNYALDEVEEVK

SEQ ID NO: 20873 - protein, 143 aa, Arabidopsis thaliana
  peptide (1)..(143): Ceres Seq. ID no. 12334012
  misc_feature (82)..(143): Pfam Name: Photosystem I reaction centre subunit IV / PsaE Pfam Description: Photosystem I reaction centre subunit IV / PsaE
  misc_feature (1)..(143): Homolog of NCBI NO: 34394725 NR Description: putative Photosystem I reaction center subunit IV
  misc_feature (1)..(143): Homolog of NCBI NO: 2499967 NR Description: Photosystem I reaction center subunit IV B,
  misc_feature (1)..(142): Homolog of NCBI NO: 131176 NR Description: Photosystem I reaction center subunit IV,
  misc_feature (1)..(143): Homolog of NCBI NO: 2499966 NR Description: Photosystem I reaction center subunit IV A,
  misc_feature (34)..(142): Homolog of NCBI NO: 11692884 NR Description: AT4g28750 [Arabidopsis thaliana]
  misc_feature (29)..(142): Homolog of NCBI NO: 22091414 NR Description: putative photosystem I subunit PSI-E [Arabidopsis
  misc_feature (1)..(142): Homolog of NCBI NO: 24030202 NR Description: putative photosystem I subunit PSI-E protein
  misc_feature (1)..(142): Homolog of NCBI NO: 30688100 NR Description: photosystem I subunit PSI-E - like protein
  misc_feature (1)..(143): Homolog of NCBI NO: 21555308 NR Description: Photosystem I reaction center subunit IV B,
  misc_feature (1)..(143): Homolog of NCBI NO: 15225331 NR Description: putative photosystem I reaction center subunit IV
MTSAATGFILTANVPAAIGGGSSKSTTIVSFLPMRSFGSRLVVRAAEDTPPATASSDSSSTTAAAAPAKVPAAKAKPPPIGPKRGSKVKILRKESYWYKNVGSVVAVDQDPKTRYPVVVRFAKVNYANISTNNYALDEVEEVK

SEQ ID NO: 20874 - DNA, 614 bp, Arabidopsis thaliana
  misc_feature (1)..(614): Ceres Seq. ID no. 13499463
  misc_feature: MA Experiment ID: 108434 Result: Up-regulated in Transcription
  misc_feature: MA Experiment 108434 PARAMETER Experiment Name: At_Root_Tips_cDNA_P Parameter: Tissue Value: Root Tips
  misc_feature: MA Experiment ID: 108461 Result: Down-regulated in Transcription
  misc_feature: MA Experiment 108461 PARAMETER Experiment Name: At_Germinating_Seeds_cDNA_P Parameter: Age (day) Value: 1 vs. 0
  misc_feature: MA Experiment 108461 PARAMETER Experiment Name: At_Germinating_Seeds_cDNA_P Parameter: Tissue Value: Germinating Seeds
  misc_feature: MA Experiment ID: 108462 Result: Down-regulated in Transcription
  misc_feature: MA Experiment 108462 PARAMETER Experiment Name: At_Germinating_Seeds_cDNA_P Parameter: Age (day) Value: 2 vs. 0
  misc_feature: MA Experiment 108462 PARAMETER Experiment Name: At_Germinating_Seeds_cDNA_P Parameter: Tissue Value: Germinating Seeds
  misc_feature: MA Experiment ID: 108463 Result: Down-regulated in Transcription
  misc_feature: MA Experiment 108463 PARAMETER Experiment Name: At_Germinating_Seeds_cDNA_P Parameter: Age (day) Value: 3 vs. 0
  misc_feature: MA Experiment 108463 PARAMETER Experiment Name: At_Germinating_Seeds_cDNA_P Parameter: Tissue Value: Germinating Seeds
  misc_feature: MA Experiment ID: 108464 Result: Down-regulated in Transcription
  misc_feature: MA Experiment 108464 PARAMETER Experiment Name: At_Germinating_Seeds_cDNA_P Parameter: Age (day) Value: 4 vs. 0
  misc_feature: MA Experiment 108464 PARAMETER Experiment Name: At_Germinating_Seeds_cDNA_P Parameter: Tissue Value: Germinating Seeds
  misc_feature: MA Experiment ID: 20000234 Result: Up-regulated in Transcription
  misc_feature: MA Experiment 20000234 PARAMETER Experiment Name: At_Siliques_P Parameter: Age (day) Value: 21
  misc_feature: MA Experiment 20000234 PARAMETER Experiment Name: At_Siliques_P Parameter: Organism Value: A. thaliana
  misc_feature: MA Experiment 20000234 PARAMETER Experiment Name: At_Siliques_P Parameter: Plant Line Value: WS
  misc_feature: MA Experiment 20000234 PARAMETER Experiment Name: At_Siliques_P Parameter: Tissue Value: Less Than 5mm Siliques vs. Whole Plant
  misc_feature: MA Experiment ID: 20001560 Result: Up-regulated in Transcription
  misc_feature: MA Experiment 20001560 PARAMETER Experiment Name: At_Drought_Soil_Dry_P Parameter: Age (day) Value: 28
  misc_feature: MA Experiment 20001560 PARAMETER Experiment Name: At_Drought_Soil_Dry_P Parameter: Organism Value: A. thaliana
  misc_feature: MA Experiment 20001560 PARAMETER Experiment Name: At_Drought_Soil_Dry_P Parameter: Plant Line Value: WS
  misc_feature: MA Experiment 20001560 PARAMETER Experiment Name: At_Drought_Soil_Dry_P Parameter: Post Timepoint (hr) Value: None
  misc_feature: MA Experiment 20001560 PARAMETER Experiment Name: At_Drought_Soil_Dry_P Parameter: Post-Treatment Value: None
  misc_feature: MA Experiment 20001560 PARAMETER Experiment Name: At_Drought_Soil_Dry_P Parameter: Timepoint (day) Value: 14
  misc_feature: MA Experiment 20001560 PARAMETER Experiment Name: At_Drought_Soil_Dry_P Parameter: Treatment Value: Drought vs. No Drought
gtcccgaaagtcgcagagcgagctacaagaagaagcgaaacacacccagaagaagaagaagaacaacaacgaagtaaacaatggagtctgagaaaaagatagctcatgagatcggtggtgtcaaaaacgacgctcttcgatttggtcttcacggcgttaagagcaacatcatcggatctcacccactcgaatcgtcatacgaatctgaaaagaaatcgaaagaggcgttgaagaggacggtcattgcgcatgcctacgggactgcacttccgttgaagatggatatggataggcaaattctctcaaggtttcagagacctcctggaccaattccgtcgtcgatgctcggtttagaagtctacacgggagctgtggatgactttggttttgaggattacttgaatgatcctcgtgattccgagacattcaagccggtagacttccaccacgggatggaagttcgtcttggcatctcaaagggaccgatttacccaagtttcatgtaacccttcatgggtggttttttttatcggttgtttttggatcatgactcatcgtgtatgaacttatttcaaccttagacttgtactctctcttgagttaagtttgaaatc

SEQ ID NO: 20875 - protein, 141 aa, Arabidopsis thaliana
  peptide (1)..(141): Ceres Seq. ID no. 13499464
  misc_feature (3)..(132): Pfam Name: Proteasome maturation factor UMP1 Pfam Description: Proteasome maturation factor UMP1
  misc_feature (16)..(131): Homolog of NCBI NO: 7705429 NR Description: chromosome 13 open reading frame 12 [Homo
  misc_feature (16)..(131): Homolog of NCBI NO: 27691986 NR Description: similar to hypothetical protein HSPC014
  misc_feature (96)..(141): Homolog of NCBI NO: 2996128 NR Description: hypothetical protein [Picea mariana]
  misc_feature (96)..(141): Homolog of NCBI NO: 2996132 NR Description: hypothetical protein [Picea mariana]
  misc_feature (96)..(141): Homolog of NCBI NO: 2996130 NR Description: hypothetical protein [Picea mariana]
  misc_feature (95)..(141): Homolog of NCBI NO: 6049098 NR Description: unknown [Picea abies]
  misc_feature (4)..(141): Homolog of NCBI NO: 25493097 NR Description: hypothetical protein [imported] - Picea mariana
  misc_feature (1)..(141): Homolog of NCBI NO: 15240969 NR Description: expressed protein [Arabidopsis thaliana]
  misc_feature (1)..(141): Homolog of NCBI NO: 9828633 NR Description: F1N21.7 [Arabidopsis thaliana]
  misc_feature (1)..(141): Homolog of NCBI NO: 18408726 NR Description: expressed protein [Arabidopsis thaliana]
MESEKKIAHEIGGVKNDALRFGLHGVKSNIIGSHPLESSYESEKKSKEALKRTVIAHAYGTALPLKMDMDRQILSRFQRPPGPIPSSMLGLEVYTGAVDDFGFEDYLNDPRDSETFKPVDFHHGMEVRLGISKGPIYPSFM

SEQ ID NO: 20876 - protein, 75 aa, Arabidopsis thaliana
  peptide (1)..(75): Ceres Seq. ID no. 13499465
  misc_feature (1)..(66): Pfam Name: Proteasome maturation factor UMP1 Pfam Description: Proteasome maturation factor UMP1
  misc_feature (1)..(65): Homolog of NCBI NO: 7705429 NR Description: chromosome 13 open reading frame 12 [Homo
  misc_feature (1)..(65): Homolog of NCBI NO: 27691986 NR Description: similar to hypothetical protein HSPC014
  misc_feature (30)..(75): Homolog of NCBI NO: 2996128 NR Description: hypothetical protein [Picea mariana]
  misc_feature (30)..(75): Homolog of NCBI NO: 2996132 NR Description: hypothetical protein [Picea mariana]
  misc_feature (30)..(75): Homolog of NCBI NO: 2996130 NR Description: hypothetical protein [Picea mariana]
  misc_feature (29)..(75): Homolog of NCBI NO: 6049098 NR Description: unknown [Picea abies]
  misc_feature (1)..(75): Homolog of NCBI NO: 25493097 NR Description: hypothetical protein [imported] - Picea mariana
  misc_feature (1)..(75): Homolog of NCBI NO: 15240969 NR Description: expressed protein [Arabidopsis thaliana]
  misc_feature (1)..(75): Homolog of NCBI NO: 9828633 NR Description: F1N21.7 [Arabidopsis thaliana]
  misc_feature (1)..(75): Homolog of NCBI NO: 18408726 NR Description: expressed protein [Arabidopsis thaliana]
MDMDRQILSRFQRPPGPIPSSMLGLEVYTGAVDDFGFEDYLNDPRDSETFKPVDFHHGMEVRLGISKGPIYPSFM

SEQ ID NO: 20877 - protein, 73 aa, Arabidopsis thaliana
  peptide (1)..(73): Ceres Seq. ID no. 13499466
  misc_feature (1)..(64): Pfam Name: Proteasome maturation factor UMP1 Pfam Description: Proteasome maturation factor UMP1
  misc_feature (1)..(63): Homolog of NCBI NO: 7705429 NR Description: chromosome 13 open reading frame 12 [Homo
  misc_feature (1)..(63): Homolog of NCBI NO: 27691986 NR Description: similar to hypothetical protein HSPC014
  misc_feature (28)..(73): Homolog of NCBI NO: 2996128 NR Description: hypothetical protein [Picea mariana]
  misc_feature (28)..(73): Homolog of NCBI NO: 2996132 NR Description: hypothetical protein [Picea mariana]
  misc_feature (28)..(73): Homolog of NCBI NO: 2996130 NR Description: hypothetical protein [Picea mariana]
  misc_feature (27)..(73): Homolog of NCBI NO: 6049098 NR Description: unknown [Picea abies]
  misc_feature (1)..(73): Homolog of NCBI NO: 25493097 NR Description: hypothetical protein [imported] - Picea mariana
  misc_feature (1)..(73): Homolog of NCBI NO: 15240969 NR Description: expressed protein [Arabidopsis thaliana]
  misc_feature (1)..(73): Homolog of NCBI NO: 9828633 NR Description: F1N21.7 [Arabidopsis thaliana]
  misc_feature (1)..(73): Homolog of NCBI NO: 18408726 NR Description: expressed protein [Arabidopsis thaliana]
MDRQILSRFQRPPGPIPSSMLGLEVYTGAVDDFGFEDYLNDPRDSETFKPVDFHHGMEVRLGISKGPIYPSFM

SEQ ID NO: 20878 - DNA, 855 bp, Arabidopsis thaliana
  misc_feature (1)..(855): Ceres Seq. ID no. 12332387
  misc_feature: MA Experiment ID: 108434 Result: Down-regulated in Transcription
  misc_feature: MA Experiment 108434 PARAMETER Experiment Name: At_Root_Tips_cDNA_P Parameter: Tissue Value: Root Tips
  misc_feature: MA Experiment ID: 108462 Result: Up-regulated in Transcription
  misc_feature: MA Experiment 108462 PARAMETER Experiment Name: At_Germinating_Seeds_cDNA_P Parameter: Age (day) Value: 2 vs. 0
  misc_feature: MA Experiment 108462 PARAMETER Experiment Name: At_Germinating_Seeds_cDNA_P Parameter: Tissue Value: Germinating Seeds
  misc_feature: MA Experiment ID: 108463 Result: Up-regulated in Transcription
  misc_feature: MA Experiment 108463 PARAMETER Experiment Name: At_Germinating_Seeds_cDNA_P Parameter: Age (day) Value: 3 vs. 0
  misc_feature: MA Experiment 108463 PARAMETER Experiment Name: At_Germinating_Seeds_cDNA_P Parameter: Tissue Value: Germinating Seeds
  misc_feature: MA Experiment ID: 108464 Result: Up-regulated in Transcription
  misc_feature: MA Experiment 108464 PARAMETER Experiment Name: At_Germinating_Seeds_cDNA_P Parameter: Age (day) Value: 4 vs. 0
  misc_feature: MA Experiment 108464 PARAMETER Experiment Name: At_Germinating_Seeds_cDNA_P Parameter: Tissue Value: Germinating Seeds
  misc_feature: MA Experiment ID: 108469 Result: Up-regulated in Transcription
  misc_feature: MA Experiment ID: 108488 Result: Down-regulated in Transcription
  misc_feature: MA Experiment ID: 108489 Result: Down-regulated in Transcription
  misc_feature: MA Experiment ID: 108573 Result: Up-regulated in Transcription
  misc_feature: MA Experiment 108573 PARAMETER Experiment Name: At_Drought_cDNA_P Parameter: Timepoint (hr) Value: 6
  misc_feature: MA Experiment 108573 PARAMETER Experiment Name: At_Drought_cDNA_P Parameter: Tissue Value: Aerial
  misc_feature: MA Experiment 108573 PARAMETER Experiment Name: At_Drought_cDNA_P Parameter: Treatment Value: Drought vs. No Drought
  misc_feature: MA Experiment ID: 108595 Result: Up-regulated in Transcription
  misc_feature: MA Experiment 108595 PARAMETER Experiment Name: At_Ler-pi_Ovule_cDNA_P Parameter: Plant Line Value: null
  misc_feature: MA Experiment ID: 108668 Result: Up-regulated in Transcription
  misc_feature: MA Experiment 108668 PARAMETER Experiment Name: At_2mM_SA_cDNA_P Parameter: Plant Line Value: WS
  misc_feature: MA Experiment 108668 PARAMETER Experiment Name: At_2mM_SA_cDNA_P Parameter: Timepoint (hr) Value: 6
  misc_feature: MA Experiment 108668 PARAMETER Experiment Name: At_2mM_SA_cDNA_P Parameter: Treatment Value: 2mM SA vs. No Treatment
  misc_feature: MA Experiment ID: 20000069 Result: Up-regulated in Transcription
  misc_feature: MA Experiment 20000069 PARAMETER Experiment Name: At_100uM_ABA_Mutants_cDNA_P Parameter: Plant Line Value: CS23
  misc_feature: MA Experiment 20000069 PARAMETER Experiment Name: At_100uM_ABA_Mutants_cDNA_P Parameter: Timepoint (hr) Value: 6
  misc_feature: MA Experiment 20000069 PARAMETER Experiment Name: At_100uM_ABA_Mutants_cDNA_P Parameter: Tissue Value: Aerial
  misc_feature: MA Experiment 20000069 PARAMETER Experiment Name: At_100uM_ABA_Mutants_cDNA_P Parameter: Treatment Value: 100uM ABA vs. No Treatment
  misc_feature: MA Experiment ID: 20000071 Result: Up-regulated in Transcription
  misc_feature: MA Experiment 20000071 PARAMETER Experiment Name: At_100uM_ABA_Mutants_cDNA_P Parameter: Plant Line Value: CS8104
  misc_feature: MA Experiment 20000071 PARAMETER Experiment Name: At_100uM_ABA_Mutants_cDNA_P Parameter: Timepoint (hr) Value: 6
  misc_feature: MA Experiment 20000071 PARAMETER Experiment Name: At_100uM_ABA_Mutants_cDNA_P Parameter: Tissue Value: Aerial
  misc_feature: MA Experiment 20000071 PARAMETER Experiment Name: At_100uM_ABA_Mutants_cDNA_P Parameter: Treatment Value: 100uM ABA vs. No Treatment
  misc_feature: MA Experiment ID: 20000087 Result: Up-regulated in Transcription
  misc_feature: MA Experiment 20000087 PARAMETER Experiment Name: At_100uM_ABA_Mutants_cDNA_P Parameter: Plant Line Value: WS
  misc_feature: MA Experiment 20000087 PARAMETER Experiment Name: At_100uM_ABA_Mutants_cDNA_P Parameter: Timepoint (hr) Value: 6
  misc_feature: MA Experiment 20000087 PARAMETER Experiment Name: At_100uM_ABA_Mutants_cDNA_P Parameter: Tissue Value: Aerial
  misc_feature: MA Experiment 20000087 PARAMETER Experiment Name: At_100uM_ABA_Mutants_cDNA_P Parameter: Treatment Value: 100uM ABA vs. No Treatment
  misc_feature: MA Experiment ID: 20000089 Result: Down-regulated in Transcription
  misc_feature: MA Experiment ID: 20000144 Result: Down-regulated in Transcription
  misc_feature: MA Experiment 20000144 PARAMETER Experiment Name: At_42deg_Heat_cDNA_P Parameter: Temperature (deg C) Value: 42 vs. 22
  misc_feature: MA Experiment 20000144 PARAMETER Experiment Name: At_42deg_Heat_cDNA_P Parameter: Timepoint (hr) Value: 1
  misc_feature: MA Experiment 20000144 PARAMETER Experiment Name: At_42deg_Heat_cDNA_P Parameter: Tissue Value: Aerial
  misc_feature: MA Experiment ID: 20000182 Result: Up-regulated in Transcription
  misc_feature: MA Experiment 20000182 PARAMETER Experiment Name: At_2mM_SA_P Parameter: Age (day) Value: 14
  misc_feature: MA Experiment 20000182 PARAMETER Experiment Name: At_2mM_SA_P Parameter: Organism Value: A. thaliana
  misc_feature: MA Experiment 20000182 PARAMETER Experiment Name: At_2mM_SA_P Parameter: Plant Line Value: WS
  misc_feature: MA Experiment 20000182 PARAMETER Experiment Name: At_2mM_SA_P Parameter: Timepoint (hr) Value: 6
  misc_feature: MA Experiment 20000182 PARAMETER Experiment Name: At_2mM_SA_P Parameter: Tissue Value: Aerial
  misc_feature: MA Experiment 20000182 PARAMETER Experiment Name: At_2mM_SA_P Parameter: Treatment Value: 2mM SA vs. No Treatment
  misc_feature: MA Experiment ID: 20000184 Result: Down-regulated in Transcription
  misc_feature: MA Experiment 20000184 PARAMETER Experiment Name: At_Shoots__P Parameter: Age (day) Value: 7
  misc_feature: MA Experiment 20000184 PARAMETER Experiment Name: At_Shoots__P Parameter: Tissue Value: Shoots vs. Whole Plant
  misc_feature: MA Experiment ID: 20000185 Result: Down-regulated in Transcription
  misc_feature: MA Experiment 20000185 PARAMETER Experiment Name: At_Roots__P Parameter: Age (day) Value: 7 vs. 21
  misc_feature: MA Experiment 20000185 PARAMETER Experiment Name: At_Roots__P Parameter: Organism Value: A. thaliana
  misc_feature: MA Experiment 20000185 PARAMETER Experiment Name: At_Roots__P Parameter: Tissue Value: Roots vs. Whole Plant
  misc_feature: MA Experiment ID: 20000234 Result: Down-regulated in Transcription
  misc_feature: MA Experiment 20000234 PARAMETER Experiment Name: At_Siliques_P Parameter: Age (day) Value: 21
  misc_feature: MA Experiment 20000234 PARAMETER Experiment Name: At_Siliques_P Parameter: Organism Value: A. thaliana
  misc_feature: MA Experiment 20000234 PARAMETER Experiment Name: At_Siliques_P Parameter: Plant Line Value: WS
  misc_feature: MA Experiment 20000234 PARAMETER Experiment Name: At_Siliques_P Parameter: Tissue Value: Less Than 5mm Siliques vs. Whole Plant
  misc_feature: MA Experiment ID: 20000235 Result: Down-regulated in Transcription
  misc_feature: MA Experiment 20000235 PARAMETER Experiment Name: At_Siliques_P Parameter: Age (day) Value: 21
  misc_feature: MA Experiment 20000235 PARAMETER Experiment Name: At_Siliques_P Parameter: Organism Value: A. thaliana
  misc_feature: MA Experiment 20000235 PARAMETER Experiment Name: At_Siliques_P Parameter: Plant Line Value: WS
  misc_feature: MA Experiment 20000235 PARAMETER Experiment Name: At_Siliques_P Parameter: Tissue Value: 5-10mm Siliques vs. Whole Plant
  misc_feature: MA Experiment ID: 20000264 Result: Down-regulated in Transcription
  misc_feature: MA Experiment 20000264 PARAMETER Experiment Name: At_Open_Flower_P Parameter: Age (day) Value: 21
  misc_feature: MA Experiment 20000264 PARAMETER Experiment Name: At_Open_Flower_P Parameter: Plant Line Value: WS
  misc_feature: MA Experiment 20000264 PARAMETER Experiment Name: At_Open_Flower_P Parameter: Tissue Value: Open Flower vs. Whole Plant
  misc_feature: MA Experiment ID: 20000265 Result: Down-regulated in Transcription
  misc_feature: MA Experiment 20000265 PARAMETER Experiment Name: At_Open_Flower_P Parameter: Age (day) Value: 21
  misc_feature: MA Experiment 20000265 PARAMETER Experiment Name: At_Open_Flower_P Parameter: Plant Line Value: WS
  misc_feature: MA Experiment 20000265 PARAMETER Experiment Name: At_Open_Flower_P Parameter: Tissue Value: Closed Flower vs. Whole Plant
  misc_feature: MA Experiment ID: 20000267 Result: Up-regulated in Transcription
  misc_feature: MA Experiment 20000267 PARAMETER Experiment Name: At_Drought_P Parameter: Age (day) Value: 7
  misc_feature: MA Experiment 20000267 PARAMETER Experiment Name: At_Drought_P Parameter: Organism Value: A. thaliana
  misc_feature: MA Experiment 20000267 PARAMETER Experiment Name: At_Drought_P Parameter: Plant Line Value: WS
  misc_feature: MA Experiment 20000267 PARAMETER Experiment Name: At_Drought_P Parameter: Timepoint (hr) Value: 6
  misc_feature: MA Experiment 20000267 PARAMETER Experiment Name: At_Drought_P Parameter: Tissue Value: Whole Plant
  misc_feature: MA Experiment 20000267 PARAMETER Experiment Name: At_Drought_P Parameter: Treatment Value: Drought vs. No Drought
  misc_feature: MA Experiment ID: 20000286 Result: Down-regulated in Transcription
  misc_feature: MA Experiment 20000286 PARAMETER Experiment Name: At_Open_Flower_P Parameter: Age (day) Value: 21
  misc_feature: MA Experiment 20000286 PARAMETER Experiment Name: At_Open_Flower_P Parameter: Plant Line Value: WS
  misc_feature: MA Experiment 20000286 PARAMETER Experiment Name: At_Open_Flower_P Parameter: Tissue Value: Half Open vs. Whole Plant
  misc_feature: MA Experiment ID: 20000437 Result: Up-regulated in Transcription
  misc_feature: MA Experiment 20000437 PARAMETER Experiment Name: At_Drought_P Parameter: Age (day) Value: 8
  misc_feature: MA Experiment 20000437 PARAMETER Experiment Name: At_Drought_P Parameter: Organism Value: A. thaliana
  misc_feature: MA Experiment 20000437 PARAMETER Experiment Name: At_Drought_P Parameter: Plant Line Value: WS
  misc_feature: MA Experiment 20000437 PARAMETER Experiment Name: At_Drought_P Parameter: Timepoint (hr) Value: 24
  misc_feature: MA Experiment 20000437 PARAMETER Experiment Name: At_Drought_P Parameter: Tissue Value: Whole Plant
  misc_feature: MA Experiment 20000437 PARAMETER Experiment Name: At_Drought_P Parameter: Treatment Value: Drought vs. No Drought
  misc_feature: MA Experiment ID: 20000438 Result: Down-regulated in Transcription
  misc_feature: MA Experiment 20000438 PARAMETER Experiment Name: At_Shoots__P Parameter: Age (day) Value: 14
  misc_feature: MA Experiment 20000438 PARAMETER Experiment Name: At_Shoots__P Parameter: Tissue Value: Shoots vs. Whole Plant
  misc_feature: MA Experiment ID: 20000439 Result: Down-regulated in Transcription
  misc_feature: MA Experiment 20000439 PARAMETER Experiment Name: At_Roots__P Parameter: Age (day) Value: 14 vs. 21
  misc_feature: MA Experiment 20000439 PARAMETER Experiment Name: At_Roots__P Parameter: Organism Value: A. thaliana
  misc_feature: MA Experiment 20000439 PARAMETER Experiment Name: At_Roots__P Parameter: Tissue Value: Roots vs. Whole Plant
  misc_feature: MA Experiment ID: 20000441 Result: Up-regulated in Transcription
  misc_feature: MA Experiment 20000441 PARAMETER Experiment Name: At_1uM_BR-BRZ__P Parameter: Tissue Value: Shoot Apices
  misc_feature: MA Experiment 20000441 PARAMETER Experiment Name: At_1uM_BR-BRZ__P Parameter: Treatment Value: 1uM BR vs. No Treatment
  misc_feature: MA Experiment ID: 20000460 Result: Up-regulated in Transcription
  misc_feature: MA Experiment 20000460 PARAMETER Experiment Name: At_10percent_PEG_P Parameter: Age (day) Value: 12
  misc_feature: MA Experiment 20000460 PARAMETER Experiment Name: At_10percent_PEG_P Parameter: Organism Value: A. thaliana
  misc_feature: MA Experiment 20000460 PARAMETER Experiment Name: At_10percent_PEG_P Parameter: Plant Line Value: WS
  misc_feature: MA Experiment 20000460 PARAMETER Experiment Name: At_10percent_PEG_P Parameter: Timepoint (day) Value: 12
  misc_feature: MA Experiment 20000460 PARAMETER Experiment Name: At_10percent_PEG_P Parameter: Tissue Value: Whole Plant
  misc_feature: MA Experiment 20000460 PARAMETER Experiment Name: At_10percent_PEG_P Parameter: Treatment Value: 10percent PEG vs. No Treatment
  misc_feature: MA Experiment ID: 20000495 Result: Down-regulated in Transcription
  misc_feature: MA Experiment 20000495 PARAMETER Experiment Name: At_Guard_Cells_P Parameter: Harvest Date Value: 8/2/2002
  misc_feature: MA Experiment 20000495 PARAMETER Experiment Name: At_Guard_Cells_P Parameter: Organism Value: A. thaliana
  misc_feature: MA Experiment 20000495 PARAMETER Experiment Name: At_Guard_Cells_P Parameter: Tissue Value: Guard Cells vs. Leaves
  misc_feature: MA Experiment ID: 20000527 Result: Up-regulated in Transcription
  misc_feature: MA Experiment 20000527 PARAMETER Experiment Name: At_10percent_PEG_P Parameter: Age (day) Value: 20
  misc_feature: MA Experiment 20000527 PARAMETER Experiment Name: At_10percent_PEG_P Parameter: Organism Value: A. thaliana
  misc_feature: MA Experiment 20000527 PARAMETER Experiment Name: At_10percent_PEG_P Parameter: Plant Line Value: WS
  misc_feature: MA Experiment 20000527 PARAMETER Experiment Name: At_10percent_PEG_P Parameter: Timepoint (day) Value: 20
  misc_feature: MA Experiment 20000527 PARAMETER Experiment Name: At_10percent_PEG_P Parameter: Tissue Value: Whole Plant
  misc_feature: MA Experiment 20000527 PARAMETER Experiment Name: At_10percent_PEG_P Parameter: Treatment Value: 10percent PEG vs. No Treatment
  misc_feature: MA Experiment ID: 20000573 Result: Down-regulated in Transcription
  misc_feature: MA Experiment 20000573 PARAMETER Experiment Name: At_100uM_ABA_Mutants__P Parameter: Organism Value: A. thaliana
  misc_feature: MA Experiment 20000573 PARAMETER Experiment Name: At_100uM_ABA_Mutants__P Parameter: Plant Line Value: CS22 vs. Ler wt
  misc_feature: MA Experiment 20000573 PARAMETER Experiment Name: At_100uM_ABA_Mutants__P Parameter: Timepoint (hr) Value: N/A
  misc_feature: MA Experiment 20000573 PARAMETER Experiment Name: At_100uM_ABA_Mutants__P Parameter: Tissue Value: Whole Plant
  misc_feature: MA Experiment 20000573 PARAMETER Experiment Name: At_100uM_ABA_Mutants__P Parameter: Treatment Value: None
  misc_feature: MA Experiment ID: 20000574 Result: Down-regulated in Transcription
  misc_feature: MA Experiment 20000574 PARAMETER Experiment Name: At_100uM_ABA_Mutants__P Parameter: Organism Value: A. thaliana
  misc_feature: MA Experiment 20000574 PARAMETER Experiment Name: At_100uM_ABA_Mutants__P Parameter: Plant Line Value: CS23 vs. Ler wt
  misc_feature: MA Experiment 20000574 PARAMETER Experiment Name: At_100uM_ABA_Mutants__P Parameter: Timepoint (hr) Value: N/A
  misc_feature: MA Experiment 20000574 PARAMETER Experiment Name: At_100uM_ABA_Mutants__P Parameter: Tissue Value: Whole Plant
  misc_feature: MA Experiment 20000574 PARAMETER Experiment Name: At_100uM_ABA_Mutants__P Parameter: Treatment Value: None
  misc_feature: MA Experiment ID: 20000794 Result: Down-regulated in Transcription
  misc_feature: MA Experiment 20000794 PARAMETER Experiment Name: At_Petals_P Parameter: Age (day) Value: 23-25 days
  misc_feature: MA Experiment 20000794 PARAMETER Experiment Name: At_Petals_P Parameter: Plant Line Value: WS
  misc_feature: MA Experiment 20000794 PARAMETER Experiment Name: At_Petals_P Parameter: Tissue Value: Petals vs. Whole plant
  misc_feature: MA Experiment ID: 20001757 Result: Down-regulated in Transcription
  misc_feature: MA Experiment 20001757 PARAMETER Experiment Name: At_50mM_NH4NO3_L-to-H_P Parameter: Timepoint (hr) Value: 6
  misc_feature: MA Experiment 20001757 PARAMETER Experiment Name: At_50mM_NH4NO3_L-to-H_P Parameter: Tissue Value: Leaf
  misc_feature: MA Experiment 20001757 PARAMETER Experiment Name: At_50mM_NH4NO3_L-to-H_P Parameter: Treatment Value: 50mM NH4NO3 vs 100mM Mannitol
  misc_feature: MA Experiment ID: 20001905 Result: Up-regulated in Transcription
  misc_feature: MA Experiment 20001905 PARAMETER Experiment Name: At_Drought_Reproduction_P Parameter: Age (day) Value: 40
  misc_feature: MA Experiment 20001905 PARAMETER Experiment Name: At_Drought_Reproduction_P Parameter: Organism Value: A. thaliana
  misc_feature: MA Experiment 20001905 PARAMETER Experiment Name: At_Drought_Reproduction_P Parameter: Plant Line Value: WS
  misc_feature: MA Experiment 20001905 PARAMETER Experiment Name: At_Drought_Reproduction_P Parameter: Timepoint (day) Value: 10
  misc_feature: MA Experiment 20001905 PARAMETER Experiment Name: At_Drought_Reproduction_P Parameter: Tissue Value: Rosettes
  misc_feature: MA Experiment 20001905 PARAMETER Experiment Name: At_Drought_Reproduction_P Parameter: Treatment Value: Drought vs. No Drought
  misc_feature: MA Experiment ID: 20001911 Result: Up-regulated in Transcription
  misc_feature: MA Experiment 20001911 PARAMETER Experiment Name: At_Drought_Reproduction_P Parameter: Age (day) Value: 40
  misc_feature: MA Experiment 20001911 PARAMETER Experiment Name: At_Drought_Reproduction_P Parameter: Organism Value: A. thaliana
  misc_feature: MA Experiment 20001911 PARAMETER Experiment Name: At_Drought_Reproduction_P Parameter: Plant Line Value: WS
  misc_feature: MA Experiment 20001911 PARAMETER Experiment Name: At_Drought_Reproduction_P Parameter: Timepoint (day) Value: 10
  misc_feature: MA Experiment 20001911 PARAMETER Experiment Name: At_Drought_Reproduction_P Parameter: Tissue Value: Flowers
  misc_feature: MA Experiment 20001911 PARAMETER Experiment Name: At_Drought_Reproduction_P Parameter: Treatment Value: Drought vs. No Drought
atgatgtcctcacaaacttcttcacataacaaactcatcaaacttcctcagcgtttctttttcttacataaacaatttttcttacataaacaaatcttgttgtttgttgttgtcatggcaccgacagttaaaacggcggccgtcaaaaccaacgaaggtaacggagtccgttacagaggagtgaggaagagaccatggggacgttacgcagccgagatcagagatcctttcaagaagtcacgtgtctggctcggtactttcgacactcctgaagaagccgctcgtgcctacgacaaacgtgctattgagtttcgtggagctaaagccaaaaccaacttcccttgttacaacatcaacgcccactgcttgagtttgacacagagcctgagccagagcagcaccgtggaatcatcgtttcctaatctcaacctcggatctgactctgttagttcgagattcccttttcctaagattcaggttaaggctgggatgatggtgttcgatgaaaggagtgaatcggattcttcgtcggtggtgatggatgtcgttagatatgaaggacgacgtgtggttttggacttggatcttaatttccctcctccacctgagaactgattaagatttaattatgattattagatataattaaatgtttctgaattgagtattatttgatcatcatctaagtagaagctttaagtttaagtggtgccaataattttttttttttttttggtcatcagcagatagttttaaagaattttttagtgttgagatcgtgtttcgttcagatctgctgatgttcttttaaatatcattaatgataatcctgatcaactaaaatgatactttgtt

SEQ ID NO: 20879 - protein, 204 aa, Arabidopsis thaliana
  peptide (1)..(204): Ceres Seq. ID no. 12332388
  misc_feature (55)..(119): Pfam Name: AP2 domain Pfam Description: AP2 domain
  misc_feature (39)..(203): Homolog of NCBI NO: 15219215 NR Description: ethylene responsive element binding factor 8
  misc_feature (43)..(138): Homolog of NCBI NO: 8809573 NR Description: ethylene-responsive element binding factor
  misc_feature (39)..(163): Homolog of NCBI NO: 2281635 NR Description: AP2 domain containing protein RAP2.5 [Arabidopsis
  misc_feature (51)..(140): Homolog of NCBI NO: 20340233 NR Description: ethylene responsive element binding factor 4-like
  misc_feature (39)..(138): Homolog of NCBI NO: 4099914 NR Description: ethylene-responsive element binding protein
  misc_feature (39)..(138): Homolog of NCBI NO: 4099921 NR Description: EREBP-3 homolog [Stylosanthes hamata]
  misc_feature (149)..(203): Homolog of NCBI NO: 15232526 NR Description: ethylene responsive element binding factor 4
  misc_feature (39)..(163): Homolog of NCBI NO: 15232526 NR Description: ethylene responsive element binding factor 4
  misc_feature (39)..(204): Homolog of NCBI NO: 15218649 NR Description: ethylene-responsive element binding factor
  misc_feature (1)..(204): Homolog of NCBI NO: 25403338 NR Description: protein F3M18.20 [imported] - Arabidopsis
MMSSQTSSHNKLIKLPQRFFFLHKQFFLHKQILLFVVVMAPTVKTAAVKTNEGNGVRYRGVRKRPWGRYAAEIRDPFKKSRVWLGTFDTPEEAARAYDKRAIEFRGAKAKTNFPCYNINAHCLSLTQSLSQSSTVESSFPNLNLGSDSVSSRFPFPKIQVKAGMMVFDERSESDSSSVVMDVVRYEGRRVVLDLDLNFPPPPEN

SEQ ID NO: 20880 - protein, 203 aa, Arabidopsis thaliana
  peptide (1)..(203): Ceres Seq. ID no. 12332389
  misc_feature (54)..(118): Pfam Name: AP2 domain Pfam Description: AP2 domain
  misc_feature (38)..(202): Homolog of NCBI NO: 15219215 NR Description: ethylene responsive element binding factor 8
  misc_feature (42)..(137): Homolog of NCBI NO: 8809573 NR Description: ethylene-responsive element binding factor
  misc_feature (38)..(162): Homolog of NCBI NO: 2281635 NR Description: AP2 domain containing protein RAP2.5 [Arabidopsis
  misc_feature (50)..(139): Homolog of NCBI NO: 20340233 NR Description: ethylene responsive element binding factor 4-like
  misc_feature (38)..(137): Homolog of NCBI NO: 4099914 NR Description: ethylene-responsive element binding protein
  misc_feature (38)..(137): Homolog of NCBI NO: 4099921 NR Description: EREBP-3 homolog [Stylosanthes hamata]
  misc_feature (148)..(202): Homolog of NCBI NO: 15232526 NR Description: ethylene responsive element binding factor 4
  misc_feature (38)..(162): Homolog of NCBI NO: 15232526 NR Description: ethylene responsive element binding factor 4
  misc_feature (38)..(203): Homolog of NCBI NO: 15218649 NR Description: ethylene-responsive element binding factor
  misc_feature (1)..(203): Homolog of NCBI NO: 25403338 NR Description: protein F3M18.20 [imported] - Arabidopsis
MSSQTSSHNKLIKLPQRFFFLHKQFFLHKQILLFVVVMAPTVKTAAVKTNEGNGVRYRGVRKRPWGRYAAEIRDPFKKSRVWLGTFDTPEEAARAYDKRAIEFRGAKAKTNFPCYNINAHCLSLTQSLSQSSTVESSFPNLNLGSDSVSSRFPFPKIQVKAGMMVFDERSESDSSSVVMDVVRYEGRRVVLDLDLNFPPPPEN

SEQ ID NO: 20881 - protein, 166 aa, Arabidopsis thaliana
  peptide (1)..(166): Ceres Seq. ID no. 12332390
  misc_feature (17)..(81): Pfam Name: AP2 domain Pfam Description: AP2 domain
  misc_feature (1)..(165): Homolog of NCBI NO: 15219215 NR Description: ethylene responsive element binding factor 8
  misc_feature (5)..(100): Homolog of NCBI NO: 8809573 NR Description: ethylene-responsive element binding factor
  misc_feature (1)..(125): Homolog of NCBI NO: 2281635 NR Description: AP2 domain containing protein RAP2.5 [Arabidopsis
  misc_feature (13)..(102): Homolog of NCBI NO: 20340233 NR Description: ethylene responsive element binding factor 4-like
  misc_feature (1)..(100): Homolog of NCBI NO: 4099914 NR Description: ethylene-responsive element binding protein
  misc_feature (1)..(100): Homolog of NCBI NO: 4099921 NR Description: EREBP-3 homolog [Stylosanthes hamata]
  misc_feature (111)..(165): Homolog of NCBI NO: 15232526 NR Description: ethylene responsive element binding factor 4
  misc_feature (1)..(125): Homolog of NCBI NO: 15232526 NR Description: ethylene responsive element binding factor 4
  misc_feature (1)..(166): Homolog of NCBI NO: 15218649 NR Description: ethylene-responsive element binding factor
  misc_feature (1)..(166): Homolog of NCBI NO: 25403338 NR Description: protein F3M18.20 [imported] - Arabidopsis
MAPTVKTAAVKTNEGNGVRYRGVRKRPWGRYAAEIRDPFKKSRVWLGTFDTPEEAARAYDKRAIEFRGAKAKTNFPCYNINAHCLSLTQSLSQSSTVESSFPNLNLGSDSVSSRFPFPKIQVKAGMMVFDERSESDSSSVVMDVVRYEGRRVVLDLDLNFPPPPEN

SEQ ID NO: 20882 - DNA, 1038 bp, Arabidopsis thaliana
  misc_feature (1)..(1038): Ceres Seq. ID no. 13490394
  misc_feature: MA Experiment ID: 108573 Result: Up-regulated in Transcription
  misc_feature: MA Experiment 108573 PARAMETER Experiment Name: At_Drought_cDNA_P Parameter: Timepoint (hr) Value: 6
  misc_feature: MA Experiment 108573 PARAMETER Experiment Name: At_Drought_cDNA_P Parameter: Tissue Value: Aerial
  misc_feature: MA Experiment 108573 PARAMETER Experiment Name: At_Drought_cDNA_P Parameter: Treatment Value: Drought vs. No Drought
  misc_feature: MA Experiment ID: 20000071 Result: Up-regulated in Transcription
  misc_feature: MA Experiment 20000071 PARAMETER Experiment Name: At_100uM_ABA_Mutants_cDNA_P Parameter: Plant Line Value: CS8104
  misc_feature: MA Experiment 20000071 PARAMETER Experiment Name: At_100uM_ABA_Mutants_cDNA_P Parameter: Timepoint (hr) Value: 6
  misc_feature: MA Experiment 20000071 PARAMETER Experiment Name: At_100uM_ABA_Mutants_cDNA_P Parameter: Tissue Value: Aerial
  misc_feature: MA Experiment 20000071 PARAMETER Experiment Name: At_100uM_ABA_Mutants_cDNA_P Parameter: Treatment Value: 100uM ABA vs. No Treatment
  misc_feature: MA Experiment ID: 20000111 Result: Up-regulated in Transcription
  misc_feature: MA Experiment 20000111 PARAMETER Experiment Name: At_42deg_Heat_cDNA_P Parameter: Temperature (deg C) Value: 42 vs. 22
  misc_feature: MA Experiment 20000111 PARAMETER Experiment Name: At_42deg_Heat_cDNA_P Parameter: Timepoint (hr) Value: 6
  misc_feature: MA Experiment 20000111 PARAMETER Experiment Name: At_42deg_Heat_cDNA_P Parameter: Tissue Value: Aerial
  misc_feature: MA Experiment ID: 20000113 Result: Up-regulated in Transcription
  misc_feature: MA Experiment 20000113 PARAMETER Experiment Name: At_42deg_Heat_cDNA_P Parameter: Temperature (deg C) Value: 42 vs. 22
  misc_feature: MA Experiment 20000113 PARAMETER Experiment Name: At_42deg_Heat_cDNA_P Parameter: Timepoint (hr) Value: 8
  misc_feature: MA Experiment 20000113 PARAMETER Experiment Name: At_42deg_Heat_cDNA_P Parameter: Tissue Value: Aerial
  misc_feature: MA Experiment ID: 20000173 Result: Up-regulated in Transcription
  misc_feature: MA Experiment 20000173 PARAMETER Experiment Name: At_42deg_Heat_P Parameter: Age (day) Value: 14
  misc_feature: MA Experiment 20000173 PARAMETER Experiment Name: At_42deg_Heat_P Parameter: Organism Value: A. thaliana
  misc_feature: MA Experiment 20000173 PARAMETER Experiment Name: At_42deg_Heat_P Parameter: Plant Line Value: WS
  misc_feature: MA Experiment 20000173 PARAMETER Experiment Name: At_42deg_Heat_P Parameter: Temperature (deg C) Value: 42 vs. 22
  misc_feature: MA Experiment 20000173 PARAMETER Experiment Name: At_42deg_Heat_P Parameter: Timepoint (hr) Value: 6
  misc_feature: MA Experiment 20000173 PARAMETER Experiment Name: At_42deg_Heat_P Parameter: Tissue Value: Aerial
  misc_feature: MA Experiment ID: 20000224 Result: Down-regulated in Transcription
  misc_feature: MA Experiment ID: 20000265 Result: Down-regulated in Transcription
  misc_feature: MA Experiment 20000265 PARAMETER Experiment Name: At_Open_Flower_P Parameter: Age (day) Value: 21
  misc_feature: MA Experiment 20000265 PARAMETER Experiment Name: At_Open_Flower_P Parameter: Plant Line Value: WS
  misc_feature: MA Experiment 20000265 PARAMETER Experiment Name: At_Open_Flower_P Parameter: Tissue Value: Closed Flower vs. Whole Plant
  misc_feature: MA Experiment ID: 20000436 Result: Up-regulated in Transcription
  misc_feature: MA Experiment 20000436 PARAMETER Experiment Name: At_Drought_P Parameter: Age (day) Value: 7
  misc_feature: MA Experiment 20000436 PARAMETER Experiment Name: At_Drought_P Parameter: Organism Value: A. thaliana
  misc_feature: MA Experiment 20000436 PARAMETER Experiment Name: At_Drought_P Parameter: Plant Line Value: WS
  misc_feature: MA Experiment 20000436 PARAMETER Experiment Name: At_Drought_P Parameter: Timepoint (hr) Value: 12
  misc_feature: MA Experiment 20000436 PARAMETER Experiment Name: At_Drought_P Parameter: Tissue Value: Whole Plant
  misc_feature: MA Experiment 20000436 PARAMETER Experiment Name: At_Drought_P Parameter: Treatment Value: Drought vs. No Drought
  misc_feature: MA Experiment ID: 20000437 Result: Up-regulated in Transcription
  misc_feature: MA Experiment 20000437 PARAMETER Experiment Name: At_Drought_P Parameter: Age (day) Value: 8
  misc_feature: MA Experiment 20000437 PARAMETER Experiment Name: At_Drought_P Parameter: Organism Value: A. thaliana
  misc_feature: MA Experiment 20000437 PARAMETER Experiment Name: At_Drought_P Parameter: Plant Line Value: WS
  misc_feature: MA Experiment 20000437 PARAMETER Experiment Name: At_Drought_P Parameter: Timepoint (hr) Value: 24
  misc_feature: MA Experiment 20000437 PARAMETER Experiment Name: At_Drought_P Parameter: Tissue Value: Whole Plant
  misc_feature: MA Experiment 20000437 PARAMETER Experiment Name: At_Drought_P Parameter: Treatment Value: Drought vs. No Drought
  misc_feature: MA Experiment ID: 20001905 Result: Up-regulated in Transcription
  misc_feature: MA Experiment 20001905 PARAMETER Experiment Name: At_Drought_Reproduction_P Parameter: Age (day) Value: 40
  misc_feature: MA Experiment 20001905 PARAMETER Experiment Name: At_Drought_Reproduction_P Parameter: Organism Value: A. thaliana
  misc_feature: MA Experiment 20001905 PARAMETER Experiment Name: At_Drought_Reproduction_P Parameter: Plant Line Value: WS
  misc_feature: MA Experiment 20001905 PARAMETER Experiment Name: At_Drought_Reproduction_P Parameter: Timepoint (day) Value: 10
  misc_feature: MA Experiment 20001905 PARAMETER Experiment Name: At_Drought_Reproduction_P Parameter: Tissue Value: Rosettes
  misc_feature: MA Experiment 20001905 PARAMETER Experiment Name: At_Drought_Reproduction_P Parameter: Treatment Value: Drought vs. No Drought
  misc_feature: MA Experiment ID: 20001910 Result: Up-regulated in Transcription
  misc_feature: MA Experiment 20001910 PARAMETER Experiment Name: At_Drought_Reproduction_P Parameter: Age (day) Value: 37
  misc_feature: MA Experiment 20001910 PARAMETER Experiment Name: At_Drought_Reproduction_P Parameter: Organism Value: A. thaliana
  misc_feature: MA Experiment 20001910 PARAMETER Experiment Name: At_Drought_Reproduction_P Parameter: Plant Line Value: WS
  misc_feature: MA Experiment 20001910 PARAMETER Experiment Name: At_Drought_Reproduction_P Parameter: Timepoint (day) Value: 7
  misc_feature: MA Experiment 20001910 PARAMETER Experiment Name: At_Drought_Reproduction_P Parameter: Tissue Value: Flowers
  misc_feature: MA Experiment 20001910 PARAMETER Experiment Name: At_Drought_Reproduction_P Parameter: Treatment Value: Drought vs. No Drought
  misc_feature: MA Experiment ID: 20001911 Result: Up-regulated in Transcription
  misc_feature: MA Experiment 20001911 PARAMETER Experiment Name: At_Drought_Reproduction_P Parameter: Age (day) Value: 40
  misc_feature: MA Experiment 20001911 PARAMETER Experiment Name: At_Drought_Reproduction_P Parameter: Organism Value: A. thaliana
  misc_feature: MA Experiment 20001911 PARAMETER Experiment Name: At_Drought_Reproduction_P Parameter: Plant Line Value: WS
  misc_feature: MA Experiment 20001911 PARAMETER Experiment Name: At_Drought_Reproduction_P Parameter: Timepoint (day) Value: 10
  misc_feature: MA Experiment 20001911 PARAMETER Experiment Name: At_Drought_Reproduction_P Parameter: Tissue Value: Flowers
  misc_feature: MA Experiment 20001911 PARAMETER Experiment Name: At_Drought_Reproduction_P Parameter: Treatment Value: Drought vs. No Drought
actcttattacttcctaaatccgatcgaaacaactgttgggttagtttctaatttccaagaatggcgcaagatcacgacgagacggagaataaaacctttgccgacgttgtcggtggcgatgatgtcggcgaaattgtcaacggaggaacaaagaatggctatcgtaaaccggactctgtggagaaggaagatgatgaggatttgaagagtctctattccttgatttgtctcacgatcggttcgattatgtttccagattcgaaaaccggtgatgcgtcttcgtttcttgaacgtgtaagaaactccgtcgctgaaaatgggcctaagcttcgagaagcttctgaaagaacaggacgcgagattcttctctggactcgtagaggcagctcgcttcgtgctctgcttgtcatcactatgggaacaatagttcttttgacaacaatggctttggttgtattcacactcttctttgtagctgcaacagccaatgctatcataatctctcttctgatttcacttgctgttgctggtggcttcttggcactcttctttctctgcttgactggtgtttacattggagccttatccgttgctgcattcgtcatctctaccgctacagtttctgctgtcgtttctgtcttaatagcttcaggttggattgggtttttctatgcggtgtggttgggaacaagaggaagcctacgcttggctaagcaatcggtttcagtggtgggatcagccatttcaggtaacactatcagtcgtcatcaacaccaagaccgggaggtaaacatcgaatcaaccaactgagaatccgtccttaccgcgtttgtaaataaaccccgacttttggttgttaatggaagcttgatataaatatgatctatggagtttgttgtgaagaagcagagaaagaatgataagaatatttcaaaatgcaacttgaaacattttgtgatcaatgtctacggatttttggatctatgtatgcatacattgtgtgttttatgtacttaagaaagaataatgatcagtag

SEQ ID NO: 20883 - protein, 249 aa, Arabidopsis thaliana
  peptide (1)..(249): Ceres Seq. ID no. 13490395
  misc_feature (27)..(239): Homolog of NCBI NO: 34905012 NR Description: P0456B03.14 [Oryza sativa (japonica
  misc_feature (1)..(249): Homolog of NCBI NO: 18418008 NR Description: expressed protein [Arabidopsis thaliana]
  misc_feature (1)..(249): Homolog of NCBI NO: 14423560 NR Description: Unknown protein [Arabidopsis thaliana]
MAQDHDETENKTFADVVGGDDVGEIVNGGTKNGYRKPDSVEKEDDEDLKSLYSLICLTIGSIMFPDSKTGDASSFLERVRNSVAENGPKLREASERTGREILLWTRRGSSLRALLVITMGTIVLLTTMALVVFTLFFVAATANAIIISLLISLAVAGGFLALFFLCLTGVYIGALSVAAFVISTATVSAVVSVLIASGWIGFFYAVWLGTRGSLRLAKQSVSVVGSAISGNTISRHQHQDREVNIESTN

SEQ ID NO: 20884 - protein, 187 aa, Arabidopsis thaliana
  peptide (1)..(187): Ceres Seq. ID no. 13490396
  misc_feature (1)..(187): Homolog of NCBI NO: 14423560 NR Description: Unknown protein [Arabidopsis thaliana]
  misc_feature (1)..(177): Homolog of NCBI NO: 34905012 NR Description: P0456B03.14 [Oryza sativa (japonica
  misc_feature (1)..(187): Homolog of NCBI NO: 18418008 NR Description: expressed protein [Arabidopsis thaliana]
MFPDSKTGDASSFLERVRNSVAENGPKLREASERTGREILLWTRRGSSLRALLVITMGTIVLLTTMALVVFTLFFVAATANAIIISLLISLAVAGGFLALFFLCLTGVYIGALSVAAFVISTATVSAVVSVLIASGWIGFFYAVWLGTRGSLRLAKQSVSVVGSAISGNTISRHQHQDREVNIESTN

SEQ ID NO: 20885 - protein, 131 aa, Arabidopsis thaliana
  peptide (1)..(131): Ceres Seq. ID no. 13490397
  misc_feature (1)..(121): Homolog of NCBI NO: 34905012 NR Description: P0456B03.14 [Oryza sativa (japonica
  misc_feature (1)..(131): Homolog of NCBI NO: 18418008 NR Description: expressed protein [Arabidopsis thaliana]
  misc_feature (1)..(131): Homolog of NCBI NO: 14423560 NR Description: Unknown protein [Arabidopsis thaliana]
MGTIVLLTTMALVVFTLFFVAATANAIIISLLISLAVAGGFLALFFLCLTGVYIGALSVAAFVISTATVSAVVSVLIASGWIGFFYAVWLGTRGSLRLAKQSVSVVGSAISGNTISRHQHQDREVNIESTN

SEQ ID NO: 20886 - DNA, 1179 bp, Arabidopsis thaliana
  misc_feature (1)..(1179): Ceres Seq. ID no. 12377405
  misc_feature: MA Experiment ID: 20000179 Result: Down-regulated in Transcription
  misc_feature: MA Experiment 20000179 PARAMETER Experiment Name: At_Germinating_Seeds_P Parameter: Age (hr) Value: 6 vs. 0
  misc_feature: MA Experiment 20000179 PARAMETER Experiment Name: At_Germinating_Seeds_P Parameter: Tissue Value: Germinating Seeds
  misc_feature: MA Experiment ID: 20000180 Result: Down-regulated in Transcription
  misc_feature: MA Experiment 20000180 PARAMETER Experiment Name: At_Germinating_Seeds_P Parameter: Age (hr) Value: 24 vs. 0
  misc_feature: MA Experiment 20000180 PARAMETER Experiment Name: At_Germinating_Seeds_P Parameter: Tissue Value: Germinating Seeds
  misc_feature: MA Experiment ID: 20000437 Result: Up-regulated in Transcription
  misc_feature: MA Experiment 20000437 PARAMETER Experiment Name: At_Drought_P Parameter: Age (day) Value: 8
  misc_feature: MA Experiment 20000437 PARAMETER Experiment Name: At_Drought_P Parameter: Organism Value: A. thaliana
  misc_feature: MA Experiment 20000437 PARAMETER Experiment Name: At_Drought_P Parameter: Plant Line Value: WS
  misc_feature: MA Experiment 20000437 PARAMETER Experiment Name: At_Drought_P Parameter: Timepoint (hr) Value: 24
  misc_feature: MA Experiment 20000437 PARAMETER Experiment Name: At_Drought_P Parameter: Tissue Value: Whole Plant
  misc_feature: MA Experiment 20000437 PARAMETER Experiment Name: At_Drought_P Parameter: Treatment Value: Drought vs. No Drought
  misc_feature: MA Experiment ID: 20001450 Result: Up-regulated in Transcription
  misc_feature: MA Experiment 20001450 PARAMETER Experiment Name: At_Far-red-induction_P Parameter: Age (day) Value: 7
  misc_feature: MA Experiment 20001450 PARAMETER Experiment Name: At_Far-red-induction_P Parameter: Light Value: Far-red vs. White
  misc_feature: MA Experiment 20001450 PARAMETER Experiment Name: At_Far-red-induction_P Parameter: Organism Value: A. thaliana
  misc_feature: MA Experiment 20001450 PARAMETER Experiment Name: At_Far-red-induction_P Parameter: Plant Line Value: Columbia
  misc_feature: MA Experiment 20001450 PARAMETER Experiment Name: At_Far-red-induction_P Parameter: Timepoint (hr) Value: 8
  misc_feature: MA Experiment 20001450 PARAMETER Experiment Name: At_Far-red-induction_P Parameter: Tissue Value: Whole Plant
  misc_feature: MA Experiment ID: 20001451 Result: Up-regulated in Transcription
  misc_feature: MA Experiment 20001451 PARAMETER Experiment Name: At_Far-red-induction_P Parameter: Age (day) Value: 7
  misc_feature: MA Experiment 20001451 PARAMETER Experiment Name: At_Far-red-induction_P Parameter: Light Value: Far-red vs. White
  misc_feature: MA Experiment 20001451 PARAMETER Experiment Name: At_Far-red-induction_P Parameter: Organism Value: A. thaliana
  misc_feature: MA Experiment 20001451 PARAMETER Experiment Name: At_Far-red-induction_P Parameter: Plant Line Value: Columbia
  misc_feature: MA Experiment 20001451 PARAMETER Experiment Name: At_Far-red-induction_P Parameter: Timepoint (hr) Value: 24
  misc_feature: MA Experiment 20001451 PARAMETER Experiment Name: At_Far-red-induction_P Parameter: Tissue Value: Whole Plant
ctctctctctctctctctctctctctctctcttgtattatttctatctcccccgccgtcgaaagagaaacgtcgatcggagaacctttgaaatgtcgactggattagatatgtctctcgacgacatgatcgccaagaaccgtaagtctcgtggtggagccggccccgctcgtggaaccggatccggatccggaccgggtccgactcgccgcaacaaccctaatcggaaatcaacccgatctgctccataccaatcagccaaggcgccggagtccacctggggtcacgacatgttctccgatagatctgaagatcaccgatcgggacgttcctccgccggaatcgaaactggaaccaagctctacatttccaatttggattacggtgtcatgaacgaagacatcaaggaactgtttgctgaagttggagaacttaaacgctacacagttcattttgatagaagtggaagatcaaagggaactgctgaagtagtgtattctcggcgtggcgatgcactcgcagctgtgaagaagtataatgatgttcagctggatggaaaacccatgaagatagagattgtgggcactaatcttcaaactgctgcagccccgtctggtagacctgcgaatggaaactccaatggtgctccatggagaggaggacaagggagaggaggtcaacaacgaggtggtggacgaggaggcggtggccgaggtggtggtggtcgtggtaggcgtcctggtaagggccctgcagagaagatttctgcggaagatcttgatgcggatcttgataagtaccattctggagatatggagacaaactaaggaacgtgactgatcttctcaaaccggtaggggttttaggaggaagagaatcgagaaaatgtttgccagaggctttaccacttagcgcctttttggctgtgttgttcatttgtttcattagaatgactttacagaattgagaatatgtgttatttaaagttgttgtctatcttaataccctcaagtgaaaggcagaggaaggaataccaatttcgtttacagatcatatgcaggcaaaagagttttcagaaatcaggtttagttacttgtattgtgtctcttatccaagccatgccttgtggtattatgagcgcagaattttgattgaatattgttcatttgcattaaagtat

SEQ ID NO: 20887 - protein, 274 aa, Arabidopsis thaliana
  peptide (1)..(274): Ceres Seq. ID no. 12377406
  misc_feature (120)..(190): Pfam Name: RNA recognition motif. (a.k.a. RRM, RBD, or RNP domain) Pfam Description: RNA recognition motif. (a.k.a. RRM, RBD, or RNP
  misc_feature (48)..(249): Homolog of NCBI NO: 30679669 NR Description: RNA and export factor binding protein, putative
  misc_feature (48)..(249): Homolog of NCBI NO: 11358209 NR Description: hypothetical protein T22P11.120 - Arabidopsis
  misc_feature (31)..(66): Homolog of NCBI NO: 30411083 NR Description: Similar to THO complex 4 [Homo sapiens]
  misc_feature (48)..(274): Homolog of NCBI NO: 30411083 NR Description: Similar to THO complex 4 [Homo sapiens]
  misc_feature (31)..(66): Homolog of NCBI NO: 6755763 NR Description: RNA and export factor binding protein 1
  misc_feature (44)..(274): Homolog of NCBI NO: 6755763 NR Description: RNA and export factor binding protein 1
  misc_feature (31)..(274): Homolog of NCBI NO: 9757916 NR Description: RNA and export factor binding protein 2-I-like
  misc_feature (31)..(274): Homolog of NCBI NO: 21555029 NR Description: transcriptional coactivator-like protein
  misc_feature (31)..(274): Homolog of NCBI NO: 30697313 NR Description: RNA and export factor binding protein, putative
  misc_feature (31)..(274): Homolog of NCBI NO: 30697310 NR Description: RNA and export factor binding protein, putative
SLSLSLSLSLLYYFYLPRRRKRNVDRRTFEMSTGLDMSLDDMIAKNRKSRGGAGPARGTGSGSGPGPTRRNNPNRKSTRSAPYQSAKAPESTWGHDMFSDRSEDHRSGRSSAGIETGTKLYISNLDYGVMNEDIKELFAEVGELKRYTVHFDRSGRSKGTAEVVYSRRGDALAAVKKYNDVQLDGKPMKIEIVGTNLQTAAAPSGRPANGNSNGAPWRGGQGRGGQQRGGGRGGGGRGGGGRGRRPGKGPAEKISAEDLDADLDKYHSGDMETN

SEQ ID NO: 20888 - protein, 244 aa, Arabidopsis thaliana
  peptide (1)..(244): Ceres Seq. ID no. 12377407
  misc_feature (90)..(160): Pfam Name: RNA recognition motif. (a.k.a. RRM, RBD, or RNP domain) Pfam Description: RNA recognition motif. (a.k.a. RRM, RBD, or RNP
  misc_feature (18)..(219): Homolog of NCBI NO: 30679669 NR Description: RNA and export factor binding protein, putative
  misc_feature (18)..(219): Homolog of NCBI NO: 11358209 NR Description: hypothetical protein T22P11.120 - Arabidopsis
  misc_feature (1)..(36): Homolog of NCBI NO: 30411083 NR Description: Similar to THO complex 4 [Homo sapiens]
  misc_feature (18)..(244): Homolog of NCBI NO: 30411083 NR Description: Similar to THO complex 4 [Homo sapiens]
  misc_feature (1)..(36): Homolog of NCBI NO: 6755763 NR Description: RNA and export factor binding protein 1
  misc_feature (14)..(244): Homolog of NCBI NO: 6755763 NR Description: RNA and export factor binding protein 1
  misc_feature (1)..(244): Homolog of NCBI NO: 9757916 NR Description: RNA and export factor binding protein 2-I-like
  misc_feature (1)..(244): Homolog of NCBI NO: 21555029 NR Description: transcriptional coactivator-like protein
  misc_feature (1)..(244): Homolog of NCBI NO: 30697313 NR Description: RNA and export factor binding protein, putative
  misc_feature (1)..(244): Homolog of NCBI NO: 30697310 NR Description: RNA and export factor binding protein, putative
MSTGLDMSLDDMIAKNRKSRGGAGPARGTGSGSGPGPTRRNNPNRKSTRSAPYQSAKAPESTWGHDMFSDRSEDHRSGRSSAGIETGTKLYISNLDYGVMNEDIKELFAEVGELKRYTVHFDRSGRSKGTAEVVYSRRGDALAAVKKYNDVQLDGKPMKIEIVGTNLQTAAAPSGRPANGNSNGAPWRGGQGRGGQQRGGGRGGGGRGGGGRGRRPGKGPAEKISAEDLDADLDKYHSGDMETN

SEQ ID NO: 20889 - protein, 238 aa, Arabidopsis thaliana
  peptide (1)..(238): Ceres Seq. ID no. 12377408
  misc_feature (84)..(154): Pfam Name: RNA recognition motif. (a.k.a. RRM, RBD, or RNP domain) Pfam Description: RNA recognition motif. (a.k.a. RRM, RBD, or RNP
  misc_feature (12)..(213): Homolog of NCBI NO: 30679669 NR Description: RNA and export factor binding protein, putative
  misc_feature (12)..(213): Homolog of NCBI NO: 11358209 NR Description: hypothetical protein T22P11.120 - Arabidopsis
  misc_feature (1)..(30): Homolog of NCBI NO: 30411083 NR Description: Similar to THO complex 4 [Homo sapiens]
  misc_feature (12)..(238): Homolog of NCBI NO: 30411083 NR Description: Similar to THO complex 4 [Homo sapiens]
  misc_feature (1)..(30): Homolog of NCBI NO: 6755763 NR Description: RNA and export factor binding protein 1
  misc_feature (8)..(238): Homolog of NCBI NO: 6755763 NR Description: RNA and export factor binding protein 1
  misc_feature (1)..(238): Homolog of NCBI NO: 9757916 NR Description: RNA and export factor binding protein 2-I-like
  misc_feature (1)..(238): Homolog of NCBI NO: 21555029 NR Description: transcriptional coactivator-like protein
  misc_feature (1)..(238): Homolog of NCBI NO: 30697313 NR Description: RNA and export factor binding protein, putative
  misc_feature (1)..(238): Homolog of NCBI NO: 30697310 NR Description: RNA and export factor binding protein, putative
MSLDDMIAKNRKSRGGAGPARGTGSGSGPGPTRRNNPNRKSTRSAPYQSAKAPESTWGHDMFSDRSEDHRSGRSSAGIETGTKLYISNLDYGVMNEDIKELFAEVGELKRYTVHFDRSGRSKGTAEVVYSRRGDALAAVKKYNDVQLDGKPMKIEIVGTNLQTAAAPSGRPANGNSNGAPWRGGQGRGGQQRGGGRGGGGRGGGGRGRRPGKGPAEKISAEDLDADLDKYHSGDMETN

SEQ ID NO: 20890 - DNA, 1007 bp, Arabidopsis thaliana
  misc_feature (1)..(1007): Ceres Seq. ID no. 12325471
  misc_feature: MA Experiment ID: 108434 Result: Up-regulated in Transcription
  misc_feature: MA Experiment 108434 PARAMETER Experiment Name: At_Root_Tips_cDNA_P Parameter: Tissue Value: Root Tips
  misc_feature: MA Experiment ID: 20000224 Result: Down-regulated in Transcription
  misc_feature: MA Experiment ID: 20000794 Result: Down-regulated in Transcription
  misc_feature: MA Experiment 20000794 PARAMETER Experiment Name: At_Petals_P Parameter: Age (day) Value: 23-25 days
  misc_feature: MA Experiment 20000794 PARAMETER Experiment Name: At_Petals_P Parameter: Plant Line Value: WS
  misc_feature: MA Experiment 20000794 PARAMETER Experiment Name: At_Petals_P Parameter: Tissue Value: Petals vs. Whole plant
agaaacctcttcttcttcaatttcacagcttcacgtcgtcgtctttgagtcgccggagctgtagctactgatttggtaccagaaagagagtgcgacggtggacgatgacgctttttcacttcttcaactgtgcgattctcacattcggtcctcacgcggtctactactccgccactcccttatctgaatatgatacacttggaacctccgtgaaagctgctgttgtttaccttgctactgcattggttaagcttgtttgtttggcgacttttctgcaagtgtctgagactgaagtgtttgacccataccaggaagcattgaaagcgatgattggattcatagatgtcgctggtctgtattatgctctggcccagctgactcacaggaacatctcccaaaaccataagtttcaggctgttggtctcgggtgggcattcgcggattctgttttgcacaggttggcacctctctgggttggtgctcgaggactggagttcacttgggattatgttttgcaagggcttgaagccaatgcaaatctggtgttcacgatatctctagctgcactaggttcattaatgtggctacgcaagaacaagccgaagagtctgatccccatcatatacacatgtgcagtcatcattgcgacaatgccttcgatcacaagctatctaaagagagtcaatggatggcatttcccgaaaattgttgggtttgagctggcgacttctctggtaatggcttttatcagttgtcaactcttcatcctctgtcagagaccgtctttgtgagtgattccacttcccagcagagctttttgttaatgggaaactcttgcgacgcacttgccttgttttctgcaggactcggttccatggaaactttgatctttcccatctttatttgtagaagaatattgaaccatcctttcataacttattgatttgggaagtgtcattcgttagagcatagacttagaatcataattactaagagatgtttatctc

SEQ ID NO: 20891 - protein, 228 aa, Arabidopsis thaliana
  peptide (1)..(228): Ceres Seq. ID no. 12325472
  misc_feature (1)..(154): Homolog of NCBI NO: 14249166 NR Description: seven transmembrane domain protein [Homo sapiens]
  misc_feature (1)..(154): Homolog of NCBI NO: 12841501 NR Description: unnamed protein product [Mus musculus]
  misc_feature (1)..(220): Homolog of NCBI NO: 7511137 NR Description: hypothetical protein ZK418.5 - Caenorhabditis
  misc_feature (1)..(216): Homolog of NCBI NO: 39593965 NR Description: Hypothetical protein CBG16516 [Caenorhabditis
  misc_feature (1)..(220): Homolog of NCBI NO: 17556931 NR Description: Seven transmembrane domain protein like (25.0 kD)
  misc_feature (109)..(146): Homolog of NCBI NO: 15220273 NR Description: cytochrome P450, putative; protein id:
  misc_feature (170)..(228): Homolog of NCBI NO: 15220273 NR Description: cytochrome P450, putative; protein id:
  misc_feature (1)..(108): Homolog of NCBI NO: 31415927 NR Description: unknown protein [Oryza sativa (japonica
  misc_feature (1)..(226): Homolog of NCBI NO: 31415928 NR Description: unknown protein [Oryza sativa (japonica
  misc_feature (1)..(228): Homolog of NCBI NO: 18401831 NR Description: expressed protein
  misc_feature (1)..(154): Homolog of NCBI NO: 14249166 NR Description: seven transmembrane domain protein [Homo sapiens]
  misc_feature (1)..(154): Homolog of NCBI NO: 12841501 NR Description: unnamed protein product [Mus musculus]
  misc_feature (1)..(220): Homolog of NCBI NO: 7511137 NR Description: hypothetical protein ZK418.5 - Caenorhabditis
  misc_feature (1)..(216): Homolog of NCBI NO: 39593965 NR Description: Hypothetical protein CBG16516 [Caenorhabditis
  misc_feature (1)..(220): Homolog of NCBI NO: 17556931 NR Description: Seven transmembrane domain protein like (25.0 kD)
  misc_feature (109)..(146): Homolog of NCBI NO: 15220273 NR Description: cytochrome P450, putative; protein id:
  misc_feature (170)..(228): Homolog of NCBI NO: 15220273 NR Description: cytochrome P450, putative; protein id:
  misc_feature (1)..(108): Homolog of NCBI NO: 31415927 NR Description: unknown protein [Oryza sativa (japonica
  misc_feature (1)..(226): Homolog of NCBI NO: 31415928 NR Description: unknown protein [Oryza sativa (japonica
  misc_feature (1)..(228): Homolog of NCBI NO: 18401831 NR Description: expressed protein
MTLFHFFNCAILTFGPHAVYYSATPLSEYDTLGTSVKAAVVYLATALVKLVCLATFLQVSETEVFDPYQEALKAMIGFIDVAGLYYALAQLTHRNISQNHKFQAVGLGWAFADSVLHRLAPLWVGARGLEFTWDYVLQGLEANANLVFTISLAALGSLMWLRKNKPKSLIPIIYTCAVIIATMPSITSYLKRVNGWHFPKIVGFELATSLVMAFISCQLFILCQRPSL

SEQ ID NO: 20892 - protein, 154 aa, Arabidopsis thaliana
  peptide (1)..(154): Ceres Seq. ID no. 12325473
  misc_feature (1)..(80): Homolog of NCBI NO: 14249166 NR Description: seven transmembrane domain protein [Homo sapiens]
  misc_feature (1)..(80): Homolog of NCBI NO: 12841501 NR Description: unnamed protein product [Mus musculus]
  misc_feature (1)..(146): Homolog of NCBI NO: 7511137 NR Description: hypothetical protein ZK418.5 - Caenorhabditis
  misc_feature (1)..(142): Homolog of NCBI NO: 39593965 NR Description: Hypothetical protein CBG16516 [Caenorhabditis
  misc_feature (1)..(146): Homolog of NCBI NO: 17556931 NR Description: Seven transmembrane domain protein like (25.0 kD)
  misc_feature (35)..(72): Homolog of NCBI NO: 15220273 NR Description: cytochrome P450, putative; protein id:
  misc_feature (96)..(154): Homolog of NCBI NO: 15220273 NR Description: cytochrome P450, putative; protein id:
  misc_feature (1)..(34): Homolog of NCBI NO: 31415927 NR Description: unknown protein [Oryza sativa (japonica
  misc_feature (1)..(152): Homolog of NCBI NO: 31415928 NR Description: unknown protein [Oryza sativa (japonica
  misc_feature (1)..(154): Homolog of NCBI NO: 18401831 NR Description: expressed protein
  misc_feature (1)..(80): Homolog of NCBI NO: 14249166 NR Description: seven transmembrane domain protein [Homo sapiens]
  misc_feature (1)..(80): Homolog of NCBI NO: 12841501 NR Description: unnamed protein product [Mus musculus]
  misc_feature (1)..(146): Homolog of NCBI NO: 7511137 NR Description: hypothetical protein ZK418.5 - Caenorhabditis
  misc_feature (1)..(142): Homolog of NCBI NO: 39593965 NR Description: Hypothetical protein CBG16516 [Caenorhabditis
  misc_feature (1)..(146): Homolog of NCBI NO: 17556931 NR Description: Seven transmembrane domain protein like (25.0 kD)
  misc_feature (35)..(72): Homolog of NCBI NO: 15220273 NR Description: cytochrome P450, putative; protein id:
  misc_feature (96)..(154): Homolog of NCBI NO: 15220273 NR Description: cytochrome P450, putative; protein id:
  misc_feature (1)..(34): Homolog of NCBI NO: 31415927 NR Description: unknown protein [Oryza sativa (japonica
  misc_feature (1)..(152): Homolog of NCBI NO: 31415928 NR Description: unknown protein [Oryza sativa (japonica
  misc_feature (1)..(154): Homolog of NCBI NO: 18401831 NR Description: expressed protein
MIGFIDVAGLYYALAQLTHRNISQNHKFQAVGLGWAFADSVLHRLAPLWVGARGLEFTWDYVLQGLEANANLVFTISLAALGSLMWLRKNKPKSLIPIIYTCAVIIATMPSITSYLKRVNGWHFPKIVGFELATSLVMAFISCQLFILCQRPSL

SEQ ID NO: 20893 - DNA, 757 bp, Arabidopsis thaliana
  misc_feature (1)..(757): Ceres Seq. ID no. 12347035
  misc_feature: MA Experiment ID: 108576 Result: Down-regulated in Transcription
  misc_feature: MA Experiment 108576 PARAMETER Experiment Name: At_42deg_Heat_cDNA_P Parameter: Temperature (deg C) Value: 42 vs. 22
  misc_feature: MA Experiment 108576 PARAMETER Experiment Name: At_42deg_Heat_cDNA_P Parameter: Timepoint (hr) Value: 1
  misc_feature: MA Experiment 108576 PARAMETER Experiment Name: At_42deg_Heat_cDNA_P Parameter: Tissue Value: Aerial
  misc_feature: MA Experiment ID: 108577 Result: Down-regulated in Transcription
  misc_feature: MA Experiment 108577 PARAMETER Experiment Name: At_42deg_Heat_cDNA_P Parameter: Temperature (deg C) Value: 42 vs. 22
  misc_feature: MA Experiment 108577 PARAMETER Experiment Name: At_42deg_Heat_cDNA_P Parameter: Timepoint (hr) Value: 6
  misc_feature: MA Experiment 108577 PARAMETER Experiment Name: At_42deg_Heat_cDNA_P Parameter: Tissue Value: Aerial
  misc_feature: MA Experiment ID: 108579 Result: Up-regulated in Transcription
  misc_feature: MA Experiment 108579 PARAMETER Experiment Name: At_4deg_Cold_cDNA_P Parameter: Temperature (deg C) Value: 4 vs. 22
  misc_feature: MA Experiment 108579 PARAMETER Experiment Name: At_4deg_Cold_cDNA_P Parameter: Timepoint (hr) Value: 6
  misc_feature: MA Experiment 108579 PARAMETER Experiment Name: At_4deg_Cold_cDNA_P Parameter: Tissue Value: Aerial
  misc_feature: MA Experiment ID: 108585 Result: Down-regulated in Transcription
  misc_feature: MA Experiment 108585 PARAMETER Experiment Name: At_5mM_NaNP_cDNA_P Parameter: Timepoint (hr) Value: 6
  misc_feature: MA Experiment 108585 PARAMETER Experiment Name: At_5mM_NaNP_cDNA_P Parameter: Tissue Value: Aerial
  misc_feature: MA Experiment 108585 PARAMETER Experiment Name: At_5mM_NaNP_cDNA_P Parameter: Treatment Value: null
  misc_feature: MA Experiment ID: 108595 Result: Down-regulated in Transcription
  misc_feature: MA Experiment 108595 PARAMETER Experiment Name: At_Ler-pi_Ovule_cDNA_P Parameter: Plant Line Value: null
  misc_feature: MA Experiment ID: 20000171 Result: Down-regulated in Transcription
  misc_feature: MA Experiment 20000171 PARAMETER Experiment Name: At_42deg_Heat_P Parameter: Age (day) Value: 14
  misc_feature: MA Experiment 20000171 PARAMETER Experiment Name: At_42deg_Heat_P Parameter: Organism Value: A. thaliana
  misc_feature: MA Experiment 20000171 PARAMETER Experiment Name: At_42deg_Heat_P Parameter: Plant Line Value: WS
  misc_feature: MA Experiment 20000171 PARAMETER Experiment Name: At_42deg_Heat_P Parameter: Temperature (deg C) Value: 42 vs. 22
  misc_feature: MA Experiment 20000171 PARAMETER Experiment Name: At_42deg_Heat_P Parameter: Timepoint (hr) Value: 1
  misc_feature: MA Experiment 20000171 PARAMETER Experiment Name: At_42deg_Heat_P Parameter: Tissue Value: Aerial
  misc_feature: MA Experiment ID: 20000173 Result: Down-regulated in Transcription
  misc_feature: MA Experiment 20000173 PARAMETER Experiment Name: At_42deg_Heat_P Parameter: Age (day) Value: 14
  misc_feature: MA Experiment 20000173 PARAMETER Experiment Name: At_42deg_Heat_P Parameter: Organism Value: A. thaliana
  misc_feature: MA Experiment 20000173 PARAMETER Experiment Name: At_42deg_Heat_P Parameter: Plant Line Value: WS
  misc_feature: MA Experiment 20000173 PARAMETER Experiment Name: At_42deg_Heat_P Parameter: Temperature (deg C) Value: 42 vs. 22
  misc_feature: MA Experiment 20000173 PARAMETER Experiment Name: At_42deg_Heat_P Parameter: Timepoint (hr) Value: 6
  misc_feature: MA Experiment 20000173 PARAMETER Experiment Name: At_42deg_Heat_P Parameter: Tissue Value: Aerial
  misc_feature: MA Experiment ID: 20000179 Result: Up-regulated in Transcription
  misc_feature: MA Experiment 20000179 PARAMETER Experiment Name: At_Germinating_Seeds_P Parameter: Age (hr) Value: 6 vs. 0
  misc_feature: MA Experiment 20000179 PARAMETER Experiment Name: At_Germinating_Seeds_P Parameter: Tissue Value: Germinating Seeds
  misc_feature: MA Experiment ID: 20000180 Result: Up-regulated in Transcription
  misc_feature: MA Experiment 20000180 PARAMETER Experiment Name: At_Germinating_Seeds_P Parameter: Age (hr) Value: 24 vs. 0
  misc_feature: MA Experiment 20000180 PARAMETER Experiment Name: At_Germinating_Seeds_P Parameter: Tissue Value: Germinating Seeds
  misc_feature: MA Experiment ID: 20000182 Result: Down-regulated in Transcription
  misc_feature: MA Experiment 20000182 PARAMETER Experiment Name: At_2mM_SA_P Parameter: Age (day) Value: 14
  misc_feature: MA Experiment 20000182 PARAMETER Experiment Name: At_2mM_SA_P Parameter: Organism Value: A. thaliana
  misc_feature: MA Experiment 20000182 PARAMETER Experiment Name: At_2mM_SA_P Parameter: Plant Line Value: WS
  misc_feature: MA Experiment 20000182 PARAMETER Experiment Name: At_2mM_SA_P Parameter: Timepoint (hr) Value: 6
  misc_feature: MA Experiment 20000182 PARAMETER Experiment Name: At_2mM_SA_P Parameter: Tissue Value: Aerial
  misc_feature: MA Experiment 20000182 PARAMETER Experiment Name: At_2mM_SA_P Parameter: Treatment Value: 2mM SA vs. No Treatment
  misc_feature: MA Experiment ID: 20000184 Result: Up-regulated in Transcription
  misc_feature: MA Experiment 20000184 PARAMETER Experiment Name: At_Shoots__P Parameter: Age (day) Value: 7
  misc_feature: MA Experiment 20000184 PARAMETER Experiment Name: At_Shoots__P Parameter: Tissue Value: Shoots vs. Whole Plant
  misc_feature: MA Experiment ID: 20000227 Result: Up-regulated in Transcription
  misc_feature: MA Experiment 20000227 PARAMETER Experiment Name: At_Root-Tips-vs-Tops_P Parameter: Tissue Value: Root Tips vs. Root Tops
  misc_feature: MA Experiment ID: 20000438 Result: Up-regulated in Transcription
  misc_feature: MA Experiment 20000438 PARAMETER Experiment Name: At_Shoots__P Parameter: Age (day) Value: 14
  misc_feature: MA Experiment 20000438 PARAMETER Experiment Name: At_Shoots__P Parameter: Tissue Value: Shoots vs. Whole Plant
  misc_feature: MA Experiment ID: 20000439 Result: Down-regulated in Transcription
  misc_feature: MA Experiment 20000439 PARAMETER Experiment Name: At_Roots__P Parameter: Age (day) Value: 14 vs. 21
  misc_feature: MA Experiment 20000439 PARAMETER Experiment Name: At_Roots__P Parameter: Organism Value: A. thaliana
  misc_feature: MA Experiment 20000439 PARAMETER Experiment Name: At_Roots__P Parameter: Tissue Value: Roots vs. Whole Plant
  misc_feature: MA Experiment ID: 20000495 Result: Down-regulated in Transcription
  misc_feature: MA Experiment 20000495 PARAMETER Experiment Name: At_Guard_Cells_P Parameter: Harvest Date Value: 8/2/2002
  misc_feature: MA Experiment 20000495 PARAMETER Experiment Name: At_Guard_Cells_P Parameter: Organism Value: A. thaliana
  misc_feature: MA Experiment 20000495 PARAMETER Experiment Name: At_Guard_Cells_P Parameter: Tissue Value: Guard Cells vs. Leaves
  misc_feature: MA Experiment ID: 20000794 Result: Down-regulated in Transcription
  misc_feature: MA Experiment 20000794 PARAMETER Experiment Name: At_Petals_P Parameter: Age (day) Value: 23-25 days
  misc_feature: MA Experiment 20000794 PARAMETER Experiment Name: At_Petals_P Parameter: Plant Line Value: WS
  misc_feature: MA Experiment 20000794 PARAMETER Experiment Name: At_Petals_P Parameter: Tissue Value: Petals vs. Whole plant
  misc_feature: MA Experiment ID: 20001451 Result: Down-regulated in Transcription
  misc_feature: MA Experiment 20001451 PARAMETER Experiment Name: At_Far-red-induction_P Parameter: Age (day) Value: 7
  misc_feature: MA Experiment 20001451 PARAMETER Experiment Name: At_Far-red-induction_P Parameter: Light Value: Far-red vs. White
  misc_feature: MA Experiment 20001451 PARAMETER Experiment Name: At_Far-red-induction_P Parameter: Organism Value: A. thaliana
  misc_feature: MA Experiment 20001451 PARAMETER Experiment Name: At_Far-red-induction_P Parameter: Plant Line Value: Columbia
  misc_feature: MA Experiment 20001451 PARAMETER Experiment Name: At_Far-red-induction_P Parameter: Timepoint (hr) Value: 24
  misc_feature: MA Experiment 20001451 PARAMETER Experiment Name: At_Far-red-induction_P Parameter: Tissue Value: Whole Plant
  misc_feature: MA Experiment ID: 20001905 Result: Down-regulated in Transcription
  misc_feature: MA Experiment 20001905 PARAMETER Experiment Name: At_Drought_Reproduction_P Parameter: Age (day) Value: 40
  misc_feature: MA Experiment 20001905 PARAMETER Experiment Name: At_Drought_Reproduction_P Parameter: Organism Value: A. thaliana
  misc_feature: MA Experiment 20001905 PARAMETER Experiment Name: At_Drought_Reproduction_P Parameter: Plant Line Value: WS
  misc_feature: MA Experiment 20001905 PARAMETER Experiment Name: At_Drought_Reproduction_P Parameter: Timepoint (day) Value: 10
  misc_feature: MA Experiment 20001905 PARAMETER Experiment Name: At_Drought_Reproduction_P Parameter: Tissue Value: Rosettes
  misc_feature: MA Experiment 20001905 PARAMETER Experiment Name: At_Drought_Reproduction_P Parameter: Treatment Value: Drought vs. No Drought
acacccaattcactcacaacctagctagctagtaaacagtattttctatataccaaaaatggcttcaagttccatagctcttttcttggctctcaatcttctctttttcacaacaatctccgcctgtggtagctgtactccgtgcggcggaggttgcccctctcccaagccaaagccaactcctaaaccaaccccaagccctagctctggctcgagcaagtgccctaaagacaccctcaagctcggtgtctgcgctaatgtgctcaacggcctcctggacttgacccttggcaagccaccggtcgagccatgctgcagcctcatccaaggactcgctgatgttgaggcagccgtttgtctctgcaccgctcttaaggctaacattcttggaatcaacttgaacctcccaatatctttaagtctactccttaatgtttgcagcaaacaacttcctcctggcttccaatgctaaaaaccatattgatatataatttaaatacacttatgtgtgtattaatttatcttcttgttttaaagagacagggtgattctctatactcttatattgtgtctttatatatcttgatctgtggtttcttctactctgcttgctctggtgttcattggggtgatccgtaagattcctgaagtttacagtttcattatttcctattatatatactcttaccattgggggtattgttgtattggtttgtattatgattctatgaattaataagaatttaacttttatgtt

SEQ ID NO: 20894 - protein, 137 aa, Arabidopsis thaliana
  peptide (1)..(137): Ceres Seq. ID no. 12347036
  misc_feature (55)..(137): Pfam Name: Protease inhibitor/seed storage/LTP family Pfam Description: Protease inhibitor/seed storage/LTP family
  misc_feature (3)..(137): Homolog of NCBI NO: 10798758 NR Description: P-rich protein Nt-SubC29 [Nicotiana tabacum]
  misc_feature (2)..(137): Homolog of NCBI NO: 7484770 NR Description: extensin like protein - black poplar
  misc_feature (3)..(132): Homolog of NCBI NO: 21360370 NR Description: extensin-like protein [Citrus junos]
  misc_feature (4)..(137): Homolog of NCBI NO: 629597 NR Description: proline-rich protein - rape
  misc_feature (3)..(137): Homolog of NCBI NO: 15221484 NR Description: similar to 14KD proline-rich protein DC2.15
  misc_feature (1)..(136): Homolog of NCBI NO: 13561927 NR Description: extensin-like protein [Brassica napus]
  misc_feature (1)..(137): Homolog of NCBI NO: 15221201 NR Description: pEARLI 1-like protein
MASSSIALFLALNLLFFTTISACGSCTPCGGGCPSPKPKPTPKPTPSPSSGSSKCPKDTLKLGVCANVLNGLLDLTLGKPPVEPCCSLIQGLADVEAAVCLCTALKANILGINLNLPISLSLLLNVCSKQLPPGFQC

SEQ ID NO: 20895 - DNA, 809 bp, Arabidopsis thaliana
  misc_feature (1)..(809): Ceres Seq. ID no. 13490058
  misc_feature: MA Experiment ID: 108433 Result: Up-regulated in Transcription
  misc_feature: MA Experiment 108433 PARAMETER Experiment Name: At_rhl_Mutant2_cDNA_P Parameter: Age (day) Value: 7
  misc_feature: MA Experiment 108433 PARAMETER Experiment Name: At_rhl_Mutant2_cDNA_P Parameter: Organism Value: A. thaliana
  misc_feature: MA Experiment 108433 PARAMETER Experiment Name: At_rhl_Mutant2_cDNA_P Parameter: Plant Line Value: rhl Mutant vs. wt landsburg
  misc_feature: MA Experiment 108433 PARAMETER Experiment Name: At_rhl_Mutant2_cDNA_P Parameter: Tissue Value: Roots
  misc_feature: MA Experiment ID: 108434 Result: Down-regulated in Transcription
  misc_feature: MA Experiment 108434 PARAMETER Experiment Name: At_Root_Tips_cDNA_P Parameter: Tissue Value: Root Tips
  misc_feature: MA Experiment ID: 108462 Result: Up-regulated in Transcription
  misc_feature: MA Experiment 108462 PARAMETER Experiment Name: At_Germinating_Seeds_cDNA_P Parameter: Age (day) Value: 2 vs. 0
  misc_feature: MA Experiment 108462 PARAMETER Experiment Name: At_Germinating_Seeds_cDNA_P Parameter: Tissue Value: Germinating Seeds
  misc_feature: MA Experiment ID: 108463 Result: Up-regulated in Transcription
  misc_feature: MA Experiment 108463 PARAMETER Experiment Name: At_Germinating_Seeds_cDNA_P Parameter: Age (day) Value: 3 vs. 0
  misc_feature: MA Experiment 108463 PARAMETER Experiment Name: At_Germinating_Seeds_cDNA_P Parameter: Tissue Value: Germinating Seeds
  misc_feature: MA Experiment ID: 108464 Result: Up-regulated in Transcription
  misc_feature: MA Experiment 108464 PARAMETER Experiment Name: At_Germinating_Seeds_cDNA_P Parameter: Age (day) Value: 4 vs. 0
  misc_feature: MA Experiment 108464 PARAMETER Experiment Name: At_Germinating_Seeds_cDNA_P Parameter: Tissue Value: Germinating Seeds
  misc_feature: MA Experiment ID: 108488 Result: Down-regulated in Transcription
  misc_feature: MA Experiment ID: 20000111 Result: Down-regulated in Transcription
  misc_feature: MA Experiment 20000111 PARAMETER Experiment Name: At_42deg_Heat_cDNA_P Parameter: Temperature (deg C) Value: 42 vs. 22
  misc_feature: MA Experiment 20000111 PARAMETER Experiment Name: At_42deg_Heat_cDNA_P Parameter: Timepoint (hr) Value: 6
  misc_feature: MA Experiment 20000111 PARAMETER Experiment Name: At_42deg_Heat_cDNA_P Parameter: Tissue Value: Aerial
  misc_feature: MA Experiment ID: 20000227 Result: Down-regulated in Transcription
  misc_feature: MA Experiment 20000227 PARAMETER Experiment Name: At_Root-Tips-vs-Tops_P Parameter: Tissue Value: Root Tips vs. Root Tops
  misc_feature: MA Experiment ID: 20001557 Result: Down-regulated in Transcription
  misc_feature: MA Experiment 20001557 PARAMETER Experiment Name: At_Drought_Soil_Dry_P Parameter: Age (day) Value: 27
  misc_feature: MA Experiment 20001557 PARAMETER Experiment Name: At_Drought_Soil_Dry_P Parameter: Organism Value: A. thaliana
  misc_feature: MA Experiment 20001557 PARAMETER Experiment Name: At_Drought_Soil_Dry_P Parameter: Plant Line Value: WS
  misc_feature: MA Experiment 20001557 PARAMETER Experiment Name: At_Drought_Soil_Dry_P Parameter: Post Timepoint (hr) Value: 3
  misc_feature: MA Experiment 20001557 PARAMETER Experiment Name: At_Drought_Soil_Dry_P Parameter: Post-Treatment Value: Re-Water vs. No Drought
  misc_feature: MA Experiment 20001557 PARAMETER Experiment Name: At_Drought_Soil_Dry_P Parameter: Timepoint (day) Value: 13
  misc_feature: MA Experiment 20001557 PARAMETER Experiment Name: At_Drought_Soil_Dry_P Parameter: Treatment Value: Drought vs. No Drought
agcattcctgtttgcaagagaatcacaaatctttgcttacggttcacgctttaaaaacacaactctcattctccttctcttcacaaaccactcatattttttttcacatacttctttgtagtgctactttccattatatcaaacactcagcaacctgatggcaacgagacggatattgaaagaattgaaggagttgcaaagagaccctcctgtatcatgcagtgcaggtccaacaggagaagatatgttccactggcaagctactataatgggtccgaatgaaagtccttactccggaggtgttttccttgtcaatattcatttccctcctgattatccttttaaacctcccaaggttgtattcagaaccaaagtgtttcacccaaacatcaacagtaatggaaacatatgtttggacattctcaaagaccaatggagccctgcccttaccatttctaaggtgcttctctctatatgctctcttctaacagatccaaaccctgacgaccctctggtgccagagatagctcacatatacaaaactgacaagaccaaatatgaagccatggctcgaagctggacccagaagtatgccttgttttaaagctcacaattcctctttttttcctttttattttggtttggtcttatttgtaataaaaaaagaagaagaagaaattgttataattttaatacaaacatatataatatataaagtagagttttcaaagttgttaactcatatgattgatgagatatcgacatgtattaaatctaattttgttaatatataaaaaatcttctaactc

SEQ ID NO: 20896 - protein, 148 aa, Arabidopsis thaliana
  peptide (1)..(148): Ceres Seq. ID no. 13490059
  misc_feature (1)..(147): Homolog of NCBI NO: 11762186 NR Description: AT4g27960 [Arabidopsis thaliana]
  misc_feature (1)..(147): Homolog of NCBI NO: 18417097 NR Description: ubiquitin-conjugating enzyme 9 (UBC9)
  misc_feature (1)..(147): Homolog of NCBI NO: 30693863 NR Description: ubiquitin-conjugating enzyme 8 (UBC8)
  misc_feature (1)..(147): Homolog of NCBI NO: 30687803 NR Description: ubiquitin-conjugating enzyme 9 (UBC9)
  misc_feature (1)..(147): Homolog of NCBI NO: 2668744 NR Description: ubiquitin conjugating enzyme [Zea mays]
  misc_feature (1)..(147): Homolog of NCBI NO: 5762457 NR Description: ubiquitin-conjugating enzyme UBC2
  misc_feature (1)..(147): Homolog of NCBI NO: 40287554 NR Description: ubiquitin-conjugating enzyme 8 [Capsicum annuum]
  misc_feature (1)..(147): Homolog of NCBI NO: 32488376 NR Description: OSJNBa0043A12.6 [Oryza sativa (japonica
  misc_feature (1)..(147): Homolog of NCBI NO: 18423494 NR Description: ubiquitin-conjugating enzyme 10 (UBC10)
  misc_feature (1)..(148): Homolog of NCBI NO: 18398199 NR Description: ubiquitin-conjugating enzyme, putative
MATRRILKELKELQRDPPVSCSAGPTGEDMFHWQATIMGPNESPYSGGVFLVNIHFPPDYPFKPPKVVFRTKVFHPNINSNGNICLDILKDQWSPALTISKVLLSICSLLTDPNPDDPLVPEIAHIYKTDKTKYEAMARSWTQKYALF

SEQ ID NO: 20897 - protein, 119 aa, Arabidopsis thaliana
  peptide (1)..(119): Ceres Seq. ID no. 13490060
  misc_feature (1)..(118): Homolog of NCBI NO: 18417097 NR Description: ubiquitin-conjugating enzyme 9 (UBC9)
  misc_feature (1)..(118): Homolog of NCBI NO: 30687803 NR Description: ubiquitin-conjugating enzyme 9 (UBC9)
  misc_feature (1)..(118): Homolog of NCBI NO: 11762186 NR Description: AT4g27960 [Arabidopsis thaliana]
  misc_feature (1)..(118): Homolog of NCBI NO: 30693863 NR Description: ubiquitin-conjugating enzyme 8 (UBC8)
  misc_feature (1)..(118): Homolog of NCBI NO: 2668744 NR Description: ubiquitin conjugating enzyme [Zea mays]
  misc_feature (1)..(118): Homolog of NCBI NO: 5762457 NR Description: ubiquitin-conjugating enzyme UBC2
  misc_feature (1)..(118): Homolog of NCBI NO: 40287554 NR Description: ubiquitin-conjugating enzyme 8 [Capsicum annuum]
  misc_feature (1)..(118): Homolog of NCBI NO: 32488376 NR Description: OSJNBa0043A12.6 [Oryza sativa (japonica
  misc_feature (1)..(118): Homolog of NCBI NO: 18423494 NR Description: ubiquitin-conjugating enzyme 10 (UBC10)
  misc_feature (1)..(119): Homolog of NCBI NO: 18398199 NR Description: ubiquitin-conjugating enzyme, putative
MFHWQATIMGPNESPYSGGVFLVNIHFPPDYPFKPPKVVFRTKVFHPNINSNGNICLDILKDQWSPALTISKVLLSICSLLTDPNPDDPLVPEIAHIYKTDKTKYEAMARSWTQKYALF

SEQ ID NO: 20898 - protein, 111 aa, Arabidopsis thaliana
  peptide (1)..(111): Ceres Seq. ID no. 13490061
  misc_feature (1)..(110): Homolog of NCBI NO: 30693863 NR Description: ubiquitin-conjugating enzyme 8 (UBC8)
  misc_feature (1)..(110): Homolog of NCBI NO: 18417097 NR Description: ubiquitin-conjugating enzyme 9 (UBC9)
  misc_feature (1)..(110): Homolog of NCBI NO: 30687803 NR Description: ubiquitin-conjugating enzyme 9 (UBC9)
  misc_feature (1)..(110): Homolog of NCBI NO: 11762186 NR Description: AT4g27960 [Arabidopsis thaliana]
  misc_feature (1)..(110): Homolog of NCBI NO: 2668744 NR Description: ubiquitin conjugating enzyme [Zea mays]
  misc_feature (1)..(110): Homolog of NCBI NO: 5762457 NR Description: ubiquitin-conjugating enzyme UBC2
  misc_feature (1)..(110): Homolog of NCBI NO: 40287554 NR Description: ubiquitin-conjugating enzyme 8 [Capsicum annuum]
  misc_feature (1)..(110): Homolog of NCBI NO: 32488376 NR Description: OSJNBa0043A12.6 [Oryza sativa (japonica
  misc_feature (1)..(110): Homolog of NCBI NO: 18423494 NR Description: ubiquitin-conjugating enzyme 10 (UBC10)
  misc_feature (1)..(111): Homolog of NCBI NO: 18398199 NR Description: ubiquitin-conjugating enzyme, putative
MGPNESPYSGGVFLVNIHFPPDYPFKPPKVVFRTKVFHPNINSNGNICLDILKDQWSPALTISKVLLSICSLLTDPNPDDPLVPEIAHIYKTDKTKYEAMARSWTQKYALF

SEQ ID NO: 20899 - DNA, 789 bp, Arabidopsis thaliana
  misc_feature (1)..(789): Ceres Seq. ID no. 12393420
  misc_feature: MA Experiment ID: 108434 Result: Up-regulated in Transcription
  misc_feature: MA Experiment 108434 PARAMETER Experiment Name: At_Root_Tips_cDNA_P Parameter: Tissue Value: Root Tips
agggattctagggctttccttcattggtcagatcagacgacgttttacatcttcttcttcttcctcttcgatattcgtcagtgtgtgtattttggggaaaactttgtgagcaaagagcgagaaaatgagcggagccggtaagaaaatcgcggatgtggctttcaaagcttcgaggactatcgattgggatggtatggctaaggtccttgtcacagatgaggctcgtagagagttctctaaccttcgtcgtgctttcgatgaggttaacacacagctccagaccaaatttagtcaggaacctgaacccatagattgggattactataggaagggtattggagctggcattgttgacaagtacaaggaagcttatgacagcattgagattccaaagtacgttgacaaagttactcctgaatacaagccaaagtttgatgctttgttggtggaactgaaagaagcagaacagaaatcgctcaaggagtctgaacggttggagaaagaaattgctgatgtccaagagatcagcaaaaagctcagcaccatgactgcagatgagtactttgagaagcacccggaactcaaaaagaagtttgatgacgaaatccgtaatgacaactggggatactgatcatgtttctccatctccggcttggaaagaaaactctctttctctttctctgttctcttactgtgattttgtgagccaatcataacaataataagtacaccattcacttaagcagtgttgagatcttcattccaaggaagataaacgcatttggtttt

SEQ ID NO: 20900 - protein, 168 aa, Arabidopsis thaliana; identical to SEQ ID NO: 20821
  peptide (1)..(168): Ceres Seq. ID no. 12393421
  misc_feature (15)..(152): Pfam Name: ATP synthase D chain, mitochondrial (ATP5H) Pfam Description: ATP synthase D chain, mitochondrial (ATP5H)
  misc_feature (24)..(168): Homolog of NCBI NO: 17939851 NR Description: mitochondrial F0 ATP synthase D chain
  misc_feature (1)..(168): Homolog of NCBI NO: 15231176 NR Description: putative protein

SEQ ID NO: 20901 - protein, 145 aa, Arabidopsis thaliana; identical to SEQ ID NO: 20822
  peptide (1)..(145): Ceres Seq. ID no. 12393422
  misc_feature (1)..(129): Pfam Name: ATP synthase D chain, mitochondrial (ATP5H) Pfam Description: ATP synthase D chain, mitochondrial (ATP5H)
  misc_feature (1)..(145): Homolog of NCBI NO: 17939851 NR Description: mitochondrial F0 ATP synthase D chain
  misc_feature (1)..(145): Homolog of NCBI NO: 15231176 NR Description: putative protein

SEQ ID NO: 20902 - DNA, 712 bp, Arabidopsis thaliana
  misc_feature (1)..(712): Ceres Seq. ID no. 12333121
  misc_feature: MA Experiment ID: 108433 Result: Down-regulated in Transcription
  misc_feature: MA Experiment 108433 PARAMETER Experiment Name: At_rhl_Mutant2_cDNA_P Parameter: Age (day) Value: 7
  misc_feature: MA Experiment 108433 PARAMETER Experiment Name: At_rhl_Mutant2_cDNA_P Parameter: Organism Value: A. thaliana
  misc_feature: MA Experiment 108433 PARAMETER Experiment Name: At_rhl_Mutant2_cDNA_P Parameter: Plant Line Value: rhl Mutant vs. wt landsburg
  misc_feature: MA Experiment 108433 PARAMETER Experiment Name: At_rhl_Mutant2_cDNA_P Parameter: Tissue Value: Roots
  misc_feature: MA Experiment ID: 108434 Result: Up-regulated in Transcription
  misc_feature: MA Experiment 108434 PARAMETER Experiment Name: At_Root_Tips_cDNA_P Parameter: Tissue Value: Root Tips
  misc_feature: MA Experiment ID: 108488 Result: Down-regulated in Transcription
  misc_feature: MA Experiment ID: 108573 Result: Down-regulated in Transcription
  misc_feature: MA Experiment 108573 PARAMETER Experiment Name: At_Drought_cDNA_P Parameter: Timepoint (hr) Value: 6
  misc_feature: MA Experiment 108573 PARAMETER Experiment Name: At_Drought_cDNA_P Parameter: Tissue Value: Aerial
  misc_feature: MA Experiment 108573 PARAMETER Experiment Name: At_Drought_cDNA_P Parameter: Treatment Value: Drought vs. No Drought
  misc_feature: MA Experiment ID: 108576 Result: Down-regulated in Transcription
  misc_feature: MA Experiment 108576 PARAMETER Experiment Name: At_42deg_Heat_cDNA_P Parameter: Temperature (deg C) Value: 42 vs. 22
  misc_feature: MA Experiment 108576 PARAMETER Experiment Name: At_42deg_Heat_cDNA_P Parameter: Timepoint (hr) Value: 1
  misc_feature: MA Experiment 108576 PARAMETER Experiment Name: At_42deg_Heat_cDNA_P Parameter: Tissue Value: Aerial
  misc_feature: MA Experiment ID: 108577 Result: Down-regulated in Transcription
  misc_feature: MA Experiment 108577 PARAMETER Experiment Name: At_42deg_Heat_cDNA_P Parameter: Temperature (deg C) Value: 42 vs. 22
  misc_feature: MA Experiment 108577 PARAMETER Experiment Name: At_42deg_Heat_cDNA_P Parameter: Timepoint (hr) Value: 6
  misc_feature: MA Experiment 108577 PARAMETER Experiment Name: At_42deg_Heat_cDNA_P Parameter: Tissue Value: Aerial
  misc_feature: MA Experiment ID: 20000093 Result: Down-regulated in Transcription
  misc_feature: MA Experiment 20000093 PARAMETER Experiment Name: At_42deg_Heat_cDNA_P Parameter: Temperature (deg C) Value: 42 vs. 22
  misc_feature: MA Experiment 20000093 PARAMETER Experiment Name: At_42deg_Heat_cDNA_P Parameter: Timepoint (hr) Value: 0.5
  misc_feature: MA Experiment 20000093 PARAMETER Experiment Name: At_42deg_Heat_cDNA_P Parameter: Tissue Value: Aerial
  misc_feature: MA Experiment ID: 20000111 Result: Down-regulated in Transcription
  misc_feature: MA Experiment 20000111 PARAMETER Experiment Name: At_42deg_Heat_cDNA_P Parameter: Temperature (deg C) Value: 42 vs. 22
  misc_feature: MA Experiment 20000111 PARAMETER Experiment Name: At_42deg_Heat_cDNA_P Parameter: Timepoint (hr) Value: 6
  misc_feature: MA Experiment 20000111 PARAMETER Experiment Name: At_42deg_Heat_cDNA_P Parameter: Tissue Value: Aerial
  misc_feature: MA Experiment ID: 20000112 Result: Down-regulated in Transcription
  misc_feature: MA Experiment 20000112 PARAMETER Experiment Name: At_42deg_Heat_cDNA_P Parameter: Temperature (deg C) Value: 42 vs. 22
  misc_feature: MA Experiment 20000112 PARAMETER Experiment Name: At_42deg_Heat_cDNA_P Parameter: Timepoint (hr) Value: 2
  misc_feature: MA Experiment 20000112 PARAMETER Experiment Name: At_42deg_Heat_cDNA_P Parameter: Tissue Value: Aerial
  misc_feature: MA Experiment ID: 20000144 Result: Down-regulated in Transcription
  misc_feature: MA Experiment 20000144 PARAMETER Experiment Name: At_42deg_Heat_cDNA_P Parameter: Temperature (deg C) Value: 42 vs. 22
  misc_feature: MA Experiment 20000144 PARAMETER Experiment Name: At_42deg_Heat_cDNA_P Parameter: Timepoint (hr) Value: 1
  misc_feature: MA Experiment 20000144 PARAMETER Experiment Name: At_42deg_Heat_cDNA_P Parameter: Tissue Value: Aerial
  misc_feature: MA Experiment ID: 20000306 Result: Up-regulated in Transcription
  misc_feature: MA Experiment 20000306 PARAMETER Experiment Name: At_Germinating_Seeds_Sub_P Parameter: Age (hr) Value: 6 vs. 0
  misc_feature: MA Experiment 20000306 PARAMETER Experiment Name: At_Germinating_Seeds_Sub_P Parameter: Organism Value: A. thaliana
  misc_feature: MA Experiment 20000306 PARAMETER Experiment Name: At_Germinating_Seeds_Sub_P Parameter: Plant Line Value: WS
  misc_feature: MA Experiment 20000306 PARAMETER Experiment Name: At_Germinating_Seeds_Sub_P Parameter: Tissue Value: Germinating Seeds
  misc_feature: MA Experiment ID: 20000307 Result: Up-regulated in Transcription
  misc_feature: MA Experiment 20000307 PARAMETER Experiment Name: At_Germinating_Seeds_Sub_P Parameter: Age (hr) Value: 24 vs. 0
  misc_feature: MA Experiment 20000307 PARAMETER Experiment Name: At_Germinating_Seeds_Sub_P Parameter: Organism Value: A. thaliana
  misc_feature: MA Experiment 20000307 PARAMETER Experiment Name: At_Germinating_Seeds_Sub_P Parameter: Plant Line Value: WS
  misc_feature: MA Experiment 20000307 PARAMETER Experiment Name: At_Germinating_Seeds_Sub_P Parameter: Tissue Value: Germinating Seeds
  misc_feature: MA Experiment ID: 20000327 Result: Down-regulated in Transcription
  misc_feature: MA Experiment 20000327 PARAMETER Experiment Name: At_42deg_Heat_Sub_P Parameter: Age (day) Value: 14
  misc_feature: MA Experiment 20000327 PARAMETER Experiment Name: At_42deg_Heat_Sub_P Parameter: Organism Value: A. thaliana
  misc_feature: MA Experiment 20000327 PARAMETER Experiment Name: At_42deg_Heat_Sub_P Parameter: Plant Line Value: WS
  misc_feature: MA Experiment 20000327 PARAMETER Experiment Name: At_42deg_Heat_Sub_P Parameter: Temperature (deg C) Value: 42 vs. 22
  misc_feature: MA Experiment 20000327 PARAMETER Experiment Name: At_42deg_Heat_Sub_P Parameter: Timepoint (hr) Value: 1
  misc_feature: MA Experiment 20000327 PARAMETER Experiment Name: At_42deg_Heat_Sub_P Parameter: Tissue Value: Aerial
ccgtcaaattcaattgatcctctctccaaatcatcttaaaagtatcttcttcttctccatctggtttattgttcgatcgtcaattcaattgattgatttggaaatctagcgtttctgttcgttaccattcactgaataatttattttctgttcttcacagtcacagatctttgggtatcaagtaaaactgtgaagtgatgtcgggaagaggaaagggaggaaaaggattgggaaagggaggagcgaagaggcacaggaaggttctgagggataacattcaaggaatcaccaagcctgccattcgtcgtcttgctcgtagaggtggtgtcaagcgtatcagtggtctcatctacgaagagaccagaggtgtcctcaagatcttcctcgagaatgtcatccgtgacgccgttacttacactgagcacgctagaaggaagacggtgaccgccatggatgttgtctacgctttgaagaggcaaggtcgtactctctacggtttcggaggttaatccgatttgggggattagggtttatgcaagtttggggatttcttcttgtttctgagatctgtgttaaatggtttgaattagtctaaagtaaatctaggagtgttagctactgcttttgttttctattgtgatgtcgttgttagccaatgcggtgtagttgaaaatctttgcaaacttaaagctaagaaaatctaatgaggatg

SEQ ID NO: 20903 - protein, 103 aa, Arabidopsis thaliana; identical to SEQ ID NO: 7737
  peptide (1)..(103): Ceres Seq. ID no. 12333122
  misc_feature (1)..(103): Homolog of NCBI NO: 462242 NR Description: Histone H4
  misc_feature (1)..(103): Homolog of NCBI NO: 37590121 NR Description: Hist1h4h protein [Mus musculus]
  misc_feature (1)..(103): Homolog of NCBI NO: 34858262 NR Description: similar to germinal histone H4 gene [Rattus
  misc_feature (1)..(103): Homolog of NCBI NO: 27692960 NR Description: Similar to germinal histone H4 gene [Mus musculus]
  misc_feature (1)..(103): Homolog of NCBI NO: 4504301 NR Description: H4 histone family, member A [Homo sapiens]
  misc_feature (1)..(103): Homolog of NCBI NO: 34876368 NR Description: similar to germinal histone H4 gene [Rattus
  misc_feature (1)..(103): Homolog of NCBI NO: 1806283 NR Description: Histone H4 homologue [Sesbania rostrata]
  misc_feature (1)..(103): Homolog of NCBI NO: 462243 NR Description: Histone H4
  misc_feature (1)..(103): Homolog of NCBI NO: 27692935 NR Description: Similar to germinal histone H4 gene [Mus musculus]
  misc_feature (1)..(103): Homolog of NCBI NO: 15226944 NR Description: histone H4

SEQ ID NO: 20904 - DNA, 580 bp, Arabidopsis thaliana
  misc_feature (1)..(580): Ceres Seq. ID no. 12322761
  misc_feature: MA Experiment ID: 108488 Result: Down-regulated in Transcription
  misc_feature: MA Experiment ID: 108572 Result: Down-regulated in Transcription
  misc_feature: MA Experiment 108572 PARAMETER Experiment Name: At_Drought_cDNA_P Parameter: Timepoint (hr) Value: 1
  misc_feature: MA Experiment 108572 PARAMETER Experiment Name: At_Drought_cDNA_P Parameter: Tissue Value: Aerial
  misc_feature: MA Experiment 108572 PARAMETER Experiment Name: At_Drought_cDNA_P Parameter: Treatment Value: Drought vs. No Drought
  misc_feature: MA Experiment ID: 108573 Result: Down-regulated in Transcription
  misc_feature: MA Experiment 108573 PARAMETER Experiment Name: At_Drought_cDNA_P Parameter: Timepoint (hr) Value: 6
  misc_feature: MA Experiment 108573 PARAMETER Experiment Name: At_Drought_cDNA_P Parameter: Tissue Value: Aerial
  misc_feature: MA Experiment 108573 PARAMETER Experiment Name: At_Drought_cDNA_P Parameter: Treatment Value: Drought vs. No Drought
  misc_feature: MA Experiment ID: 108577 Result: Down-regulated in Transcription
  misc_feature: MA Experiment 108577 PARAMETER Experiment Name: At_42deg_Heat_cDNA_P Parameter: Temperature (deg C) Value: 42 vs. 22
  misc_feature: MA Experiment 108577 PARAMETER Experiment Name: At_42deg_Heat_cDNA_P Parameter: Timepoint (hr) Value: 6
  misc_feature: MA Experiment 108577 PARAMETER Experiment Name: At_42deg_Heat_cDNA_P Parameter: Tissue Value: Aerial
  misc_feature: MA Experiment ID: 108579 Result: Up-regulated in Transcription
  misc_feature: MA Experiment 108579 PARAMETER Experiment Name: At_4deg_Cold_cDNA_P Parameter: Temperature (deg C) Value: 4 vs. 22
  misc_feature: MA Experiment 108579 PARAMETER Experiment Name: At_4deg_Cold_cDNA_P Parameter: Timepoint (hr) Value: 6
  misc_feature: MA Experiment 108579 PARAMETER Experiment Name: At_4deg_Cold_cDNA_P Parameter: Tissue Value: Aerial
  misc_feature: MA Experiment ID: 108607 Result: Down-regulated in Transcription
  misc_feature: MA Experiment 108607 PARAMETER Experiment Name: At_100uM_ABA_cDNA_P Parameter: Timepoint (hr) Value: 4
  misc_feature: MA Experiment 108607 PARAMETER Experiment Name: At_100uM_ABA_cDNA_P Parameter: Tissue Value: Aerial
  misc_feature: MA Experiment 108607 PARAMETER Experiment Name: At_100uM_ABA_cDNA_P Parameter: Treatment Value: 100uM ABA vs. No Treatment
  misc_feature: MA Experiment ID: 20000069 Result: Up-regulated in Transcription
  misc_feature: MA Experiment 20000069 PARAMETER Experiment Name: At_100uM_ABA_Mutants_cDNA_P Parameter: Plant Line Value: CS23
  misc_feature: MA Experiment 20000069 PARAMETER Experiment Name: At_100uM_ABA_Mutants_cDNA_P Parameter: Timepoint (hr) Value: 6
  misc_feature: MA Experiment 20000069 PARAMETER Experiment Name: At_100uM_ABA_Mutants_cDNA_P Parameter: Tissue Value: Aerial
  misc_feature: MA Experiment 20000069 PARAMETER Experiment Name: At_100uM_ABA_Mutants_cDNA_P Parameter: Treatment Value: 100uM ABA vs. No Treatment
  misc_feature: MA Experiment ID: 20000070 Result: Up-regulated in Transcription
  misc_feature: MA Experiment 20000070 PARAMETER Experiment Name: At_100uM_ABA_Mutants_cDNA_P Parameter: Plant Line Value: CS24
  misc_feature: MA Experiment 20000070 PARAMETER Experiment Name: At_100uM_ABA_Mutants_cDNA_P Parameter: Timepoint (hr) Value: 6
  misc_feature: MA Experiment 20000070 PARAMETER Experiment Name: At_100uM_ABA_Mutants_cDNA_P Parameter: Tissue Value: Aerial
  misc_feature: MA Experiment 20000070 PARAMETER Experiment Name: At_100uM_ABA_Mutants_cDNA_P Parameter: Treatment Value: 100uM ABA vs. No Treatment
  misc_feature: MA Experiment ID: 20000087 Result: Up-regulated in Transcription
  misc_feature: MA Experiment 20000087 PARAMETER Experiment Name: At_100uM_ABA_Mutants_cDNA_P Parameter: Plant Line Value: WS
  misc_feature: MA Experiment 20000087 PARAMETER Experiment Name: At_100uM_ABA_Mutants_cDNA_P Parameter: Timepoint (hr) Value: 6
  misc_feature: MA Experiment 20000087 PARAMETER Experiment Name: At_100uM_ABA_Mutants_cDNA_P Parameter: Tissue Value: Aerial
  misc_feature: MA Experiment 20000087 PARAMETER Experiment Name: At_100uM_ABA_Mutants_cDNA_P Parameter: Treatment Value: 100uM ABA vs. No Treatment
  misc_feature: MA Experiment ID: 20000088 Result: Up-regulated in Transcription
  misc_feature: MA Experiment 20000088 PARAMETER Experiment Name: At_100uM_ABA_Mutants_cDNA_P Parameter: Plant Line Value: Landsberg
  misc_feature: MA Experiment 20000088 PARAMETER Experiment Name: At_100uM_ABA_Mutants_cDNA_P Parameter: Timepoint (hr) Value: 6
  misc_feature: MA Experiment 20000088 PARAMETER Experiment Name: At_100uM_ABA_Mutants_cDNA_P Parameter: Tissue Value: Aerial
  misc_feature: MA Experiment 20000088 PARAMETER Experiment Name: At_100uM_ABA_Mutants_cDNA_P Parameter: Treatment Value: 100uM ABA vs. No Treatment
  misc_feature: MA Experiment ID: 20000089 Result: Up-regulated in Transcription
  misc_feature: MA Experiment ID: 20000112 Result: Down-regulated in Transcription
  misc_feature: MA Experiment 20000112 PARAMETER Experiment Name: At_42deg_Heat_cDNA_P Parameter: Temperature (deg C) Value: 42 vs. 22
  misc_feature: MA Experiment 20000112 PARAMETER Experiment Name: At_42deg_Heat_cDNA_P Parameter: Timepoint (hr) Value: 2
  misc_feature: MA Experiment 20000112 PARAMETER Experiment Name: At_42deg_Heat_cDNA_P Parameter: Tissue Value: Aerial
  misc_feature: MA Experiment ID: 20000117 Result: Up-regulated in Transcription
  misc_feature: MA Experiment 20000117 PARAMETER Experiment Name: At_100uM_ABA_Mutants_cDNA_P Parameter: Plant Line Value: Columbia
  misc_feature: MA Experiment 20000117 PARAMETER Experiment Name: At_100uM_ABA_Mutants_cDNA_P Parameter: Timepoint (hr) Value: 6
  misc_feature: MA Experiment 20000117 PARAMETER Experiment Name: At_100uM_ABA_Mutants_cDNA_P Parameter: Tissue Value: Aerial
  misc_feature: MA Experiment 20000117 PARAMETER Experiment Name: At_100uM_ABA_Mutants_cDNA_P Parameter: Treatment Value: 100uM ABA vs. No Treatment
acataagtctctctcttacattttgaaaccctaatttctcaaaaaaaatgtctgaagttgagtaccggtgctttgtcggcggccttgcctgggccaccaatgatgaagatcttcaaaggacgttctcacagttcggcgacgttatcgattctaagatcattaacgaccgcgagagtggaagatcaaggggattcggattcgtcaccttcaaggacgagaaagccatgagggatgcgattgaagagatgaacggtaaagagctcgatggacgtgtcatcaccgtgaacgaggctcagtcgagaggtagcggcggtggcggaggaggttacggatctggtggaggcggtggtggccgaggatacggtggtggtggacgccgtgagggaggtggctacggaggcggtgatggtggaagttacggcggcggtggtggcggctggtaatcaaagatagagttgtttgcgtgctgctgctctgtttttggtttagatttggatttgtgtcaccacttctggtttggttatcgttcgtttggtttacttttttgatgaaacagtttcatttaagtcttctttgtctg

SEQ ID NO: 20905 - protein, 131 aa, Arabidopsis thaliana
  peptide (1)..(131): Ceres Seq. ID no. 12322762
  misc_feature (8)..(79): Pfam Name: RNA recognition motif. (a.k.a. RRM, RBD, or RNP domain) Pfam Description: RNA recognition motif. (a.k.a. RRM, RBD, or RNP
  misc_feature (3)..(131): Homolog of NCBI NO: 1346180 NR Description: Glycine-rich RNA-binding protein GRP1A
  misc_feature (2)..(131): Homolog of NCBI NO: 34851124 NR Description: putative glycine-rich RNA-binding protein [Prunus
  misc_feature (3)..(131): Homolog of NCBI NO: 1346181 NR Description: Glycine-rich RNA-binding protein GRP2A
  misc_feature (2)..(131): Homolog of NCBI NO: 20152613 NR Description: putative glycine rich protein [Rumex obtusifolius]
  misc_feature (1)..(130): Homolog of NCBI NO: 2119042 NR Description: glycine-rich RNA-binding protein RGP-1a - wood
  misc_feature (1)..(131): Homolog of NCBI NO: 2226370 NR Description: RNA-binding protein [Nicotiana glutinosa]
  misc_feature (1)..(131): Homolog of NCBI NO: 544426 NR Description: Glycine-rich RNA-binding protein
  misc_feature (1)..(131): Homolog of NCBI NO: 544416 NR Description: Glycine-rich RNA-binding protein 10
  misc_feature (1)..(131): Homolog of NCBI NO: 30692254 NR Description: glycine-rich RNA-binding protein 8 (GRP8) (CCR1)
  misc_feature (1)..(130): Homolog of NCBI NO: 15235002 NR Description: glycine-rich RNA-binding protein 8 (GRP8)
MSEVEYRCFVGGLAWATNDEDLQRTFSQFGDVIDSKIINDRESGRSRGFGFVTFKDEKAMRDAIEEMNGKELDGRVITVNEAQSRGSGGGGGGYGSGGGGGGRGYGGGGRREGGGYGGGDGGSYGGGGGGW

SEQ ID NO: 20906 - protein, 72 aa, Arabidopsis thaliana
  peptide (1)..(72): Ceres Seq. ID no. 12322763
  misc_feature (10)..(71): Pfam Name: Herpesvirus large structural phosphoprotein UL32 Pfam Description: Herpesvirus large structural phosphoprotein UL32
  misc_feature (1)..(72): Homolog of NCBI NO: 1346180 NR Description: Glycine-rich RNA-binding protein GRP1A
  misc_feature (1)..(72): Homolog of NCBI NO: 34851124 NR Description: putative glycine-rich RNA-binding protein [Prunus
  misc_feature (1)..(72): Homolog of NCBI NO: 1346181 NR Description: Glycine-rich RNA-binding protein GRP2A
  misc_feature (1)..(72): Homolog of NCBI NO: 20152613 NR Description: putative glycine rich protein [Rumex obtusifolius]
  misc_feature (1)..(71): Homolog of NCBI NO: 2119042 NR Description: glycine-rich RNA-binding protein RGP-1a - wood
  misc_feature (1)..(72): Homolog of NCBI NO: 2226370 NR Description: RNA-binding protein [Nicotiana glutinosa]
  misc_feature (1)..(72): Homolog of NCBI NO: 544426 NR Description: Glycine-rich RNA-binding protein
  misc_feature (1)..(72): Homolog of NCBI NO: 544416 NR Description: Glycine-rich RNA-binding protein 10
  misc_feature (1)..(72): Homolog of NCBI NO: 30692254 NR Description: glycine-rich RNA-binding protein 8 (GRP8) (CCR1)
  misc_feature (1)..(71): Homolog of NCBI NO: 15235002 NR Description: glycine-rich RNA-binding protein 8 (GRP8)
MRDAIEEMNGKELDGRVITVNEAQSRGSGGGGGGYGSGGGGGGRGYGGGGRREGGGYGGGDGGSYGGGGGGW

SEQ ID NO: 20907 - protein, 65 aa, Arabidopsis thaliana
  peptide (1)..(65): Ceres Seq. ID no. 12322764
  misc_feature (3)..(64): Pfam Name: Herpesvirus large structural phosphoprotein UL32 Pfam Description: Herpesvirus large structural phosphoprotein UL32
  misc_feature (1)..(65): Homolog of NCBI NO: 1346180 NR Description: Glycine-rich RNA-binding protein GRP1A
  misc_feature (1)..(65): Homolog of NCBI NO: 34851124 NR Description: putative glycine-rich RNA-binding protein [Prunus
  misc_feature (1)..(65): Homolog of NCBI NO: 1346181 NR Description: Glycine-rich RNA-binding protein GRP2A
  misc_feature (1)..(65): Homolog of NCBI NO: 20152613 NR Description: putative glycine rich protein [Rumex obtusifolius]
  misc_feature (1)..(64): Homolog of NCBI NO: 2119042 NR Description: glycine-rich RNA-binding protein RGP-1a - wood
  misc_feature (1)..(65): Homolog of NCBI NO: 2226370 NR Description: RNA-binding protein [Nicotiana glutinosa]
  misc_feature (1)..(65): Homolog of NCBI NO: 544426 NR Description: Glycine-rich RNA-binding protein
  misc_feature (1)..(65): Homolog of NCBI NO: 544416 NR Description: Glycine-rich RNA-binding protein 10
  misc_feature (1)..(65): Homolog of NCBI NO: 30692254 NR Description: glycine-rich RNA-binding protein 8 (GRP8) (CCR1)
  misc_feature (1)..(64): Homolog of NCBI NO: 15235002 NR Description: glycine-rich RNA-binding protein 8 (GRP8)
MNGKELDGRVITVNEAQSRGSGGGGGGYGSGGGGGGRGYGGGGRREGGGYGGGDGGSYGGGGGGW

SEQ ID NO: 20908 - DNA, 611 bp, Arabidopsis thaliana
  misc_feature (1)..(611): Ceres Seq. ID no. 12673265
  misc_feature: MA Experiment ID: 108434 Result: Down-regulated in Transcription
  misc_feature: MA Experiment 108434 PARAMETER Experiment Name: At_Root_Tips_cDNA_P Parameter: Tissue Value: Root Tips
  misc_feature: MA Experiment ID: 108461 Result: Down-regulated in Transcription
  misc_feature: MA Experiment 108461 PARAMETER Experiment Name: At_Germinating_Seeds_cDNA_P Parameter: Age (day) Value: 1 vs. 0
  misc_feature: MA Experiment 108461 PARAMETER Experiment Name: At_Germinating_Seeds_cDNA_P Parameter: Tissue Value: Germinating Seeds
  misc_feature: MA Experiment ID: 108462 Result: Down-regulated in Transcription
  misc_feature: MA Experiment 108462 PARAMETER Experiment Name: At_Germinating_Seeds_cDNA_P Parameter: Age (day) Value: 2 vs. 0
  misc_feature: MA Experiment 108462 PARAMETER Experiment Name: At_Germinating_Seeds_cDNA_P Parameter: Tissue Value: Germinating Seeds
  misc_feature: MA Experiment ID: 108488 Result: Down-regulated in Transcription
  misc_feature: MA Experiment ID: 108573 Result: Up-regulated in Transcription
  misc_feature: MA Experiment 108573 PARAMETER Experiment Name: At_Drought_cDNA_P Parameter: Timepoint (hr) Value: 6
  misc_feature: MA Experiment 108573 PARAMETER Experiment Name: At_Drought_cDNA_P Parameter: Tissue Value: Aerial
  misc_feature: MA Experiment 108573 PARAMETER Experiment Name: At_Drought_cDNA_P Parameter: Treatment Value: Drought vs. No Drought
  misc_feature: MA Experiment ID: 108585 Result: Up-regulated in Transcription
  misc_feature: MA Experiment 108585 PARAMETER Experiment Name: At_5mM_NaNP_cDNA_P Parameter: Timepoint (hr) Value: 6
  misc_feature: MA Experiment 108585 PARAMETER Experiment Name: At_5mM_NaNP_cDNA_P Parameter: Tissue Value: Aerial
  misc_feature: MA Experiment 108585 PARAMETER Experiment Name: At_5mM_NaNP_cDNA_P Parameter: Treatment Value: null
  misc_feature: MA Experiment ID: 108595 Result: Up-regulated in Transcription
  misc_feature: MA Experiment 108595 PARAMETER Experiment Name: At_Ler-pi_Ovule_cDNA_P Parameter: Plant Line Value: null
  misc_feature: MA Experiment ID: 108668 Result: Up-regulated in Transcription
  misc_feature: MA Experiment 108668 PARAMETER Experiment Name: At_2mM_SA_cDNA_P Parameter: Plant Line Value: WS
  misc_feature: MA Experiment 108668 PARAMETER Experiment Name: At_2mM_SA_cDNA_P Parameter: Timepoint (hr) Value: 6
  misc_feature: MA Experiment 108668 PARAMETER Experiment Name: At_2mM_SA_cDNA_P Parameter: Treatment Value: 2mM SA vs. No Treatment
  misc_feature: MA Experiment ID: 20000030 Result: Down-regulated in Transcription
  misc_feature: MA Experiment 20000030 PARAMETER Experiment Name: At_CS6630_Roots_cDNA_P Parameter: Plant Line Value: CS6630 vs. WS
  misc_feature: MA Experiment 20000030 PARAMETER Experiment Name: At_CS6630_Roots_cDNA_P Parameter: Tissue Value: Roots
  misc_feature: MA Experiment ID: 20000071 Result: Up-regulated in Transcription
  misc_feature: MA Experiment 20000071 PARAMETER Experiment Name: At_100uM_ABA_Mutants_cDNA_P Parameter: Plant Line Value: CS8104
  misc_feature: MA Experiment 20000071 PARAMETER Experiment Name: At_100uM_ABA_Mutants_cDNA_P Parameter: Timepoint (hr) Value: 6
  misc_feature: MA Experiment 20000071 PARAMETER Experiment Name: At_100uM_ABA_Mutants_cDNA_P Parameter: Tissue Value: Aerial
  misc_feature: MA Experiment 20000071 PARAMETER Experiment Name: At_100uM_ABA_Mutants_cDNA_P Parameter: Treatment Value: 100uM ABA vs. No Treatment
  misc_feature: MA Experiment ID: 20000072 Result: Up-regulated in Transcription
  misc_feature: MA Experiment 20000072 PARAMETER Experiment Name: At_100uM_ABA_Mutants_cDNA_P Parameter: Plant Line Value: CS8105
  misc_feature: MA Experiment 20000072 PARAMETER Experiment Name: At_100uM_ABA_Mutants_cDNA_P Parameter: Timepoint (hr) Value: 6
  misc_feature: MA Experiment 20000072 PARAMETER Experiment Name: At_100uM_ABA_Mutants_cDNA_P Parameter: Tissue Value: Aerial
  misc_feature: MA Experiment 20000072 PARAMETER Experiment Name: At_100uM_ABA_Mutants_cDNA_P Parameter: Treatment Value: 100uM ABA vs. No Treatment
  misc_feature: MA Experiment ID: 20000087 Result: Up-regulated in Transcription
  misc_feature: MA Experiment 20000087 PARAMETER Experiment Name: At_100uM_ABA_Mutants_cDNA_P Parameter: Plant Line Value: WS
  misc_feature: MA Experiment 20000087 PARAMETER Experiment Name: At_100uM_ABA_Mutants_cDNA_P Parameter: Timepoint (hr) Value: 6
  misc_feature: MA Experiment 20000087 PARAMETER Experiment Name: At_100uM_ABA_Mutants_cDNA_P Parameter: Tissue Value: Aerial
  misc_feature: MA Experiment 20000087 PARAMETER Experiment Name: At_100uM_ABA_Mutants_cDNA_P Parameter: Treatment Value: 100uM ABA vs. No Treatment
  misc_feature: MA Experiment ID: 20000117 Result: Up-regulated in Transcription
  misc_feature: MA Experiment 20000117 PARAMETER Experiment Name: At_100uM_ABA_Mutants_cDNA_P Parameter: Plant Line Value: Columbia
  misc_feature: MA Experiment 20000117 PARAMETER Experiment Name: At_100uM_ABA_Mutants_cDNA_P Parameter: Timepoint (hr) Value: 6
  misc_feature: MA Experiment 20000117 PARAMETER Experiment Name: At_100uM_ABA_Mutants_cDNA_P Parameter: Tissue Value: Aerial
  misc_feature: MA Experiment 20000117 PARAMETER Experiment Name: At_100uM_ABA_Mutants_cDNA_P Parameter: Treatment Value: 100uM ABA vs. No Treatment
  misc_feature: MA Experiment ID: 20000180 Result: Down-regulated in Transcription
  misc_feature: MA Experiment 20000180 PARAMETER Experiment Name: At_Germinating_Seeds_P Parameter: Age (hr) Value: 24 vs. 0
  misc_feature: MA Experiment 20000180 PARAMETER Experiment Name: At_Germinating_Seeds_P Parameter: Tissue Value: Germinating Seeds
  misc_feature: MA Experiment ID: 20000182 Result: Up-regulated in Transcription
  misc_feature: MA Experiment 20000182 PARAMETER Experiment Name: At_2mM_SA_P Parameter: Age (day) Value: 14
  misc_feature: MA Experiment 20000182 PARAMETER Experiment Name: At_2mM_SA_P Parameter: Organism Value: A. thaliana
  misc_feature: MA Experiment 20000182 PARAMETER Experiment Name: At_2mM_SA_P Parameter: Plant Line Value: WS
  misc_feature: MA Experiment 20000182 PARAMETER Experiment Name: At_2mM_SA_P Parameter: Timepoint (hr) Value: 6
  misc_feature: MA Experiment 20000182 PARAMETER Experiment Name: At_2mM_SA_P Parameter: Tissue Value: Aerial
  misc_feature: MA Experiment 20000182 PARAMETER Experiment Name: At_2mM_SA_P Parameter: Treatment Value: 2mM SA vs. No Treatment
  misc_feature: MA Experiment ID: 20000184 Result: Down-regulated in Transcription
  misc_feature: MA Experiment 20000184 PARAMETER Experiment Name: At_Shoots__P Parameter: Age (day) Value: 7
  misc_feature: MA Experiment 20000184 PARAMETER Experiment Name: At_Shoots__P Parameter: Tissue Value: Shoots vs. Whole Plant
  misc_feature: MA Experiment ID: 20000224 Result: Down-regulated in Transcription
  misc_feature: MA Experiment ID: 20000794 Result: Up-regulated in Transcription
  misc_feature: MA Experiment 20000794 PARAMETER Experiment Name: At_Petals_P Parameter: Age (day) Value: 23-25 days
  misc_feature: MA Experiment 20000794 PARAMETER Experiment Name: At_Petals_P Parameter: Plant Line Value: WS
  misc_feature: MA Experiment 20000794 PARAMETER Experiment Name: At_Petals_P Parameter: Tissue Value: Petals vs. Whole plant
  misc_feature: MA Experiment ID: 20001450 Result: Up-regulated in Transcription
  misc_feature: MA Experiment 20001450 PARAMETER Experiment Name: At_Far-red-induction_P Parameter: Age (day) Value: 7
  misc_feature: MA Experiment 20001450 PARAMETER Experiment Name: At_Far-red-induction_P Parameter: Light Value: Far-red vs. White
  misc_feature: MA Experiment 20001450 PARAMETER Experiment Name: At_Far-red-induction_P Parameter: Organism Value: A. thaliana
  misc_feature: MA Experiment 20001450 PARAMETER Experiment Name: At_Far-red-induction_P Parameter: Plant Line Value: Columbia
  misc_feature: MA Experiment 20001450 PARAMETER Experiment Name: At_Far-red-induction_P Parameter: Timepoint (hr) Value: 8
  misc_feature: MA Experiment 20001450 PARAMETER Experiment Name: At_Far-red-induction_P Parameter: Tissue Value: Whole Plant
  misc_feature: MA Experiment ID: 20001451 Result: Up-regulated in Transcription
  misc_feature: MA Experiment 20001451 PARAMETER Experiment Name: At_Far-red-induction_P Parameter: Age (day) Value: 7
  misc_feature: MA Experiment 20001451 PARAMETER Experiment Name: At_Far-red-induction_P Parameter: Light Value: Far-red vs. White
  misc_feature: MA Experiment 20001451 PARAMETER Experiment Name: At_Far-red-induction_P Parameter: Organism Value: A. thaliana
  misc_feature: MA Experiment 20001451 PARAMETER Experiment Name: At_Far-red-induction_P Parameter: Plant Line Value: Columbia
  misc_feature: MA Experiment 20001451 PARAMETER Experiment Name: At_Far-red-induction_P Parameter: Timepoint (hr) Value: 24
  misc_feature: MA Experiment 20001451 PARAMETER Experiment Name: At_Far-red-induction_P Parameter: Tissue Value: Whole Plant
  misc_feature: MA Experiment ID: 20001557 Result: Down-regulated in Transcription
  misc_feature: MA Experiment 20001557 PARAMETER Experiment Name: At_Drought_Soil_Dry_P Parameter: Age (day) Value: 27
  misc_feature: MA Experiment 20001557 PARAMETER Experiment Name: At_Drought_Soil_Dry_P Parameter: Organism Value: A. thaliana
  misc_feature: MA Experiment 20001557 PARAMETER Experiment Name: At_Drought_Soil_Dry_P Parameter: Plant Line Value: WS
  misc_feature: MA Experiment 20001557 PARAMETER Experiment Name: At_Drought_Soil_Dry_P Parameter: Post Timepoint (hr) Value: 3
  misc_feature: MA Experiment 20001557 PARAMETER Experiment Name: At_Drought_Soil_Dry_P Parameter: Post-Treatment Value: Re-Water vs. No Drought
  misc_feature: MA Experiment 20001557 PARAMETER Experiment Name: At_Drought_Soil_Dry_P Parameter: Timepoint (day) Value: 13
  misc_feature: MA Experiment 20001557 PARAMETER Experiment Name: At_Drought_Soil_Dry_P Parameter: Treatment Value: Drought vs. No Drought
tcctcttcttcttctacaatcaaaattcatttttttttcctctgatcatcatcgaaccctagtttcgtcttttggatactaaccgaatcatcatggagaagaactccttcaagctttctaatcctctggagatgagaatggctgagtctactcgtatcagagcgaaataccctgaaagagttcccgtgattgtggaaaaagctggacagagtgatgttcctgacattgacaagaagaagtatcttgtaccagctgatctaaccattggccaatttgtgtacgttgtgaggaaaagaatcaagcttggagctgaaaaagccatctttgtctttgtcaagaacacattaccaccaactgcggcattgatgtctgcaatctacgaagaacacaaagacgaagacgggtttctctacatgacatacagtggagagaacacatttggtggatctttctactgctaattacctcagcttctacgtctgatcctcttgatgattgtacattctcgtcgaccttaataatgtcattttactttcttggtttaaccttttgagctctcttactatctcttgcatttgaagatggtatttgaaacaagattctaatttgac

SEQ ID NO: 20909 - protein, 122 aa, Arabidopsis thaliana
  peptide (1)..(122): Ceres Seq. ID no. 12673266
  misc_feature (14)..(117): Pfam Name: Microtubule associated protein 1A/1B, light chain 3 Pfam Description: Microtubule associated protein 1A/1B, light
  misc_feature (1)..(117): Homolog of NCBI NO: 21592920 NR Description: putative microtubule-associated protein
  misc_feature (1)..(117): Homolog of NCBI NO: 38344173 NR Description: OSJNBa0053K19.12 [Oryza sativa (japonica
  misc_feature (1)..(119): Homolog of NCBI NO: 33146967 NR Description: putative microtubule associated protein
  misc_feature (16)..(117): Homolog of NCBI NO: 11279074 NR Description: symbiosis-related like protein - Arabidopsis
  misc_feature (1)..(117): Homolog of NCBI NO: 15220686 NR Description: symbiosis-related protein, putative
  misc_feature (1)..(117): Homolog of NCBI NO: 34595981 NR Description: microtubule-associated protein 1 light chain 3
  misc_feature (1)..(117): Homolog of NCBI NO: 40253647 NR Description: putative microtubial binding protein
  misc_feature (1)..(117): Homolog of NCBI NO: 21553487 NR Description: symbiosis-related like protein [Arabidopsis
  misc_feature (1)..(117): Homolog of NCBI NO: 18415813 NR Description: symbiosis-related like protein
  misc_feature (1)..(122): Homolog of NCBI NO: 15233593 NR Description: putative symbiosis-related protein
MEKNSFKLSNPLEMRMAESTRIRAKYPERVPVIVEKAGQSDVPDIDKKKYLVPADLTIGQFVYVVRKRIKLGAEKAIFVFVKNTLPPTAALMSAIYEEHKDEDGFLYMTYSGENTFGGSFYC

SEQ ID NO: 20910 - protein, 109 aa, Arabidopsis thaliana
  peptide (1)..(109): Ceres Seq. ID no. 12673267
  misc_feature (1)..(104): Pfam Name: Microtubule associated protein 1A/1B, light chain 3 Pfam Description: Microtubule associated protein 1A/1B, light
  misc_feature (1)..(104): Homolog of NCBI NO: 21592920 NR Description: putative microtubule-associated protein
  misc_feature (1)..(104): Homolog of NCBI NO: 38344173 NR Description: OSJNBa0053K19.12 [Oryza sativa (japonica
  misc_feature (1)..(106): Homolog of NCBI NO: 33146967 NR Description: putative microtubule associated protein
  misc_feature (3)..(104): Homolog of NCBI NO: 11279074 NR Description: symbiosis-related like protein - Arabidopsis
  misc_feature (1)..(104): Homolog of NCBI NO: 15220686 NR Description: symbiosis-related protein, putative
  misc_feature (1)..(104): Homolog of NCBI NO: 34595981 NR Description: microtubule-associated protein 1 light chain 3
  misc_feature (1)..(104): Homolog of NCBI NO: 40253647 NR Description: putative microtubial binding protein
  misc_feature (1)..(104): Homolog of NCBI NO: 21553487 NR Description: symbiosis-related like protein [Arabidopsis
  misc_feature (1)..(104): Homolog of NCBI NO: 18415813 NR Description: symbiosis-related like protein
  misc_feature (1)..(109): Homolog of NCBI NO: 15233593 NR Description: putative symbiosis-related protein
MRMAESTRIRAKYPERVPVIVEKAGQSDVPDIDKKKYLVPADLTIGQFVYVVRKRIKLGAEKAIFVFVKNTLPPTAALMSAIYEEHKDEDGFLYMTYSGENTFGGSFYC

SEQ ID NO: 20911 - protein, 107 aa, Arabidopsis thaliana
  peptide (1)..(107): Ceres Seq. ID no. 12673268
  misc_feature (1)..(102): Pfam Name: Microtubule associated protein 1A/1B, light chain 3 Pfam Description: Microtubule associated protein 1A/1B, light
  misc_feature (1)..(102): Homolog of NCBI NO: 21592920 NR Description: putative microtubule-associated protein
  misc_feature (1)..(102): Homolog of NCBI NO: 38344173 NR Description: OSJNBa0053K19.12 [Oryza sativa (japonica
  misc_feature (1)..(104): Homolog of NCBI NO: 33146967 NR Description: putative microtubule associated protein
  misc_feature (1)..(102): Homolog of NCBI NO: 11279074 NR Description: symbiosis-related like protein - Arabidopsis
  misc_feature (1)..(102): Homolog of NCBI NO: 15220686 NR Description: symbiosis-related protein, putative
  misc_feature (1)..(102): Homolog of NCBI NO: 34595981 NR Description: microtubule-associated protein 1 light chain 3
  misc_feature (1)..(102): Homolog of NCBI NO: 40253647 NR Description: putative microtubial binding protein
  misc_feature (1)..(102): Homolog of NCBI NO: 21553487 NR Description: symbiosis-related like protein [Arabidopsis
  misc_feature (1)..(102): Homolog of NCBI NO: 18415813 NR Description: symbiosis-related like protein
  misc_feature (1)..(107): Homolog of NCBI NO: 15233593 NR Description: putative symbiosis-related protein
MAESTRIRAKYPERVPVIVEKAGQSDVPDIDKKKYLVPADLTIGQFVYVVRKRIKLGAEKAIFVFVKNTLPPTAALMSAIYEEHKDEDGFLYMTYSGENTFGGSFYC

SEQ ID NO: 20912 - DNA, 690 bp, Arabidopsis thaliana
  misc_feature (1)..(690): Ceres Seq. ID no. 13580505
  misc_feature: MA Experiment ID: 108434 Result: Up-regulated in Transcription
  misc_feature: MA Experiment 108434 PARAMETER Experiment Name: At_Root_Tips_cDNA_P Parameter: Tissue Value: Root Tips
  misc_feature: MA Experiment ID: 108461 Result: Down-regulated in Transcription
  misc_feature: MA Experiment 108461 PARAMETER Experiment Name: At_Germinating_Seeds_cDNA_P Parameter: Age (day) Value: 1 vs. 0
  misc_feature: MA Experiment 108461 PARAMETER Experiment Name: At_Germinating_Seeds_cDNA_P Parameter: Tissue Value: Germinating Seeds
  misc_feature: MA Experiment ID: 108462 Result: Down-regulated in Transcription
  misc_feature: MA Experiment 108462 PARAMETER Experiment Name: At_Germinating_Seeds_cDNA_P Parameter: Age (day) Value: 2 vs. 0
  misc_feature: MA Experiment 108462 PARAMETER Experiment Name: At_Germinating_Seeds_cDNA_P Parameter: Tissue Value: Germinating Seeds
  misc_feature: MA Experiment ID: 108463 Result: Down-regulated in Transcription
  misc_feature: MA Experiment 108463 PARAMETER Experiment Name: At_Germinating_Seeds_cDNA_P Parameter: Age (day) Value: 3 vs. 0
  misc_feature: MA Experiment 108463 PARAMETER Experiment Name: At_Germinating_Seeds_cDNA_P Parameter: Tissue Value: Germinating Seeds
  misc_feature: MA Experiment ID: 108464 Result: Down-regulated in Transcription
  misc_feature: MA Experiment 108464 PARAMETER Experiment Name: At_Germinating_Seeds_cDNA_P Parameter: Age (day) Value: 4 vs. 0
  misc_feature: MA Experiment 108464 PARAMETER Experiment Name: At_Germinating_Seeds_cDNA_P Parameter: Tissue Value: Germinating Seeds
  misc_feature: MA Experiment ID: 108576 Result: Up-regulated in Transcription
  misc_feature: MA Experiment 108576 PARAMETER Experiment Name: At_42deg_Heat_cDNA_P Parameter: Temperature (deg C) Value: 42 vs. 22
  misc_feature: MA Experiment 108576 PARAMETER Experiment Name: At_42deg_Heat_cDNA_P Parameter: Timepoint (hr) Value: 1
  misc_feature: MA Experiment 108576 PARAMETER Experiment Name: At_42deg_Heat_cDNA_P Parameter: Tissue Value: Aerial
  misc_feature: MA Experiment ID: 108577 Result: Up-regulated in Transcription
  misc_feature: MA Experiment 108577 PARAMETER Experiment Name: At_42deg_Heat_cDNA_P Parameter: Temperature (deg C) Value: 42 vs. 22
  misc_feature: MA Experiment 108577 PARAMETER Experiment Name: At_42deg_Heat_cDNA_P Parameter: Timepoint (hr) Value: 6
  misc_feature: MA Experiment 108577 PARAMETER Experiment Name: At_42deg_Heat_cDNA_P Parameter: Tissue Value: Aerial
  misc_feature: MA Experiment ID: 20000093 Result: Up-regulated in Transcription
  misc_feature: MA Experiment 20000093 PARAMETER Experiment Name: At_42deg_Heat_cDNA_P Parameter: Temperature (deg C) Value: 42 vs. 22
  misc_feature: MA Experiment 20000093 PARAMETER Experiment Name: At_42deg_Heat_cDNA_P Parameter: Timepoint (hr) Value: 0.5
  misc_feature: MA Experiment 20000093 PARAMETER Experiment Name: At_42deg_Heat_cDNA_P Parameter: Tissue Value: Aerial
  misc_feature: MA Experiment ID: 20000111 Result: Up-regulated in Transcription
  misc_feature: MA Experiment 20000111 PARAMETER Experiment Name: At_42deg_Heat_cDNA_P Parameter: Temperature (deg C) Value: 42 vs. 22
  misc_feature: MA Experiment 20000111 PARAMETER Experiment Name: At_42deg_Heat_cDNA_P Parameter: Timepoint (hr) Value: 6
  misc_feature: MA Experiment 20000111 PARAMETER Experiment Name: At_42deg_Heat_cDNA_P Parameter: Tissue Value: Aerial
  misc_feature: MA Experiment ID: 20000112 Result: Up-regulated in Transcription
  misc_feature: MA Experiment 20000112 PARAMETER Experiment Name: At_42deg_Heat_cDNA_P Parameter: Temperature (deg C) Value: 42 vs. 22
  misc_feature: MA Experiment 20000112 PARAMETER Experiment Name: At_42deg_Heat_cDNA_P Parameter: Timepoint (hr) Value: 2
  misc_feature: MA Experiment 20000112 PARAMETER Experiment Name: At_42deg_Heat_cDNA_P Parameter: Tissue Value: Aerial
  misc_feature: MA Experiment ID: 20000113 Result: Up-regulated in Transcription
  misc_feature: MA Experiment 20000113 PARAMETER Experiment Name: At_42deg_Heat_cDNA_P Parameter: Temperature (deg C) Value: 42 vs. 22
  misc_feature: MA Experiment 20000113 PARAMETER Experiment Name: At_42deg_Heat_cDNA_P Parameter: Timepoint (hr) Value: 8
  misc_feature: MA Experiment 20000113 PARAMETER Experiment Name: At_42deg_Heat_cDNA_P Parameter: Tissue Value: Aerial
  misc_feature: MA Experiment ID: 20000144 Result: Up-regulated in Transcription
  misc_feature: MA Experiment 20000144 PARAMETER Experiment Name: At_42deg_Heat_cDNA_P Parameter: Temperature (deg C) Value: 42 vs. 22
  misc_feature: MA Experiment 20000144 PARAMETER Experiment Name: At_42deg_Heat_cDNA_P Parameter: Timepoint (hr) Value: 1
  misc_feature: MA Experiment 20000144 PARAMETER Experiment Name: At_42deg_Heat_cDNA_P Parameter: Tissue Value: Aerial
  misc_feature: MA Experiment ID: 20000171 Result: Up-regulated in Transcription
  misc_feature: MA Experiment 20000171 PARAMETER Experiment Name: At_42deg_Heat_P Parameter: Age (day) Value: 14
  misc_feature: MA Experiment 20000171 PARAMETER Experiment Name: At_42deg_Heat_P Parameter: Organism Value: A. thaliana
  misc_feature: MA Experiment 20000171 PARAMETER Experiment Name: At_42deg_Heat_P Parameter: Plant Line Value: WS
  misc_feature: MA Experiment 20000171 PARAMETER Experiment Name: At_42deg_Heat_P Parameter: Temperature (deg C) Value: 42 vs. 22
  misc_feature: MA Experiment 20000171 PARAMETER Experiment Name: At_42deg_Heat_P Parameter: Timepoint (hr) Value: 1
  misc_feature: MA Experiment 20000171 PARAMETER Experiment Name: At_42deg_Heat_P Parameter: Tissue Value: Aerial
  misc_feature: MA Experiment ID: 20000173 Result: Up-regulated in Transcription
  misc_feature: MA Experiment 20000173 PARAMETER Experiment Name: At_42deg_Heat_P Parameter: Age (day) Value: 14
  misc_feature: MA Experiment 20000173 PARAMETER Experiment Name: At_42deg_Heat_P Parameter: Organism Value: A. thaliana
  misc_feature: MA Experiment 20000173 PARAMETER Experiment Name: At_42deg_Heat_P Parameter: Plant Line Value: WS
  misc_feature: MA Experiment 20000173 PARAMETER Experiment Name: At_42deg_Heat_P Parameter: Temperature (deg C) Value: 42 vs. 22
  misc_feature: MA Experiment 20000173 PARAMETER Experiment Name: At_42deg_Heat_P Parameter: Timepoint (hr) Value: 6
  misc_feature: MA Experiment 20000173 PARAMETER Experiment Name: At_42deg_Heat_P Parameter: Tissue Value: Aerial
  misc_feature: MA Experiment ID: 20000184 Result: Down-regulated in Transcription
  misc_feature: MA Experiment 20000184 PARAMETER Experiment Name: At_Shoots__P Parameter: Age (day) Value: 7
  misc_feature: MA Experiment 20000184 PARAMETER Experiment Name: At_Shoots__P Parameter: Tissue Value: Shoots vs. Whole Plant
ttggagaaaataaatatagaagaaagcctctctgctcgttttgcgtttccgagcaacaatgtcggtaactttgcacacgaacctgggtgacatcaagtgcgaaatcttctgtgacgaggttcccaagagtgctgagaactttttggcgttgtgtgctagtggctactacgatggtactatctttcatagaaatatcaaagggttcatgattcaaggaggagaccccaaggggaccggaaaaggaggaactagcatctggggcaagaaattcaatgatgagatccgagactcccttaagcacaatgcaagagggatgctgtcaatggcaaacagcggtccaaacaccaacggaagccagttcttcataacctatgcaaaacaaccacatctcaatggattatacaccatctttggcaaagtcattcatggcttcgaagtgcttgacattatggaaaagactcaaacaggaccaggagataggccgcttgctgagataaggctaaaccgtgtgacgatccacgccaatccacttgctggttaagtctaatgtggcagaaccgagccaagccaaaagtgttgttctctttatttgtttcgatagagctgacatgtacactcagaaactgaactaagaccactgtttcacccaattaaaaagtttgtactggaggatttaccaattactgtctt

SEQ ID NO: 20913 - protein, 160 aa, Arabidopsis thaliana
  peptide (1)..(160): Ceres Seq. ID no. 13580506
  misc_feature (1)..(159): Homolog of NCBI NO: 21746159 NR Description: peptidylprolyl isomerase-like 3; cyclophilin-like
  misc_feature (1)..(159): Homolog of NCBI NO: 19557636 NR Description: peptidylprolyl isomerase-like protein 3 isoform
  misc_feature (1)..(159): Homolog of NCBI NO: 14043400 NR Description: Unknown (protein for MGC:10732) [Homo sapiens]
  misc_feature (1)..(159): Homolog of NCBI NO: 6006361 NR Description: ESTs AU030008(E50477),AU078239(E50477) correspond a region of the predicted gene.~Similar to peptidyl-prolyl
  misc_feature (1)..(160): Homolog of NCBI NO: 30678211 NR Description: expressed protein [Arabidopsis thaliana]
  misc_feature (3)..(157): Homolog of NCBI NO: 27924331 NR Description: Similar to peptidylprolyl isomerase
  misc_feature (1)..(159): Homolog of NCBI NO: 24652460 NR Description: CG11777-PA [Drosophila melanogaster]
  misc_feature (1)..(159): Homolog of NCBI NO: 23508361 NR Description: cyclophilin, putative [Plasmodium falciparum 3D7]
  misc_feature (1)..(159): Homolog of NCBI NO: 28190012 NR Description: CYP10L [Mus musculus]
  misc_feature (1)..(159): Homolog of NCBI NO: 29028318 NR Description: cyclophilin [Homo sapiens]
MSVTLHTNLGDIKCEIFCDEVPKSAENFLALCASGYYDGTIFHRNIKGFMIQGGDPKGTGKGGTSIWGKKFNDEIRDSLKHNARGMLSMANSGPNTNGSQFFITYAKQPHLNGLYTIFGKVIHGFEVLDIMEKTQTGPGDRPLAEIRLNRVTIHANPLAG

SEQ ID NO: 20914 - protein, 111 aa, Arabidopsis thaliana
  peptide (1)..(111): Ceres Seq. ID no. 13580507
  misc_feature (1)..(108): Homolog of NCBI NO: 27924331 NR Description: Similar to peptidylprolyl isomerase
  misc_feature (1)..(110): Homolog of NCBI NO: 24652460 NR Description: CG11777-PA [Drosophila melanogaster]
  misc_feature (1)..(110): Homolog of NCBI NO: 23508361 NR Description: cyclophilin, putative [Plasmodium falciparum 3D7]
  misc_feature (1)..(110): Homolog of NCBI NO: 28190012 NR Description: CYP10L [Mus musculus]
  misc_feature (1)..(110): Homolog of NCBI NO: 29028318 NR Description: cyclophilin [Homo sapiens]
  misc_feature (1)..(110): Homolog of NCBI NO: 21746159 NR Description: peptidylprolyl isomerase-like 3; cyclophilin-like
  misc_feature (1)..(110): Homolog of NCBI NO: 19557636 NR Description: peptidylprolyl isomerase-like protein 3 isoform
  misc_feature (1)..(110): Homolog of NCBI NO: 14043400 NR Description: Unknown (protein for MGC:10732) [Homo sapiens]
  misc_feature (1)..(110): Homolog of NCBI NO: 6006361 NR Description: ESTs AU030008(E50477),AU078239(E50477) correspond a region of the predicted gene.~Similar to peptidyl-prolyl
  misc_feature (1)..(111): Homolog of NCBI NO: 30678211 NR Description: expressed protein [Arabidopsis thaliana]
MIQGGDPKGTGKGGTSIWGKKFNDEIRDSLKHNARGMLSMANSGPNTNGSQFFITYAKQPHLNGLYTIFGKVIHGFEVLDIMEKTQTGPGDRPLAEIRLNRVTIHANPLAG

SEQ ID NO: 20915 - DNA, 688 bp, Arabidopsis thaliana
  misc_feature (1)..(688): Ceres Seq. ID no. 12340083
  misc_feature: MA Experiment ID: 108434 Result: Up-regulated in Transcription
  misc_feature: MA Experiment 108434 PARAMETER Experiment Name: At_Root_Tips_cDNA_P Parameter: Tissue Value: Root Tips
  misc_feature: MA Experiment ID: 108461 Result: Down-regulated in Transcription
  misc_feature: MA Experiment 108461 PARAMETER Experiment Name: At_Germinating_Seeds_cDNA_P Parameter: Age (day) Value: 1 vs. 0
  misc_feature: MA Experiment 108461 PARAMETER Experiment Name: At_Germinating_Seeds_cDNA_P Parameter: Tissue Value: Germinating Seeds
  misc_feature: MA Experiment ID: 108462 Result: Down-regulated in Transcription
  misc_feature: MA Experiment 108462 PARAMETER Experiment Name: At_Germinating_Seeds_cDNA_P Parameter: Age (day) Value: 2 vs. 0
  misc_feature: MA Experiment 108462 PARAMETER Experiment Name: At_Germinating_Seeds_cDNA_P Parameter: Tissue Value: Germinating Seeds
  misc_feature: MA Experiment ID: 108463 Result: Down-regulated in Transcription
  misc_feature: MA Experiment 108463 PARAMETER Experiment Name: At_Germinating_Seeds_cDNA_P Parameter: Age (day) Value: 3 vs. 0
  misc_feature: MA Experiment 108463 PARAMETER Experiment Name: At_Germinating_Seeds_cDNA_P Parameter: Tissue Value: Germinating Seeds
  misc_feature: MA Experiment ID: 108464 Result: Down-regulated in Transcription
  misc_feature: MA Experiment 108464 PARAMETER Experiment Name: At_Germinating_Seeds_cDNA_P Parameter: Age (day) Value: 4 vs. 0
  misc_feature: MA Experiment 108464 PARAMETER Experiment Name: At_Germinating_Seeds_cDNA_P Parameter: Tissue Value: Germinating Seeds
  misc_feature: MA Experiment ID: 108572 Result: Down-regulated in Transcription
  misc_feature: MA Experiment 108572 PARAMETER Experiment Name: At_Drought_cDNA_P Parameter: Timepoint (hr) Value: 1
  misc_feature: MA Experiment 108572 PARAMETER Experiment Name: At_Drought_cDNA_P Parameter: Tissue Value: Aerial
  misc_feature: MA Experiment 108572 PARAMETER Experiment Name: At_Drought_cDNA_P Parameter: Treatment Value: Drought vs. No Drought
  misc_feature: MA Experiment ID: 108573 Result: Down-regulated in Transcription
  misc_feature: MA Experiment 108573 PARAMETER Experiment Name: At_Drought_cDNA_P Parameter: Timepoint (hr) Value: 6
  misc_feature: MA Experiment 108573 PARAMETER Experiment Name: At_Drought_cDNA_P Parameter: Tissue Value: Aerial
  misc_feature: MA Experiment 108573 PARAMETER Experiment Name: At_Drought_cDNA_P Parameter: Treatment Value: Drought vs. No Drought
  misc_feature: MA Experiment ID: 20000179 Result: Down-regulated in Transcription
  misc_feature: MA Experiment 20000179 PARAMETER Experiment Name: At_Germinating_Seeds_P Parameter: Age (hr) Value: 6 vs. 0
  misc_feature: MA Experiment 20000179 PARAMETER Experiment Name: At_Germinating_Seeds_P Parameter: Tissue Value: Germinating Seeds
  misc_feature: MA Experiment ID: 20000180 Result: Down-regulated in Transcription
  misc_feature: MA Experiment 20000180 PARAMETER Experiment Name: At_Germinating_Seeds_P Parameter: Age (hr) Value: 24 vs. 0
  misc_feature: MA Experiment 20000180 PARAMETER Experiment Name: At_Germinating_Seeds_P Parameter: Tissue Value: Germinating Seeds
  misc_feature: MA Experiment ID: 20000184 Result: Down-regulated in Transcription
  misc_feature: MA Experiment 20000184 PARAMETER Experiment Name: At_Shoots__P Parameter: Age (day) Value: 7
  misc_feature: MA Experiment 20000184 PARAMETER Experiment Name: At_Shoots__P Parameter: Tissue Value: Shoots vs. Whole Plant
  misc_feature: MA Experiment ID: 20000224 Result: Up-regulated in Transcription
  misc_feature: MA Experiment ID: 20001557 Result: Up-regulated in Transcription
  misc_feature: MA Experiment 20001557 PARAMETER Experiment Name: At_Drought_Soil_Dry_P Parameter: Age (day) Value: 27
  misc_feature: MA Experiment 20001557 PARAMETER Experiment Name: At_Drought_Soil_Dry_P Parameter: Organism Value: A. thaliana
  misc_feature: MA Experiment 20001557 PARAMETER Experiment Name: At_Drought_Soil_Dry_P Parameter: Plant Line Value: WS
  misc_feature: MA Experiment 20001557 PARAMETER Experiment Name: At_Drought_Soil_Dry_P Parameter: Post Timepoint (hr) Value: 3
  misc_feature: MA Experiment 20001557 PARAMETER Experiment Name: At_Drought_Soil_Dry_P Parameter: Post-Treatment Value: Re-Water vs. No Drought
  misc_feature: MA Experiment 20001557 PARAMETER Experiment Name: At_Drought_Soil_Dry_P Parameter: Timepoint (day) Value: 13
  misc_feature: MA Experiment 20001557 PARAMETER Experiment Name: At_Drought_Soil_Dry_P Parameter: Treatment Value: Drought vs. No Drought
  misc_feature: MA Experiment ID: 20001558 Result: Up-regulated in Transcription
  misc_feature: MA Experiment 20001558 PARAMETER Experiment Name: At_Drought_Soil_Dry_P Parameter: Age (day) Value: 27
  misc_feature: MA Experiment 20001558 PARAMETER Experiment Name: At_Drought_Soil_Dry_P Parameter: Organism Value: A. thaliana
  misc_feature: MA Experiment 20001558 PARAMETER Experiment Name: At_Drought_Soil_Dry_P Parameter: Plant Line Value: WS
  misc_feature: MA Experiment 20001558 PARAMETER Experiment Name: At_Drought_Soil_Dry_P Parameter: Post Timepoint (hr) Value: 6
  misc_feature: MA Experiment 20001558 PARAMETER Experiment Name: At_Drought_Soil_Dry_P Parameter: Post-Treatment Value: Re-Water vs. No Drought
  misc_feature: MA Experiment 20001558 PARAMETER Experiment Name: At_Drought_Soil_Dry_P Parameter: Timepoint (day) Value: 13
  misc_feature: MA Experiment 20001558 PARAMETER Experiment Name: At_Drought_Soil_Dry_P Parameter: Treatment Value: Drought vs. No Drought
tccgtcaaccctacaaagtcctttgcgacggcactttcgtccaccatcttgtcactaatgagatcactcccgccgacactgctgtctctgaactcctcggaggtcccgtcaagctcttcaccaccagatgtgtgattgcggagttggagaaactgggtaaagattttgcggaatctctcgaagctgcccagacgcttaatacagcaacatgtgagcacgaggaggcaaaaacagcagacgagtgtttgtcagaggtaataggggtacaaaatactgagcatttcttccttggtactcaggacgcggagtttaggagaaagcttcagcaggagtctatcgttcctcttgtgtttggtctaaggaacatactgctgattgatcaaccttctgatttccaacgtcagagtgccaaagactctgaaaataagcgcttaactatgaccgatacggaaaaaaagttgttggtgaaacagactgcgaaaatcatagcttctaatagaaaagaagcaacaattgcaaatgaagaatggggaatgcctcgagtagtttctacaaaaaatggacttggtgtgaaggatagacctcagttcaagcgaaatagagccaagggtccaaacccactttcatgcatgaagaaaaagaaggagaatcctcaatccaaatccaaagccgattctaactctaatgc

SEQ ID NO: 20916 - protein, 228 aa, Arabidopsis thaliana
  peptide (1)..(228): Ceres Seq. ID no. 12340084
  misc_feature (29)..(128): Pfam Name: Protein of unknown function, DUF652 Pfam Description: Protein of unknown function, DUF652
  misc_feature (3)..(150): Homolog of NCBI NO: 39586538 NR Description: Hypothetical protein CBG21174 [Caenorhabditis
  misc_feature (1)..(216): Homolog of NCBI NO: 19075891 NR Description: conserved protein; putative tRNA synthetase class
  misc_feature (1)..(220): Homolog of NCBI NO: 14150118 NR Description: hypothetical protein MGC14595 [Homo sapiens]
  misc_feature (178)..(227): Homolog of NCBI NO: 26452330 NR Description: unknown protein [Arabidopsis thaliana]
  misc_feature (185)..(223): Homolog of NCBI NO: 26335161 NR Description: unnamed protein product [Mus musculus]
  misc_feature (185)..(223): Homolog of NCBI NO: 21313442 NR Description: RIKEN cDNA D530033C11 [Mus musculus]
  misc_feature (1)..(129): Homolog of NCBI NO: 26335161 NR Description: unnamed protein product [Mus musculus]
  misc_feature (1)..(129): Homolog of NCBI NO: 21313442 NR Description: RIKEN cDNA D530033C11 [Mus musculus]
  misc_feature (1)..(227): Homolog of NCBI NO: 30686117 NR Description: expressed protein [Arabidopsis thaliana]
  misc_feature (1)..(227): Homolog of NCBI NO: 25408336 NR Description: hypothetical protein At2g34570 [imported] -
RQPYKVLCDGTFVHHLVTNEITPADTAVSELLGGPVKLFTTRCVIAELEKLGKDFAESLEAAQTLNTATCEHEEAKTADECLSEVIGVQNTEHFFLGTQDAEFRRKLQQESIVPLVFGLRNILLIDQPSDFQRQSAKDSENKRLTMTDTEKKLLVKQTAKIIASNRKEATIANEEWGMPRVVSTKNGLGVKDRPQFKRNRAKGPNPLSCMKKKKENPQSKSKADSNSN
